United States Patent Application Publication US 2004/0123343 A1 - sequence listing, part 15

SEQ ID NO: 40277 - DNA, 6710 bp, Oryza sativa
  Clone ID: PAT_MRT4530_43735C.1
atgggggagccggacgagctgccgccgctgccgctcgccctccacccgccgcatctcatcccgccggcgcccgccgccgacccccgcgccctctccttcctccccgacctcggcggcctcccctgggtcgcctacggcgccgcctccttcctcgtcgtctcccacctcccctcccctccccgcgagggaagcagcagcagcggcggcggcggcggcggcgacgacgatggcccgttcttccgccaggccatcgacctccgtgcccccgtgtccgccgtctcctggtgccgacgtggcgggggcgagctcgccgccgccgccgggagctccgtgtccgtgttccagccggcgccgtcctcttccccaggatcgtttggctgggtgctgagatgggctatcaccgagaccttcgccgtcgccgccgtggcctggacgggctccggcgacggcattctgttggccggcgagggcgttgccatgtgggctagggcagaatcctcctggaagctcgcgtggaggtgctcgcctcaggtggctcagtcccttgcctccgctacacacttcctccagggtcccgtcgcgacagcggcggctactccttcttccgagggcggcgtgcctcctgttctggtgattgtgaatgatgccaaggtgggtgtggagaaagtcgagcttgcgcaccctaaaccagtatccatgatccagtggagacctaggtcgttgtttgtcagtgatcagtctgaagtgaggcgagagatactcatgacgtgctgcttggacgggactctccggctgtggagcgaggatgaggcagccaagtcaaagaagcatcgggttttgcaaaggtccttcagtgtcattgcggtaattgagatgagcaacactctgaatggagtgctgggagttgatataactgtgaaatgggcaattgaaactggcagtgttgtatcgagagatgaagatgacaatttcacattgttttcaggtgaccctgggcacaaccaggtaggcaaatgcgagtggttggcagatgtggaatactcatgtctgtgttgggctccttctgttattcaacaaaataggtttcttgtccttggaagtgaaaaaggagccgattgttttgtagtcagtattcagaacgaaggggatgttctttcatgtcagaaaatgttcacaattcctttctttgaagatcaagggagacatggaacttaccttaatgctgatatgttttcagcagttatttgtaaaggttcttcagtcttccctacatgcctggatggagaatatcctacatgtgtttctgcaacgccactgaacaatactgtattatctctacagcagcatggttcaggaactgcttcatgttatcacattgctactgggtattctgatggcactgtgaaactgtggaagatgtcttttgcagataaccctttgcatactgagaaagagagccacatctggcaactagtaggcacgtttggtgccgatcgaggaccaattactgcaatttcactgtccaattgtggtagaattgctactgttggtagaaatgttcagaagaataccacctccattcatatctggaaagcagtaaaactcatgggagatgggagttttctcctggaggatgcactaacgcttcaaggttctgttgttggtttggattggctatctttaggcgatgggagatttttacttgcagtctaccttctcaatgagttgcacatatattctcataagcacccttcctttaagaatgtattacacactgtgaattcaaaagagaagcatctttggagctgtattgcactatcccattctccacatgacattgctagcttcctttgggggccaaaggcaactggtgtgcttgttcataagaatcatcttgcactcttcagttcatggttagtaagaagagccaatgaatctagtacccagatatgtgattgtccagctgcagacatacatgaattgccttgtactaagcattttaatgaagatatctttggtagattcagtttatcagaaaattacagcaacacaatgttactacagaaacacagtgctcactgttctaatgatctatggaacttgttggatatagctgccaaaatgagtggacctctggcatcatatcacccgagagcacttattcagtctctttattcaggtcaatggaaacgggcaaacactgttctgcagcatcttgttcaatccatgcaagcaaataaaatatcaaacaccttgttggagtgcagtttctgtggtaaatcatgccataatattcctgaatgccctttatctgaaagcttcaccgatatgacatctaatgacatatctaatagagggttactttggggtgacaatcaacgtagcacagcctttagtttgctatcaccatcaaattcatatcctcggatggaggatatcaacaccaccactagcacatctcaaagttcagaaataaataagctccttgctacgaatgttagcatatcaacaataagtgacatggagagaacccagatagttgcactttctgatcttttgggtaaaattactgatcagagccatgcatctccctataaaagccttgatgaagcagggagaaggttctgggttgctgtgcagttcgaacgcctatatgcacttaggagatctgaagatccatccagtgccgaagtcttccatgttgattctgcttctatcgcgtgggccttacagtctgattgtcaggatgatctacttaattctgttcttcctgcagaaccaagttggtctgagatgcgaaaccttggtatggggttatggtacaccaacgtgtcccagttaagaaccaagatggagaagttggcaaggctgcaatatcttaaaagcaaggacccaaaggactgtgctcttctctatatagcattaaatagaacaaaagtattagttggcctattcaagattagcagagatgaaaaggataaacgtctctatgagtttctctccaggaacttccaggaagaaaaacacaaatctgctgctctgaaaaatgcatatgtgctaatgggaaggcatcaatgggagcttgctatagcatttttcctccttggaggtgatacatcctcagccatcagtgtttgtgcaaagaaccttcaagatgaacaacttgctattgtaatttgtcgacttcttgagggatctggagggcccttggagcgtaatctcattgctaatgtactgctccctgaagcagttgataaaggagaccactggctttcaagcctacttgaatggatgttagggaactactctcagtctgtgaatcaattacttgattgccacctcaagtcactgattgaagaatccagcattcccggtgatacaaatgtctttgcagaccctggagtgggtcagtattgtgcaatcattgcgacaaaaagtagtttcagaaactgtgttggtgaagctcaatctgcaaatttatctaagctttcattagcaatggcttcatgcgccttgaacagatgtggactgcctcttgaagcacttgaatacctatgttgtaactcgggcatagagggaaaggacaacacctcactggatggcggagacaagaagattgtttatggaatattgaaccctttccatgcttcgtccaactggctctcagcatctgtagtcagtgatgttgaatcaaacctgaaaataactatggcttcaaaatatctgtcgcgcgtgctgagaaatcagtcactctgttcacggtgcagcctaccactaactaaagataaggtcctgcaagaattcaacagtaatcacgtgaatgaactttcacgtgatgtcaaggcagcgctacaagtattcgataaaaaattctcacttcaagttgctgatatagctgagaagatccttaccttttgttgcaacgatggtatattttttctcgcgtacgtgttgttatggggtagtatatcatcagatgttggaaccggtcgtacatcagctatgcttacagttatggacctccttgaatacaacatggagttttccttttcttggttatgtcatgacataaaagcattgcttaccatgaccagtccagttataggtgcttgtgtcaacagagagtcctttcaagtactattagatcagttgctgcaagctgtacatgataaaattcatggtgtatcaattggcacagatgggggcacagtcaatggtttgttgtgtaatatacaacaagaaagaagtgagaatcagagtcttccaattgatgaaaaatggcatttgataggtatttctttgtggactcgattgtcatctttcatgaaacagtttttgactgagttcgttgaaaaagagagaattgaacttgaaactagtgcaagtgatgtggaattcaaggacctcatatcttcagttgttgcaaagtttttgatgggctccctccattttgtgtcatctttgttagtaaaattgcatgcttcatttttcagagagaaagtactgaagaagtcaaattcaagtgtgcttttctggttatctcagccaaggtccaacaacaatagccatgagcagttctcaagtatttttcagcttgctaacagtgagaacatcgaagtcttttttgatactttgtgggaaatatctgctcatcctgtggatatctgcactgcttttgtggatgaagaaatgaattgctttcctttaaacagcattagtttaacacgatcctggaaggctatgacagaagctacattagttgagtctgaaaataattttgctcaaagaagtgaagaaaatcgtgacaatttaagttccaagaacaacgagaaaatacagagatcaattgacaataccccttatggtgtggaagtcactcttgaacctaaaaggaaaggtttaattgcagattttgaaagacccagagaacttgtaaggagaaatggtgaacttcttgaggcaatatgtctcaactctatcaatgagcaacaaggtgctatcgccaccaatcggaagggccttgttttcttcaactggaatgacaagcaagataacaaaaatttagcagagtatatatgggcaggatctgattggcccttggatgggtgggctggttgcgaatctacacctacttcaacttctttttctcctagtgttggtcttggcagaagaaaaggatcccatcttagttcaggtggaccaactattagtttaggttcattggcaaaacctggaagggacttaactggtggtggagcatttggaattccaggttatgctggtatcggcgcatctggatttgggtggggggaacctgacgaattcgaagatttcgttgatcctccagcaacactcgagaacatccattcaagagcattgtctcgccacccatctttgccattgttgctagttgggtcaagcaatactcatgtttatttatgggagtttggcaaagacagtgccatggctacctatggtgttctccctgctgctaatatcccaccaccttatgcccttgcttccatatcagctgttcaatttgattattatgggcagcggtttgctactgctgcattagatggtacagtttgtacatggcaagttgagagctcccaaccttaccagtctattcttattgatcacagggatgtcgcatttctgactgcaagtggatcagttcttgctgcagctggatgcagttcaaatggtgcaaatgttgttatttgggatacattggcgccaccatccacttgtcaaacttctattatgtgtcatgaaggaggagttcgttctctttctgtgttcgatagaaatataggctgtggatctatctcaccgctgattgtaactggtgggaaaagtggagatgtaactttgcatgattttcggttcatctctactggaaagactaagcatcacagaagttccaacgagcatgatgttaaggcatcttcaacttcaatgcatgacactaagtctggaacttccaacggtgttagcaacagtgggatgatctggcatataccaaaggcgcatacaggtagtgtcagcagtgtatcaaccatcccaaataccagtttgttcttaactggaagcaaagatggagatgtgaagctttggcatgccaaaagttctcagctagtcttccattggcaaaagttgcacgagcggcacaccttttttcaaccaacttctaggggctttggtggtgttgttagggctgctgtaacagacatccaagtcttacctaatggttttgtctcgtgcggtggggatggttctgtgaaacttgtgcaggtaaaaaatgattttgcagatgtacgcccacattagaacaaacagaagggaggagatatgctagcgatggttttgttgtggtgggttcagattgttcctttgatcaattgatcttattctgcaattttgttttcccatgagatgttttgctgttgcaagggatggcatagcaagaatgtagccataaagtaagagctgggcagaatctgaacagtttaatgggatttgtatacaaaggtactcctgttagctgtctggatgtggggcatggaactcgcgtcttgtatgcggtaggtcatgtaggtgtcgatttttgtttgtccatgcatgtccattatatatacaaggaaatgcaaaattttcccataaaaaaaaaaaaaaaaactcaagactagttctctctctcctcgtgc

SEQ ID NO: 40278 - DNA, 4888 bp, Oryza sativa
  Clone ID: PAT_MRT4530_43736C.1
atggcaggtccagaggataaagatgaggagggtgcatctcattccccacgcaccaaaggcatcatccaatactttacaaggcaagtgaagcagcacacagaaggacttgatacagatttgcaggtgacaaatgagaagattggacaattggagtccacgcagatctccacaaacactaagcttacagggttggagacagcggtcgcccgcattgacactagccttgctgctcttgtgaggcattttgatgctctcaatgctggaggcaatggtgggggtaatgacgatgacattgacggagagtacgtcgaggataatttagaggatgaatatattgctgacactgaacaagatgatcgagatgctcaagatcgtcgacggctacacaacaatcgacgagattcctcctttgatggaaaatatgatcctgatgcgtacctctcttgggagattgctgttgaccaaaaatttgcatgccatgaatttcttgagaacactagagttagagctgctacgagtgagttcaccgattttgcttcggtttggtggatagaacatggcaagaaaaatcctaataacatgccacaaacttgggatgctttgaaacgggtcatgcgggctagatttgttccttcttacgatgcatgtgacatgctgaataggttgcaacaattgagacagggtgcgaaaagtgtagaggaatattatcaggagttacaaatgggcttgcttcgttgtaatttagaggaaactgaggacgctgccatggctagatttttgggtgggttaaaccgcgagatttatgacatcgtagactataaagattacactaatatgacccgattgtttcatcttgcttgtaaggctgaaagggaagtgcagggacgacgtgctagtgccaaggctaatttttctacaggtaaaacttcatcatggcagacacgcaccactcctccggccggccgtactgcttctccatcttccacacccacaaccagtcgagcagcacctcctccatctagtgacaagtcagcggcaaaggccgctcagccagcaccgagtgcttcttcaatggcatccacaggccgaatgagagatgttcagtgccaccgttgcaagggctttgggcatgtgcagcgtgactgccctagcaagcgagttttggtagtcaaaaacgatggtgagtactcctctgctagtgatttcgatgatgatacacttgctttgcttgcggctgaccatgcagataatgagccaccggaagagcacattggggctgctgcatttgcagatcactatgagagcctcattgtgcagcgtgtccttagcgcacaaatggagaaggcgggagcaaaatcagcgacacacgttgttccaaacaaagtgtgtcgtcaaagagcgttgttgccgcatgatcattgatggaggtagctgcaacaacttggctagcagcgagatggtggagaagcttgcacttagcaccaaaccgcacccacatccatactacatccaatggctgaacaacagtggtaaggcgaaggtaacaaaactggtgcacattaattttgcaattggaaattaccatgatgttgttgaatgtgatgttgtgcccatgcaagcatgtaatattctgctaggtagaccatggcaatttgatagggattctatgcatcatggtaggtccaaccagtactcttttctgtaccatgataagaaaattgtgttgcatcccatgtctcctgaagatattttgcgtgatgatgttgctaaggctgccaaatccaaatgtgagagtgataaaaaagagcaatctgatggcaagaaacctgagacaatcaatttgaaacccaaatgcttacttgctactaaatctgatattactgagttgattgcatcaccttcagttgcctatgctttggtatgcaaagatgctttgatttcacttcacgatatgcagcattctttgccccctgctgttgctaacattttgcaggagtactctgatgtgtttcccaaggaagtgccaccggggctgccaccggtgcgcggcattgagcatcaaatcgacttgatcccaggtgcttccctaccgaaccgtgcgccataccgaaccaaccctgaggaaaccaaggagattcagcgtcaagttcatgagttgcttgataaagggtatgtacgcgagtctcttagtccatgtgcggttacggtaattttggtaccaaagaaagatggttcatggcgtatgtgtgttgattgtagagctattaataacattaccattcgatatcgtcatcctattcctaggttagatgatatgcttgatgaattgagtggctctattgtgttctccaaagttgatttgcgtagtggttaccaccagattcgtatgaagttgggtgatgaatggaaaacagcatttaaaacgaagtttgggttgtatgagtggttagtgatgccttttggtttaactaatgcacccagcactttcatgaggttgatgaatgaggttttgcgtcctttcattggaaaatttgtggtggtctactttgatgatatcttgatttacagcaagtctatgggtgaacattttaatcatttacgtgctgtttttaatgctcttcgtgatgcacgtttatttggtaaccttgagaagtgcaccttttgcacagatcgagtttcttttcttggctatgttgtaactccgcatgggattgaggttgatcaagccaaggttgaggcaattcagagttggccgactcctaaaacggtctcacaagtgcggagctttctaggactcgcggggttctatcgccgctttgtgcaggatttcagcaccattgctgcaccattgaatgcgcttacaaagaagggagtgcctttcacttggggcacatcacaagagaacgccttccacatgttgaaagataagttgacccatgcacctctcctccaacttcccgattttaataagacttttgaacttgaatgtgatgctagtgggattggattgggtggtgttttgctacaagaaggaaatcctgttgcatattttagtgaaaagttgagtgggcctgttctgaattattctacttatgataaggaattgtatgctcttgtgcgaactttagaaacatggcagcattatttgtggcccaaggaatttgtcatacattctgatcatgagtctttgaagcatattcgtagtcaagggaagctgaaccgtagacatgctaaatgggttgaatttattgaatcttttccttatgttatcaaacacaagaaagggaaggagaacatcattgctgatgctttgtctaggagatacactttgttgacacaacttgactacaagatttttggcctggaaacaatcaaagaccaatatgcgcatgatgctgattttaatgatgaagcgcatggaggcggtttgatgggacattttggtgccaagaagacacatgacatccttgctagtcatttattttggccacagatgcgaagagatgttggcagggctgttttgaagaaaaatatcaagatgtgggaagaatgcttgcctcatattgaatttgcttataatcgttccttgcattctactacaaaaatgtgcccatttcagattgtgtatggtttgttgcctcgtgctccaattgatttgatgcctttaccatcttctgaaaaactgaattttgatgctaagcaacgtgctgagttgatgttaaaactgcatgagacaactaaagaaaacatagagcgcatgaatgctaagtataagtttgctggtgacaaaggtagaagggaattgaattttgaacctggagatttggtttggttgcatttgcgaaaagaacgatttcctgatttgagaaagtctaaattgatgcctagagctgatggaccatttaaagtgttagcaaagattaatgagaatgcatataagattgatttgcctgcagacttcggggttagtcccacatttaacgttgcagatttgaagccgtatttgggagaagaagatgagcttgagtcgaggactactctaatgcaagaaggggacgatgatgaggacatcaacaccatcgatacatccacgtccccccatatacagcatgatggtcctattacccgcgctcgtgcacgtcaactaaattatcaggacgagtgccctcgtggccgggttgacgcgcaccacaagttcgcggcgaccattggagacggtgtatcggttgctaaggcgcagcgtctttggacgagtttcgagttcttgccaccgcacatcgccaccctcatcaattttgtcgtcatcaccaccgtcaccgccatcgcaaaaaagttacatccaattcttcccatcttcgccgggttcggcaaatttaaaatcgccaaattccgcttgcaaaattctgttttcgtggcgagaagctttgggacctattcggatagaactttgaaaaattctacaagcttcatactttcccaccgacagctccaccacaaacccgactacagcttgacaggtcccgaggataaagacgaggagggtgcatctcattccccacgcaccaaacgcatcatccaatattttacaaggcaagtgaagcaacacacagaaggacatgatacagatttgcaggtgacaaacgagaagattggacaattggagtcaacgcagatcgccaccaacaccaagcttacagggctggagacatcggtcgcccgcattgacactagccttgctgctcttgtgaggcattttgatgctctcaatgctggaggcaatggtgggcgtagtgaagaggacatcgatggagagtacatcggggataattgggaggatgaatatattgctgacactgaacaagatgatcgagatgctcgtgatcgttga

SEQ ID NO: 40279 - DNA, 513 bp, Oryza sativa
  Clone ID: PAT_MRT4530_43737C.1
atggtggtccgtcaaccatggatggttgctcaagctcatcgactaaagatcaacgcaacgtcatccaccacctattacgcgcacgctgattcctccgtgtccccctctgtgcacccacgagccaccagccatccggagctgttcgcctgccacgtcgatcgtaacaccctatttgagctggccatcagcaccgtcctcgagaagccgacaggagtgcagcagcagcagaggctgcatggggctaatgtccacaaggaggaggaagatgagtcgcgtcagtcggcgcagctccaagatacgggaccgacgggaggtggcggtggcggcatgcacgcttgcacgcccaaacgcccaatcaatcgatggccgaggaaggacaacccagtggccggcgccgcccacgacgccgaaacggtggccaccaccgaatgtgtgctggatcgcgaggaccggaagttggcaggaatcttcagtgtagttcagtggaatggtggcgcatggggaaaaaggtga

SEQ ID NO: 40280 - DNA, 1476 bp, Oryza sativa
  Clone ID: PAT_MRT4530_43738C.1
gtagcaaacatggcgagctcttccaatgtcgctgtgaactctcttgctggccatgtcatcgcagaaaaattgaaaaggggaactatcttgtctacaaggcacaagttgtccctcccgtccatggtgctcggctggaaggatacctgaccaacgcaagcaaggccccagatgctgaattcagctcctctgagaaagatggcaagaccatcgtgcaaccaaatctagcctatgaagcgtggattgcttcagatcaaaaagttctccgatatcctaaaatacttgtcgctttaagttcttgttcgtaacgtttaatcattcgtcttattcaaaaaagtatgaaattattatttattttgtttgtgacttactttattatgaaaagtaattcaagtatgacttatccttttatatttgcactaatttttcaaataagacgaatggttaaacgttgcaagtaaaaaatcaaagcgaccacttatttagaacgaggtagtacatcgtttcttctttttcaaaggaagtactaactcaagttctcaacttatcaactgttgcagaagtgtcgggaaagcacatcttgttcctgtctaggaggtttacgcgcagctccaaaggttcgagaaccggatgaatgaagctgtgacaagaggtggtgaactctttggccaacatcgccaagcgcagtgaacgcaacggtggttgcttcaacttcaatcgaggtggcaggacagccgcagatggtggtggtcgtggtcgcggcagaggccatggtcgcaacaacactggaggctttggaggccgtacatgcaacgccaacaacaaacatcctctttgtcaactttgcagaaaaacagtccacactgtctttgattgttggtacaggtttgacaagagttcgttccaaccgagagaagtgttgctgccgtctccaacttgtatggggttgacatcaactgatacattgataccggtgcaacggaccacatcaccgtgagatagagaagttgacggttcgtgacaagtataacgacaaggatcaagtccatacggcaagtgaatcaggtatggatattgatcacactggccattcaattgttcatatatatgcctctagtaatcacaagttattcttcaaaaatattctacatgttccaaaggcaaaaaaagaaaaaaaaatcttgtttcagttcatcgctttctctatgataatcattcctttttagaagttcacccgttctattttttgataaaagatcgggtcacgaagaacacgcttcttaaagggtggtgtcgccatggcctctatccccttccttcagcatccagagagggctatggagtcataaaacctactgtcattgggtggcatgatcgcctaggacatccatcctagtccacggtaaaaaaaaaatttcggaaccagaatgttcctacaagcagttacacaaaattgttatttgaccaactgtctgaaga

SEQ ID NO: 40281 - DNA, 1347 bp, Oryza sativa
  Clone ID: PAT_MRT4530_43739C.1
atggaggccttgcctccggtggcggtggcggggacggtgctggaggaccttcccgaggacgcgctgctggcgatcctggcgctgctggcgccgacggacgcggcggcggcggcgtgcgcgtgccggaggctggcggctgccgcgtcgtccccgtcgctcccgctcgcgctcgctctccgcctcgggctgcccccgccgcggccgctcctccccgcctctgccgcgcgcctcctccgctcccttcaccgcctccgccgcctgctcggcctctggcgccgcctcccctcctcctccttctccggctccggctaccgctcgacctcgagctcgtcttccctcgccgcgttcgagtgggccccgggcggaaccctcgccgcgtcgctcctcgcgccctccgcgcgcggcctcgccgtcgccaagtcccccttcgtgaccctctccatcgacgagaccggcgagacggtggccgccatgggggacgtgccggtaagcgtcaatttcgtcgggaacaaccacattgtggtggaggccgcagcggcgtcgtccggggacgacgacgacgaggccgcaatggagggaggctccccgccggaggtgatgtacatgcatttcgctaaccggaggagccccggggcggggaggaagaggaggagtaagcaggggaggagaagaggccgtgcaatggaggccgagcacttcgtgaggattgcggatgccgagccgacggaggcgcggcctctccaggggctgtggaagttgatcgctagactgcggttgcatactaagggaatcatggccattatgcagcttactggatgggttttcttactagctcatgcattgggctacatgacctgtcgaaacatggagaagtcccatctagcaacccctaagtcattctggggaataagtgagagtaggactcttgaattttaccttgtcacctatgatgacattggaggtatcacttgtcgacaagttagtgatacaaggggtcaaaactcagggttcacccctatcttttggactacaaatacaacatttcttgaacaaccattctctgagaaggagctggatcattatattagacgtgaacatattcaaggcgtggattccgatcatgcagcaactgagaacagagctatctctcggatcttgtgcatcaattccagttatgatgttgtcgatcatcatctgtcagctcccttagatgatatgaggaatgtggagggaagaatttggctatatgatgatggaacctttgggttcgggttcagtgggagtaattcaattatagatctaaagcatgtctcctccgatggttgtattcttgatgctttgcactaa

SEQ ID NO: 40282 - DNA, 243 bp, Oryza sativa
  Clone ID: PAT_MRT4530_4373C.1
atggaggaggggcgcgagcacgccaggcatggaggcggagacgagagtggcgcgaccgacggagagggcggcgagcgcgcgaggcatggaggcggaggcgagagcggtgtgactggcgaagcaaccggcggagagggcggtgagcgcgcctggcatgaaggcggaggcgagagcgacgcgacctcggcgagggcggataacgtgatggctatattcgcaggaatacgcgacctcgtatactag

SEQ ID NO: 40283 - DNA, 406 bp, Oryza sativa
  Clone ID: PAT_MRT4530_43740C.1
gtcaacaccctttctgtcatggttacggataagacatacctcctattcttcgacttatggaatatacggatatgggataccttcacgtacacagattgttcctatgtacgccgtgggaatctgtcacaaattatgaaaaatatctctacgattcaagtgatttccaaaatcctgctcggagtcttacttggagatcaagatggtccacggtataaaagggacccccagggaggggtgaaaggcatagaatttcatcatcaacacacccaccatagtttatgaagctggagttcgtcgagccaagtcgccgagggatctcgtcgaatatatcgattacgatcttattctcattccaacgtaccctaatactctaatcattcggtctccgagtatcactcgtcgacac

SEQ ID NO: 40284 - DNA, 210 bp, Oryza sativa
  Clone ID: PAT_MRT4530_43741C.1
atgatcgatgatccatgggcgcacgggtcgctcgccgcggtacgaacgtgtacgcgcgtgtggcagaagggtgtcgcgggggcggcgccggccacaccgcggcgcgacggagaccgctgcgtggcgatatggaggcagcggcgctttcccgctggggccgagtgcctctctcgtccaaccgcggtctcgatcgacggcgacgtacgcttg

SEQ ID NO: 40285 - DNA, 2073 bp, Oryza sativa
  Clone ID: PAT_MRT4530_43742C.1
atgactaagcctcttccctccaccattcttctgatctgcgtttcagccatcgggatggtagccgccgacgtccccgtggctggacacccaggctgccagacgaggtgcggggacgtcgacatcccgttccccttcggcatcggcgatcactgcgcaatccaccatggcttcaacatcatctgcaagcctgtcaacggcaccaagaggcctttcaaggggtcgtttgaggtgacgaaaatctctgtgcgcgatgccaaagcctggatgaagatgcggatctcttggttctcatacgaggataacaagattttcatcatcggttgcaatacaatggcctacatgagaggtgtttcctatgtcataggttgcttgtccacatgctccgatcaaccaaaaaatggttcttgctctggcgctggctgttgttcggtggatgtcccgccagacctgggttatcttgaggcttacttcaataaagactataactcctcagaaatcagctacagcagttgtggctacgtggtagtgatggaaaaggctgtcaccacttacattccctcaacaaacttctgggatgactacaacgggactgttccggccgtgatggactggataattacatgggagacatgcgaggaagcgaaaacgaacatgagttcatatgcttgtgttagcaacaatagcgaatgcctcaattcaacgaatgggagaggttatcgctgcaagtgctccaaggggttcgatggcaatccttacgtcaaggacggtcttcttggatgcagagatatcaatgaatgtcttgataacactacttatccatgcgctggaatttgtgaaaatacaatcgggagttacaaatgttcttgccctcaaggacaaaatgagctggctcggggtgtctgtgttccagatcagaagattcagaagtcccaagcttgggtgatgcctgttgtaggggcaagtgttggatttgtcatacttgtgatcatggcaacttgttcgtacttgatccgcgagagaagaaagctgcaacacatcaagcagaaatattttaagctacacggtggtctactgctgtttcaagagatgaattcaaatgaaaggaaatcatttacaattttctcagaagcagagttgcagcatgctacaaacaagtttgacaaaaaccaaattcttggccatggtggtcatggcactgtttacaagggacttctcaaggacaacactaaaatagctgtcaagaaatgcatgacaatggatgagcaacacaagaaagaatttggatgttgccttgaagtacaagttcctatgctagtatatgaatttatcccaaatggaacgctatccaatctcatccatggcaaccatggccaacacatttctctagttactcgtctacggatcgcccatgaatcagctgaggcactagcctacctccactcctacgcttcaccacccatcatccatggtgatgtcaagtcctccaacatcctcctcgatgttaacttcatggcaaaagtctccgactttggtgcttccatcttagctccactagacaagtcacagcttgtcacgctagtccaagggacttggggttaccttgatccagagtatatgcaaacatgtgaattaacagataagagtgacgtttacagctttggagttgttcttctagaactgctcacaaggaagaacgttttcaaccttgatgctcctggaaatgagaaaagtttgtcaatgaggtttctctcagctatgaaggagaacaagcttgagaatatattggacgatcaaattagcaatgaagagaacatggagtttctcgaagaagttgtagatttagcaaagcaatgcttggcaatgtgtggtgaggatagaccatccatgaagaaagttgcggagaagctcgataggctggttaaggtaatgcaacacccatggacgcaacaaaatcctgaagagttggagagcttgcttggagaatcttcttacattataagctcaggagcctcgagtacaggaaatttcagcatcgagaagaaagttgtcaaggacctagcatcagggcgttaa

SEQ ID NO: 40286 - DNA, 1620 bp, Oryza sativa
  Clone ID: PAT_MRT4530_43743C.1
atggtggcggcgaggaggaggaggaggccccgtcgccgcgtccgtcctccgccggttgctacaccttcctccgatcctcgtctcgccgcggcaggcaccggcgcctcgactcctccgcctccgcttccgcggcggcgcatgtggtcagggtggaggtggggacgacgaagggggagaggagcttgttcccctgtcgacccggccgtgctcgaggccgggctggtgtggcgcctcctcgcggcggccgggcagctgacccgcggcggcgcggtggcggtcgccgtggacgctttgctgttcgagcacctgtggtggctgcagcatacgccgacttcgtccctcccctcaccatcgtgggtcatcaattcccctagcagccgacccctcgcgccgcccgactccgtcgacgtcatccctcccctcgccatcgtcggccgtcgcgccgccaccccaccgccgctgccctcccacgcagcaggtccatgccgcaagacgtccactggccacaaccatcgctgccctctcctgcagcagatccacgccaccggccgccgccctcaatcacaatgtgatttggaggtggagaagcttggtgtgggttgggttggactctatgagggtttcgagggcgtgtgcattgctgaccatggctgcgggtgtgtggtgctacctagctgggatgccggtagcgatcgctgtagtggccgcggcgacgattgcttcttccttggatgggagccaccgttcgccaaccttgctgctgccgacgctcgcatatccttccctgtctgtgtgccagaggatttgtgggatgcaagcaacagcagcaacagcgaccgggcacgtctgattccagctatgttcagcatcatgtatgggaaggtggggatcagtgccgacacccccagttctacctccgattctttcttcagtgatagtcttaatagctcttgtgggcagtcattgataggcatggtgctggtcactacattttgttatttaaagagtgttgttcaagtgcctctggcttttattgttgcgccagacatttttagaattaaccgagacatcctttcctttgtttcctgtatagtttcaaatcaaatcaaacagacatgtgcatcaatcatccaagatacatcagacacttcttccaacactaaaactgatctatcatctgataccccttccaacaccaccatgacaggcagcactaagcgtgcgtttaacgagctgtgtttctgtgcaaagaatgttgatccaacagctgacttgaaaaagtatatcgaagatcttgagtgcctagaccgttcaagcaaattctatgctgttgctgtgaataacacattcatgaagcaggatagagtttactgtactaaagaattttctcaagactacttaaagccattaatggaaggcaaggaaaccatcagcattggagttcaaattgcaggtggtgtttcaaagaatatgatcctccatatgtcaacggatggtcgatgcaacctgaagaaaggatgggcaaaatttgcaacccacaatcacatatacctacaatcactatgcaccttccatttctacaaaacaactcgcctggaagccaccttcgatgttctataa

SEQ ID NO: 40287 - DNA, 1110 bp, Oryza sativa
  Clone ID: PAT_MRT4530_43744C.1
atgcctgtcaatgactgcccacaagagctattaattaagactatcgctgaagaaataatcggaggtagaactgggggaacccaccctgaaaaggccgtccagctccaccggcaacacgaccgtgtgtactgttctagcaccgccagcccagagataccggcagcacaacaacccaccaatgtccatcttggtgaagaagatgaagttgatggcgtccgcctgtgccagcaaccgcatcagcgtgtagtcgctgttccgcctaaacaaaaatcaccagaaatctccgtagagaggaagaagctaactcacatatcgttggcaaggttgaccctggtgttggcgaagaagccgcagcctgggctgtcatcgagggtagcggatttgagaatgaactcgggagggcagcgacggttgtggccgatggacgtcttgcggcatggatctgctgcgtgggagggcggcggcggcgcggtggcggcgcgtcggccgacgatggcaaggggagggatgacgtcgacggagtcgggcggcgcgaggggtcggctgttaggggaatcgatgacccacgatggtgaggggagggacgaagtcggcgtcggctgcagccaccacaggtgctcgaacagcaacgcgtccacggcgaacgccaccgcgggtccgccgcccggccgccgcgaggaggcgccgcaccggcccggcctcgagcacggccaggtcgacgggggaacaaccggcggaggacggacgcggcgacggggcctcctcctcctcctcgccgtcgccatcggcgggcgcagcggcgtggctcccgatgccaggatctgggccgtcagctctttgcgccgcctgtggcgtggtcgtcggagctacgacctcgtcgctgatgaaggctgcgcccgccttcaccgttgctcggcggagacggctgcgctcggcgacggcgcgaggcggaggcggacgagctccgacctccgagacggcgatgcgacggcggtggcggaggaggtggaggaggcggcggcatcagccgcggagttcgaggggacggcggatatgacggcgacctccaagacggcgaggacggcgacggaggcggcgacagaatcctag

SEQ ID NO: 40288 - DNA, 588 bp, Oryza sativa
  Clone ID: PAT_MRT4530_43745C.1
atggccgagctcaaacaaggagggaatgcacagcattcatcagcacaaacggtggaagaacaggaagaaactgccgtttacctctggcacacagacagggaaggatatgcgagcgtcggcagcagcaagcacaacaaatcaaatcaaggcaagccgcactgccactgccacattctggaatcgctggatgaacaggcagcacaacaacccaccaatgtccatcttggtgaagaagatgaagttgatggcgtccgcctgtgccagcaaccgcatcaacgtgtagtcgttgttccgcctaaacaaaaatcaccagaaatctctgtagagaggaagaagctaactcacatgtcgttggcaaggttgaccctggtgttggcgaagaagccgcagcctgggctgtcatcgagggagagggcagcgatggttgtggccagtggacgtcttgcggcatggacctgctgcgtgggagggcagcggcggtggggtggcggcgcgacggccgacgatggcgaggggagggatgacgtcgacggagtcgggcggcgcgaggggtcggctgctaggggaattgatgacccacgatggtga

SEQ ID NO: 40289 - DNA, 1080 bp, Oryza sativa
  Clone ID: PAT_MRT4530_43746C.1
atggccgagctcaaacaaggagggaatgcacaacattcatcagcacaaacggtggaagaacagaaagaaactgccgtttacctctggcacacagacatggaaggatatgcgggcgtcggcggcagcaaggcagcacaacaacccaccaatgtccatcttggtgaagaagatgaagttgatggcgtccgcctgtgccagcaaccgcatcagcgtgtagtcgctgttccgcctaaacaaaaatcaccagaaatctccgtagagaggaagaagctaactcacatatcgttggcaaggttgaccctggtgttggcgaagaagccgcagcctgggctgtcatcgagggtagcggatttgagaatgaactcgggagggcagcgacggttgtggccgatggacgtcttgcggcatggatctgctgcgtgggagggcggcggcggcgcggtggcggcgcgtcggccgacgatggcaaggggagggatgacgtcgacggagtcgggcggcgcgaggggtcggctgttaggggaatcgatgacccacgatggtgaggggagggacgaagtcggcgtcggctgcagccaccacaggtgctcgaacagcaacgcgtccacggcgaacgccaccgcgggtccgccgcccggccgccgcgaggaggcgccgcaccggcccggcctcgagcacggccaggtcgacgggggaacaaccggcggaggacggacgcggcgacggggcctcctcctcctcctcgccgtcgccatcggcgggcgcagcggcgtggctcccgatgccaggatctgggccgtcagctctttgcgccgcctgtggcgtggtcgtcggagctacgacctcgtcgctgatgaaggctgcgcccgccttcaccgttgctcggcggagacggctgcgctcggcgacggcgcgaggcggaggcggacgagctccgacctccgagacggcgatgcgacggcggtggcggaggaggtggaggaggcggcggcatcagccgcggagttcgaggggacggcggatatgacggcgacctccaagacggcgaggacggcgacggaggcggcgacagaatcctag

SEQ ID NO: 40290 - DNA, 1542 bp, Oryza sativa
  unsure (1)..(1542): unsure at all n locations
  Clone ID: PAT_MRT4530_43747C.1
atggccgggccgtgcccgtgccggcacggcacgcctgcggcccacgggccgttcggggcacggcggcccgtgaaggcaggccggcagctgagctgcactggccgccaggccgccaggccgccagccgccaggccgccagtgcacaccatcgtcgtccccatcgccatcgcgccaccgccaccgcctccacccactctgccaccgccgtcgcgtcgccgtttcggagctcctccaccgccgcctcgcgctgtcgccaagcgcagctatctctgccgagcaacggtgaaggcgggcacagccttcatcagcgacgaggtcggacctccgacgaccacgccacaggcggcgcaaagagctaacggcccagatcctggcatcgggagccacgccgctgcgcccgccgatggtggcggcgaggaggaggaggaggccccgtcgccgcgtccgtctccgccggttgctacaccttcctccgatcctcgtctcgccgcggcaggcaccggcgccttgactcctccgcctccgcttccggggcggcgcatgtggtcagggtggaggtggggacgacgaagggggagaggagcttgttcccctgtcgacccggccgtgctcgaggccgggctggtgtggcgcctcctcgcgggggccgggcagctgacccgcggcggcgcggtggcggtcgccgtgnacgctttgctgttcgagcacctgtggtggctgcagcatacgccgacttcgtccctcccctcaccatcgtgggtcatcaattcccctagcagccgacccctcgcgccgcccgactccgtcgacgtcatccctcccctcgccatcgtcggccgtcgcgccgccaccccaccgccgctgccctcccacgcagcaggtccatgccgcaagacgtccactggccacaaccatcgctgccctctcctgcagcagatccacgccaccggccgccgccctcaatcacaatgtgatttggaggtggagaagcttggctgcggcttcttcgccaacaccagggtcaaccttgccaacgacatgcggaacaacgactacacgttgatgcggttgctggcacaggcggacgccatcaacttcatcttcttcaccaagatggacattggtggtggccgcggcgacgattgcttcttccttggatgggagccaccgttcgccaaccttgctgctgccgacgctcgcatatccttccctgtctgtgtgccagagggtgggttcctgcaggacagggcaaagatgatggttttgtcgaggaatttctgtgatgttatgagccattatgttgatctgcttctgtttcccttccaggatttgtgggatgcaagcaacagcagcaacagcgaccgggcacgtctgattccagctatgttcagcatcatgtatgggaaggtggggatcagtgccgacacccccagttctacctccgattctttcttcagtgatagtcttaatagctcttgtgggcagtcattgataggcatgacatccttttacttctatggctgcaatgaggttgcggcgtga

SEQ ID NO: 40291 - DNA, 583 bp, Oryza sativa
  Clone ID: PAT_MRT4530_43748C.1
gcccaatggccaccgcccggcctccccaaagatgacggtcgcgggctcggatcgtaaatcgccggtggcggtgcggggctctagacgagtaccgtacgggtggcgggggctccacacgccaatggtgacggcgcccgccgatgggacggccacacggcgggtggcgagcgatcggcgcgacaggcgcgaggccgacggcgacgcgacggtgacggcgcagcagcggcggcggcgcgcgcgacgggcgggtgatgacggggcggcagcggtggcgcgcggcacgaggtgggacgcgacggtgacggcgacagcgcggcagcggcggcacggggcgcaaggcgacgcgacgggtggcagcggcgacgcgacagcgggcggcgcgggccggggtgcgatgacgcgacaacaacggcgacgacgacgcggcagcaacggcgatggcgcgcggtggtacgaggcgcgaggcgcgacggcgacggccgagcggcgcgcggcgcggcaggtgacagcggcacggcggcaggcggcgatggtgactgctcggggcacgaggcgcgcatggcaggggaggggaaggggctag

SEQ ID NO: 40292 - DNA, 495 bp, Oryza sativa
  Clone ID: PAT_MRT4530_43749C.1
cggggacgcgtggggtctcaccctctccctccgccgtcgccatcgtgccaccgccgccggctgctacaccttcctccgctccgcgtctcgccgcgggggggcactggcgcctcgactcctccgcctccgcgtccgcggcggcgcatgtggtcagggtggaggtggggacgacgaagggagagaggaacttgttcccccgtcgacctggccgtgctcgaggccgggccggtgcggcgccgccctcgatcacaacgtgatttggaggtggagaagcttggtgtgttacgagttcattctcaaatccgctaccctcgatgacagcccaggctgcggcttcttcgccaacaccagggtcaaccttgccaacgatatgcggacgccatcaacttcatcttcttcaccaagatggacattggtgggttgttgtgctgccttcaattatgcagggttgggttggactctatgagggtttcgagggcgtgtgcatttgttgac

SEQ ID NO: 40293 - DNA, 409 bp, Oryza sativa
  Clone ID: PAT_MRT4530_4374C.1
attcatgaattcactaaagaactacttgtatagggcattgaatttcttctggtactagaatacgagtgataagggaacaatgacatattaaacacataacaagtagtgttttcactatatgattgctgcctgaaaagcctacaattcaaaacaactgaaattgaaattgttgtatccagtaaccggcctgttaacgtcaagggatctcaaacgttaaccctaaacttggaagaacgttcatcagaactgctctgggtatatcgctccaaggggcagtattatcccttgaccaatcccaacccatttccaacgacatgcattgagccagaaaccaaaacctgacaagaagcttatccgttctcttggccattcgacctgagccactccattgtcaggggccgtgactcaa

SEQ ID NO: 40294 - DNA, 450 bp, Oryza sativa
  unsure (1)..(450): unsure at all n locations
  Clone ID: PAT_MRT4530_43750C.1
tttcaccctctccctccgccgtcgccatcgtgccaccgccgcctcctccacctcctccgccaccgccgtcgcatcgccgtctcggaggtcggagctcgtccgcctccgcctcgcgccgtcgccgagcgcagccgtctccgccgagcaacggtgaaggcgggcgcagccttcatcagcgacgaggtcgtagctccgacgaccacgccacaggcggcgcaaagagctgacggcccagatcctggcatcgggagccacgccgctgcgcccgccgatggcgacggcgaggaggaggaggaggccccgtcgccgcgtccgtcctccgccggctgctacaccttcctccgctccgcgtctcgccgcggcgggcactggcgcctcgactcctccgcctccgcgtncgcggcggcgcatgtggtcagggtggaggtggggacgacgaagggagagagg

SEQ ID NO: 40295 - DNA, 2020 bp, Oryza sativa
  Clone ID: PAT_MRT4530_43751C.1
tccccgggctgcaggaatcggcacgaggttttttttttacagtacaaactgcacacaggcatcttgatatttagaggtctctaatagcagtaagtacatgatatagatggttcttcatattaggaggttccatgattaccatgtaaggcctagaactaatacatgttatcttgacagtgatcaacctggttgcatggcagcaaaaggatggctgcaacatagccatgagtattgctatgttctttatagaacatcgaaggtggcttccaggcgagttgttttgtagaaatggaaggtgcatagtgattgtaggtatatgtgattgtgggttgcaaattttgcccatcctttcttcaggttgcatcgaccatccgttgacatatggaggatcatattctttgaaacaccacctgcaatttgaactccaatgctgatggtttccttgccttccattaatggctttaagtagtcttgagaaaattctttagtacagtaaactctatcctgcttcatgaatgtgttattcacagcaacagcatagaatttgcttgaacggtctaggcactcaagatcttcgatatactttttcaagtcagctgttggatcaacattctttgcacagaaacacagctcgttaaacgcacgcttagtgctgcctgtcatggtggtgttggaaggggtatcagatgatagatcagttttagtgttggaagaagtgtctaatgtatcttcagtggaagtggcagaaatagtaattgctctggtgtgaggctgatagctgatattgataccttggatgattgatgcacatgtctgtttgatttgaccttgaaactggacaaaatagatgaaaccggatcgccccatgcctgtgcgaacatccgccaatccccttgaataaaggaaaatatttggagcagaacaatgcatgaaccggtacgaatggaaagtaaaccttcccatacatgacgctgaacgtagctggaatcggacgtgctcggtcgctgtttctgctgctgcttgcatcccacaaatccctaaaaaggccgtccagctccctcggcaacgcgaccatgtgtactgttctagcaccgccagcccagagataccggtgactcctccatggccgagctcaaacaaggagggaatgcacagcattcatcagcacaaacggtggaagaacaggaagaaactgccgtttacctctggcacacagacagggaaggatatgcgagcgtcggcagcagcaaggttggcgaacggtggctcccatccaaggaagaagcaattgtcgccgcggccactacagcgatcgctaccggcatcccagctaggtagcaccacacttcacttatctgacattctgaactgataatcgtggagcacaacaaatcaaatcaaggcaagccgcactgccactgccacattctggaatcgcatccatccagacacgatacttcatggagtcaacaggctgctgttgatgtgaggaccacccgcagccatggtcaacaaatgcacacgccctcgaaaccctcatagagtccaacccaaccctgcataattgaaggcagcacaacaacccaccaatgtccatcttggtgaagaagatgaagttgatggcgtccgcctgtgccagcaaccgcatcagcgtgtagtcgctgttccgcctaaacaaaaatcaccagaaatctccgtagagaggaagaagctaactcacatatcgttggcaaggttgaccctggtgttggcgaagaagccgcagcctgggctgtcatcgagggtagcggatttgagaatgaactcgtaacacaccaagcttctccacctccaaatcacgttgtgatcgagggcggcggccggtggcgtggatctgctgcaggggagggcagcgacggttgtggccgatggacgtcttgcggcatggatctgctgcgtgggagggcggcggcggcgcggtggcggcgcgtcggccgacgatggcaaggggagggatgacgtcgacggacctgcagcccgg

SEQ ID NO: 40296 - DNA, 372 bp, Oryza sativa
  unsure (1)..(372): unsure at all n locations
  Clone ID: PAT_MRT4530_43752C.1
agtacaagtaccaagtacgcgnagccgccaaccgccgccgcggnagccgggcttccctcgagggatgcctcgccgccctctgctgctgctgcttgctcgacgagtgctgctgcgacccctccgtcatattcgtcacctgaagacgacgacggcgacgaggaagaagaagatgggaggcttagctgatttcgtccatgttaatatgtctgcagtgtacaaggtcgattagttgatgcttggttgttcagttgcttgtagcttgcctatctttgttcagttgttttctcctctattttttttctttcttcttgcctactatctccgttctataaaaaactaaattctgaagtaaaaaaaaaaaaaaaaaaaaaa

SEQ ID NO: 40297 - DNA, 162 bp, Oryza sativa
  Clone ID: PAT_MRT4530_43753C.1
atggacgcggtgaagatgcagcaactagcacaagtgcctccaattgcacatcaggagaagatgtcactacagatcctgcgtcgctaccccctggcgagctcactgcaccgtcgagctagagatttcgtcgcggcgtcggcggcattggagctactgcagtag

SEQ ID NO: 40298 - DNA, 388 bp, Oryza sativa
  Clone ID: PAT_MRT4530_43754C.1
ctcgattgggtgcgtgtgcagcgccgccggtgctgcgctacggcaagtactggcgcattcttgacaagcggtggcccggcgagcagccgtgcgacgagctcgacgcctgctgcatgcaccacgacaactgcgtgcaggccaagagtacgtcacaaaactaatccatcataattaccaactactgtcccgtatttgcatagcatatgctgcgtagatttctatgtggatatatatttttttttctttcggtcatatcatcagatgactacctgagcacggcgtgcaacgaggagttgctggagtgcctcgcgaggctgcgggagggctcgtcgacattccaagggaacacgtgcatgatcgacgaggtcatcgacgtgatctcgctcgt

SEQ ID NO: 40299 - DNA, 279 bp, Oryza sativa
  Clone ID: PAT_MRT4530_43755C.1
atgaaacagtgtatccttgaatccttcagtagctgtcgatctgatcgtgattatacgaaggttcttgcgtgccacaggtggatacaagatgaattcttgaggaaagctactcacaagtgggcgtttctctcagacatgtcacctcggaagttcgttatatttctggctggtcgttgcagcaaccagctgaaaatgaaactgcagggttggcatgcacagatgatggcgtcttgtcatatttgcagtgcagatgcttcaaattttagttgtctgaactaa

SEQ ID NO: 40300 - DNA, 257 bp, Oryza sativa
  Clone ID: PAT_MRT4530_43756C.1
atggcaggtaggtggcgggtggggggcggagagaaatacgggggggaggcggaggaagaggacggcggcgcgggcggagaatccaacgaggggggggggggggggggcgccaacccatggagttcgtccgcggcgctgctccccaatggcacgctgctgcagaccggtgggttctccaatggcgaccgcatcgcgcgcctcttctcgccgtcgacggggtgggtcgatctcccgtcgttcttggccgtccggcggtg

SEQ ID NO: 40301 - DNA, 167 bp, Oryza sativa
  Clone ID: PAT_MRT4530_43757C.1
cacacgcagccgtaataaagtgtagttctggaattgagacggtaactgctgcgtccactatgacgtgttctgttcggaggcctcgattccaattcgaaggtttcggaatctgaaatggcggcggcggcggtgcgggcggcggaggagcttgcggagagggagatggc

SEQ ID NO: 40302 - DNA, 542 bp, Oryza sativa
  Clone ID: PAT_MRT4530_43758C.1
tttttttttttttttaagaaatgagattactcaccagcaccacacagtaaaactaagcaaggccagattattacattggaactttcaatttgctcaaacaaaagactgattacattgaatacaaagtatttatgaaatattacaacactgaaactatatatgagacctttcggttatggctgcaagtagtcttggcatggggggcatgtcaacctcctgtagaccctcaagaaagcgaaccacttcacccattgttggcctatcaatttcatcttcttgaatgcaccaacatgcaactttacaaactctttcagcctcttccaaattgaaatcaccatgtaattctggatcaagcaaattctgcacacttccctcatgaagtttgctgatggcttgcacgggaaaataatcaaaatgataatggttgcttgtgtatgcttcagataaattccttcttcctgatatgatttctagcagtaccataccaaaactgttaacatcaacttttggagtaatagcgactccggtaagccactctggga

SEQ ID NO: 40303 - DNA, 466 bp, Oryza sativa
  Clone ID: PAT_MRT4530_43759C.1
tcgttattatacagcaaaatagaacgatctagtgtctaggagtagtgaacatcattttagattttgctcttcttgcatattgctgcatgcattgcctctgcgcaaccagtttgctgaggaaactgatatcggcactatgacctggaggggactgtcctggtacacaacctagtgcttaggccatatactgagtttatatggcacgattatggcctacagagatggcccttgttgcaatcagctagcatagaactgataaacaacctggtgtggcagcagctcgtgctgttggcgcaacaatctgactatgaggacattaacatatgttcaggccataccgcacgagctacaactacagtaggttggtgatctctacttagatcggagattggctcaagctcatgctctgttggctataaacgtgccatataaatatggtatataccctaagtactatggggcaccc

SEQ ID NO: 40304 - DNA, 274 bp, Oryza sativa
  unsure (1)..(274): unsure at all n locations
  Clone ID: PAT_MRT4530_4375C.1
ccccccctcggagntcgccccacggcntccggaagaacgacccctgaaactcatcggctcactcaatcttgttgttcgagtatttaccagtgaagaggcttaatttcacttttacttgtatgaactgtcttcggagcaatggtttttctttcttcagttttccactctgcatttgttgctgtggacgtctgaactcttaaatttttctgtaacatattagataacaaaagggtaaaagacttcctacttatcttaaaaaaaaaaaaaaaaaaaa

SEQ ID NO: 40305 - DNA, 2703 bp, Oryza sativa
  Clone ID: PAT_MRT4530_43760C.1
atggccagctcttggcatgcctctgcaggtcgacttctagagaatcccctcctcgacgacccctccgtcagccgcgtcatgcgggaggcgtccttctcctccgccgccgtcaagtccatcatcgagcagtcgctctccgccccctcgccgtgcccctccgccgcggcctccaccacgacggccgggcccggcccgctctccccgtcgccatccccactcccgcgcgccggcgcggccaacgcatacctcaaccctcgcctcgcagccgccgccgccgtcgccagcggcggcggcggcggcggtggcgacgatgcgcgcaaggtgatcgacgtcatgctcaagccgacgcgccgcaacccggtgctcgtcggcgacgccggcccggacgcggtgctcaaggaggcaatccggaggatcccgacggccggcttcccggccctcgccggcgcgaaggttcttcctctggaggcggagctcgccaagctcgccggcgacaaggcggcgatggcggcgaggatcggggacctgggcgcggtggtcgagaggctcctcggcgagcacggcggcgtggtccttgacctcggcgacctcaagtggctcgtcgacgggcccgcggcggcggcgtcggaagggggcaaggccgcggtggcggagatggggcgccttctccgtcgattcgggcgcgccggcgtgtgggccgtctgcacggcggcgtgcaccacctacctccgctgcaaggtctaccacccggggatggaggcggagtgggacctccacgccgtgcccatcgcccgcggcggcgcgccgatcgccgccgccgccgccggctcagctctccggcctggaggcagtggaattctcaacagctcgatggggatgctatcacctgcacttcggcctatgccagtgacaccaacggcgctccggtggccgcctccggggagcgaccagtctccggcagcaaagccggccatgtgcttgctttgcaagggtagctatgagcgcgagctcgctaagcttgaggccgagcagacggataagccggcgtcccgccctgaggctgccaagcctggattgccacactggctgcagctcagcaatgatcaaaataaggccaaggagcaagagctgaaacttaagaggagcaaagatgagcttgagaggaaatggcgcgagacgtgtgcccgaatccactccgcctgtcccatggcaccggcgctctccgtgcctcttgccacattcacgccacgcccacccgtcgagcccaaattgggggtcgcaaggggtgccgctgtccccactcttaagatgaatcccagttgggagaagccctcggttgcgccgacccttgagctccgtaagagccctcctgccagcccagtgaaaactgaccttgtgctctgtcgcttggacccgggcacgaatcctgctgtggagaatgagcagaaggaaagttgtgaaggactaacggctctacaaaaggccaagattgctggaatttctgatattgaatccttcaagaggctcctcaaggggcttacagagaaggtcagctggcagtcagatgccgcttcagccattgctgctgttgtaatacaatgcagatctggcagcgggaagcggcggaacgttgggacaaggggtgacatgtggctcctgtttgttggccctgatcaagctggtaagaggaagatggtgaacgcattgtctgagctgatggcaaacaccagaccagtcgtcgtgaactttggtggtgactcccggttgggcagggtcggcaatgatggtcctaacatgggtttctggggaaaaactgcactcgaccgggtcactgaggcagttcggcagaacccattctcggtgattgttctggagggcatcgatcaagtggacgttgttgtgcatggaaagatcaaacgggcaatggagaccggtcgcctaccagactcccgtgggcgtgaggtcagccttggtaatgtcatatttgtgctcaccacaaactgggtacccgaggagctcaagggatcaaacgttgagactctgctacgaggtgaagagaggatgttggagtcaacaagttcgagttggcaactagagctctcgattggtgacaaacaggtcaagcaccgagcagattggctatgcgatgatgttcgccctgcaaagttagcaaaagaactgtccagtagtcacggtctgtcacttgacctcaatttggcagtcggcgccttggatgacactgagggctcacataattccagtgatgtctcggtggaacaagagcaggagaaagggcagcttgcagtcaagcgatcaacaccggcccctggctctgatatattggaacttgtcgatgatgccattgtgttccgacctgttgacttcacgccattcaggaagacggttacagattgcatatcggcgaaatttgaatcggtcatggggagcagcagctcattcaggattgatgaagatgccgtcgattggatggttggcagtgtctggcttaccgacgagaagattgaggactgggccgagaaagtgctcaagccgagcattgagcgattgtggcacaatgtgaaacatgatagcgggcgctctatcattcgtcttacagcagttgcagccaaggcattgccaaggtggggagggggcagggaagggctaccggtggcggtaacgatcgccattgatggcatgtag

SEQ ID NO: 40306 - DNA, 593 bp, Oryza sativa
  Clone ID: PAT_MRT4530_43761C.1
atgaacacgaggccggtggtgctcgtcttcctcctgctggtgctcgtcatcacgtcgcagttcgagtggaagcagcagatcggggacgccgccgccgaccccgccgacgcgcgccgcaggcaccagggcctcgccaaggaggacgccgtcaaggagaagataatattttctcaggagaaaaatattcaacaacttaacgagcttattgagagccttcagcggcagctcctgcattgccgtggtagcaacaacactgtccacaccacaacagtttctcatactgaagttagtgaggtggacgggcaggaaagcattgatgattgatggtattggtagataacctcttggcaggttgttcactgattctagtacagaagccaaagaacaacggctgatcaggcagcaccatactctacaaatgccatctaatagggaggtaccaaatcacactgtattgtacacttgctaccagtgtttctctggtaagattgtagagagctgtaacatgtaatatgttggttttaggtcacggccactaattcaattgaaaagttgcttgatgattcttttgttgcgttaaaaaaaaaaaaaaa

SEQ ID NO: 40307 - DNA, 2337 bp, Oryza sativa
  Clone ID: PAT_MRT4530_43762C.1
atggcgtccttactcccaattctgttgctcaccgccttcctatcgtctaaacctgcactctgctacatcaatccaggtgcaacgccgccacagaaaattggcacgaaatcttcaggtggccgtgcaacctacatcgtgttcgtcgagccgccgccgccgcttggccacggcgatggcgaggacgaccactgccggtggcatgaatctttcctgccactgagtgagctcgccggctccgacgacgagccacgcctcgtccactcgtacaccgaggcggtcagcggcttcgccgcgaggctcaccggcggcgagctcgacgcggtgtccaagaagccggggttcgtgcgcgcgatcccggacaggacgctgcagctgatgaccacgcacacgccggagttcctcgggctgaggaaggacgccggattgtggagggactccgggtacgggaagggcgtcatcgtcggcgtcctcgacaccggcatcgactcctcgcacccttccttcgacgaccgcggcgtgccgccgccgccggcgaggtggaagggctcctgcagggacaccgccgcccggtgcaacaacaagctcatcggcgtcaagtcgttcattcccggcgacaatgacaccagcgacggggtggggcacgggacacacaccgcgtcgacggccgccgggaacttcgtcgacggcgccgcggtgaacgggctcggcgtgggcacggtcgccggaatcgcgcctggcgcgcacatcgccatgtacagggtgtgcaccgtggaagggtgcaccgagtcggccttgctgggtggaatcgacgaggccatcaaggatggcgtcgacgtgctctccatctccctcggtagcagctttgctgcggactatgacaaggaccccctcgccatcggcgcgttcagcgcggtgtccaagggtatcgtcgtggtgtgcgccgccggcaacaatggcccggcgttcgcgacgcttagcaacgaagcgccgtggatggtcacggtcgccgccagctcagtcgaccggcggttctcggcccccacgcggctcggcgacggcagggtcatcgacggcgaggcgcttgatcaggcgagcaactcgagcggcaaggcgtaccctctgtcctactccaaggagcaggctggtctctgcgagatcgcggacacgggcgacatcaagggcaagatcgtgctgtgcaagctggaggggagccctccgacggtcgtcgacaacataaagcgcggcggcgccgccggcgtggtgctgatcaacaccgacctcttgggctacaccaccatcctccgggattacggctccgacgtggtgcaggtgaccgttgccgacggagccaggatgatagagtacgcggggtcgagaaatccggtggcgaccatcacgttcaagaacaggacagtgctaggtgttcgtccagctcccaccctcgcggcgttctcgtcgcggggaccgagcttcctcaacgtcggcatcctcaagccggacatcatggcaccaggtctcaacatcctcgccgcgtggccctcgtcggttgctcgcaccgatgccgccgccgcgccgccgtctttcaacgtcatatccggcacgtccatggcgacgccgcatgtgagtggcgtggcggcgcttgtcaagagcgtccaccccgactggtcgccggccgccatcaagtccgccatcttgacgacatccgacgaggtcgacaacaccggcggcccgatcttggacgagcagcacaacaagaccatgttgttcgggcccttcaacaccggcgccggccacgtgaacccgacgagagccgccgacccgggcctcgtctacgacatcggagtcgccgaatacgccggcttcctctgcacgctcgtcggcgagtatgtcctgccgatcatcgtgcgcaactccagcctgcagagctgcagggatctcccccgggtggggcagtcgcacctcaactacccgtcgatcacggtggagctggagaagacgccgttcacggtgaaccggacggtgaccaacgtcgggccggcggagtcgacgtacacggcgaacgtgacgctggccgcggagacgtcgctgaagctgagcgtgtcgccggagacgctggtgttctccaaggccggggagaagaagacgttcgccgtgacggtgagcgggaggttcacgaaggcggcgcaggcggtggcggtgctggaagggagcctgagatgggtgtcgccggagcacgtcgtccggagtccggtggtgctctacatccccgtcgcttccgcaccgccgtcgccgccgatgccggcggttgggactcggcgcggagacaactgggcctga

SEQ ID NO: 40308 - DNA, 4685 bp, Oryza sativa
  Clone ID: PAT_MRT4530_43763C.1
tcggcacgaggttttttttttttttttttttttttttttttttttttttttttttgaaacagaaaaggggcataaccctggatattgtacataatgctttttcattattacaataaataaataatttaggagagtatggtgactgtactactaactaaatctcttgacacaatcacactgttctcagggagagggaaaaaagagctaatacattttttatcaacagttaagctcactcttgctggaatggatgtaatcttcgggtgatccgagtaaccatattaacaaataacgttcaccctccgagtcaatcaagaaaccggtataccggacaaaaaatagacaagatattacacaaataataatcaatcagttaaaagggcgttatcttgataaggtttagtggtagcctttttctccagggagaagtcacagactcacagttcaccctatcaccaagaccttcagtcttttgcagctcatgctccagtaccaactagcatagtctggtgcacatcacatctgcttcagcacttggcttttgctctcacatgataacatactgtcatggtgcagacatggctctggttcatatgatgtccatctgtgatgtcagtctctgttatggcaggcaatagttctacgacaacctagaaccaccgccctcctcctttcttggtagctttcagttccatcactaatcgttcccgctgagcctctacctctgcatactgcaagctcatgttgagtaaccgctccttcatatctcttagctctccttctagttgcaaaaccctttcgttactactctcattgccattcccagcagcacactgcccatcaggcatgggactcttctgttgagctctgtacatcttattctcctctaaagcctctgcaagcttagcttccaatacttggatcttcaaatgaatgccagattcctcatcaactggagaaccaccaatatcctgctttccaaggtcctcttctttgatgtgggccatctgctcgagctgacttgtaaggtcctcattttcctgctcaagagattgtatctttctctggtactcactatttgatctcttgattctattaagttcattctttagctctgcttcatgtacatgcgatgcttccactgcagatagatcactctccagccttacaagctttgcctgcatagctattctgcttcgtttttcttcttcaccattgtccaaagtctcctgcatattggacattttatctgtcagcatagccttctgtgccttcaattcttcacattcctcagtaacagaacgatgtagctcctccagttttcctctttcgaacttagcctcatcaagagaacttttaagtttgagaacttcgtcttgaaggctcattattttctgaacttgaagtttcagaccagatatttcttcaatcatttgctgcttctcataatcattagctttaagcttcaattctagttcaccagaagatttccttaacttatcttcattggatttagcatcttccatcaattttttcatatgttcagcatctgctgccaacatttcctcgctttgtttcgatgcattcagggagtcaactaagcctttaatcttgcttttagactccttacgaaggtctcccaattgagactcataatgcctcaattgtgcactgacatcctggagactagcctcaagtttgaccttgtctgctcgtaagacagagacttctcgaatggcctccactgtggcattttctcgctcctcttgtgtggaggaggcctgtgcagtgaggctcatgacctccctctcaaggttctctacctcaagagtcttttctttctcaatcttgtttagcatgaaatgtgcacggtttattttttcttcttgctccgtgtgctcctggaatatactctccagttctgatagtaaagactgctctttggaagaaatgtctttctgaagtgaagaaagctttgcctctaggaattcgactgttttgcaaaaatcaaggtttcgtttttttgagttatccaattcctgctcttgctgagtgaggtggccatgcaactccaatttctgcctcttcagctctgcaatttgattctgcagagaactgcactcttcaataaggctctcaactgtggattgcagtttagaattagatctcctcagaacctctgaatcatcttgtgcttcagacaattttctctgagcttcctgttgtttttgcttaaactcaagcctttgagtttccatctctgcttgctggcgctctactttatctttgagattgacgataagtgatttagaatcatgtatctgcagctcgcttgactccttttcatttgtcatgtatgtcaactgagcttcgagtccagaaatgcgttccgatagctctatgttttcctgttccaggtccgatatatgtagctctaggtcagctttgcaactctccagttcagttacctttctttccagaaccttattggcagaaacatgggaatctatgctgcttgaaagcacaaggatatcttgccgcacctcatccaagcattttgaagaaatgctgctttctttacgtgatgcttccaggcattcctccaactgactcttctctgcctgaattttagaaataacgctttccatttcaactttggaacatcgcaaatcatcattttcctgctgctgtagctgaattttagccttcaacacatctgtctcaggttcactatccataccatttctaaattggtatcctcttgcaccactagtttgaacaccttcccctgccatggaatgggaactgtcaagcttctgcctcagctcagataactcaagatttctttgttctagttcctcttggcttttttggaacttctcttctagctcatagatttgagacctaaaattcagcagcttcagctcaaggtcagcacatttttcctgtaatacttttgagctagatattgacgcatcagcaaaacttccagtgtgcagcaattccttgctcctaagctcctcttccagttgacatatctgtgatttaagctcttcaatttgcaaattgctatcgtttggaatacaagggccttgaccttttgtagcaccacccacttctttcagcttgtatataagctccaaattttcatctgttagctctgaacaatctttctcaagctcttgtattttaacccttaaaagttcattttctttctcaagttcaagataaacagcatcagaacctaaattttcaatattgagcacatgatttagtttctccctcaacattgtgatttcatcctctttaattgacagttgcttagcccattctgtgtcctgtttgactaacggacccttttttaaggcatcagcgtcagtgacattcttgaccttagaaattttagatatttctgctttctgttcttctatggtctcttccaactcctgaagaatagaaacaagctctatatttgcttcttgagtatttttcagttgtatggataagtttgcatttgattctttcagaaatttcacatcatcttcaagttccttctgcagatctatccagtccccatatttggaggttcctccaaccttttgtcgcgtggttacctctttcatagatgacttcaactcttcaatttcttgcctataggaatcccgttcagcatgcgcagcagacagctcagcttctagctcagtctgttgcttggatttctcggaacattccttcttcaacatctccagatcagccttcaacttgcgagaatgccgttcccacattttcgcctcgtcacggagttcctcaattgtttcttcagccgcttcaagaagctctttggatgaatcagatgtccctaatgataactgaccaaacccatttccaaatgattttggagtatttccttgcaacacatttggacctgatgcacgggaactgaaagatgaattgtttgatctaaatccatcatcaccacgacttgcgctaacgtacgagctggcagaatcctgccttcccacatgcatacccccattagagctgtctctaggggataagtttgttctatccgcggtactatctccagaattagaactccggtgggacccagatgctgagaaactcatttccctgtttccaagttcatcttgagtagtgccacctaaaggatttcctgatgaagagcgaacactcctatttgcaacactatcagagccatctgacttgctgtcaatgtcatcattggttggactacggtcatcgagacgaggggacaaatccttccaggatctcacaccacttgacttagacttggcgccaagatattgaaccttaagctgtaaaactgttccagagttgcatctcttcaacggcaaagagatagcggttgggtccaccaaattcagaaagttagtgagatttaggaagatctccccaagaacaccactttttatagatcccacagaaacaacaatcttgtactggcattcatcaaattcttttgacacttcatcttgagaaaaccatatcgattccaatatgctgtcgggccattggcaaattccactgcgggcagctgctttaccggacttggcaactgtctttccagtatccactgagacaatcgaaaggaacagcctgtctgatactgccgggactataattgggacggcattgcgctccat

SEQ ID NO: 40309 - DNA, 674 bp, Oryza sativa
  Clone ID: PAT_MRT4530_43764C.1
atggggtacttccgggcgccgaggaggaaggcggcggcggcggcggagggggagagcgtgcgggcggcgctgctcgtcggcggcggcggcgaggaggcggcggtgccgaaggggtacttcgcggtgtacgtgggcgcggaggcgaggcggttcgtggtgccgacgagctacctccggcagccggcgttccggggcctcatggagctcgccgccgacgagttcggcttcgcccaggagggcggcctccgcctcccctgccgcgaggaggacttccaggccaccgtcgccgcgctcgacgcgcgccgccgcccggcgagcggcggcgcgatcatgagcaccatggtcaaggccaggtcgttgtagccactagcccgccataggagagaaaatttccagaggaagaattctttggttgattcgatgtggctcgatgtacacaacacaagcatggtgatctgatctgatctgatcgatcgaaatcgccattgttcatgtactttgatgatgcgtgtgatggagcggtagatagagtggtagaaactagaaacgatgaaaaattactgttgattctgcaaaagactctgaaactgacatgaaaggtggaaaaaaaaaagagttgcatcctgatcttatatatatcctctctctggttaatcagaagctttaatttgatc

SEQ ID NO: 40310 - DNA, 555 bp, Oryza sativa
  Clone ID: PAT_MRT4530_43765C.1
ctccagccaagcagaggcatgagaaagacagagggacatggcaggagacgactgaccagcaacgccggcaataacttccatgttgactgggaaaacctagatctacatagtacatggtatatggtacggccttcctgtcgagcgctaggcgtcagccaccacgccggagtacacgagggaagggggcaccatccaccggcccagcctagacccctgaccgccacggcggtgactgccaccgccccctcgcgtcctgccggcgcctccgctgcagcgctcgataggaagcagcagcgactccgccctgaaccgtcggacggcggaccagaagaggagggccgcgcgacggggcaggagagcagccgtgcgaggtcgcccggggaagagaaggtggcgtgggcgaggttaacgggggagagggtagtgtgggcaagagagcatgagggagaggagacagtgctggtaggaagcttgggggaggaggcgacgcgagcgagggagacagaggagaagatgcagcgcacgcggaatgggacgacgcggaagggcgcctga

SEQ ID NO: 40311 - DNA, 270 bp, Oryza sativa
  Clone ID: PAT_MRT4530_43766C.1
tggggtagcatatctaactgttgtcgacttggcggtctgaagtgctgactcgtagtcgacaacaggctagccttcctcctcgaatccgcatccggcgagatcaaaaacaacgctatgtctttcctgacagtatccatagacaccgcaagggactagccatacttatctctgaaatcgatatccgatgtcttgtcttggcgcataactctagttgtctttccttatccggaacttctcctatatccgaaggttgtttccgtataagacatg

SEQ ID NO: 40312 - DNA, 573 bp, Oryza sativa
  Clone ID: PAT_MRT4530_43767C.1
cagcgaaggaaagcgcaagcaaaaaaaacaacgagacatataataaaagaagatacgggacaaacagccgcaaccgagaggaagacgaaaaaatggggaggaaagaaacaaaaaaatgagaaaaaaaaaaccaagaacgagcgtctaaaaggaaaaaaaaaaaaaaatggtaaaataataacgccaacccgccaacgaaaaaaacacagcgcacgcagaaacaaaagaataaagacaaaaggcaaaaaaaaaaaaaaaggtaaaaaaaaaggcgcaaaaaaaaaggataaataaagaaagagcccacaaaaatacatgaaaagaaaagaacagacaaaaagagcctcaaaacaaagaaaaaccgaaacaggcgcggaaacagcatgaggaccaagaaggaaaaaaaagaaaaattgtgagaaaagaaccagattgagaaatcgcctaaaaagtatgggagaatagaagagaaaaaaaaatatgaaaaaaaaaaaaacaaaaagcccatatacggcccaaaaacagcagaaggggcgagaccatttgcaaggaattaggtcaagtactaggaat

SEQ ID NO: 40313 - DNA, 3943 bp, Oryza sativa
  Clone ID: PAT_MRT4530_43768C.1
ggggaggcgcgggcgtcgtgggcggcgggaaggcgcgggcatcgacggggcgaggcgggaaaaaaggaggacggcgccgtgatggccggctgtggggaagcatggtggcagcccggcaaaggtggggatcggcgaaggagggagatggcagaaggggaaggggaagggtggagggagttcgtcattgtcgtcgctggcgagcgcggccggccaggctagagggagcggcggcggcggcggcggcggcggcggccacgtgccgtgggagtggtagcggcggccgcgaggagggagggagcagcggcgttggcgctcggaggaagcagtggcgtcggtgcgcggagcagcggtggcgtcggctgcagctgtgaggaaaggcggctgcgtcggttgctgccgcatggaaagagggaaggaggaggagggattgcagcgccggctgctgcctgcgcggaggagcgccgctagcttctgctgcgcggaggggcggtgacgccagctgctggcgcatggagaggggagggaggaggaggggtagcagccggagggggggcggcgcctggcgccggagtggctggtggggcagcggcaggagtagctactggaattgctgggggttttgctggtggtgctcgggttcatgtatctggaggaatacatgcaaatattcatattagtgctagcgcaagtgcccatgctaaagctagtgcagctgcaagtgctggggttggagctaaagcgagtaaaagtgtcagtggcaatgtaggcaacaacgcagaagaatatgcaggtgccaacggtaatgtccatggaaaagcaaaagctggtatcagtgctggttttggtatctccgcgggtgctaaagttgctgctggcataggagcgaatgctggagttggcggtgatgcacagacaaatgcaaaagccggtgtaggtgctggtattggtatatctggaggcgccaaagttgctggtggcattggagcgaaggcgggagttggtgctgatgcgaatgcaaatgcaaaagccggtataggtgctggtgttggtatctcgggaggtgctaaagttggcgctgacatcggagcgaaggcaggagttggtggtaacgccaatgcaaaagccggtgtcggtgctggtgttggtatctcgggaggcgctaaagttggcgctaagattggagcgaaggcgggagttggtggtgacgtgaatgcaaaagctggtataggtgctggagttggtatctcaggagacactaaacttggcgctgacattggagcgaaggcgggagttggtgctgatgcaaatgcaaatgcaaaagccggtataggtgctggagttggtatctcaggaggcgctaaagttggcgctgacattggagcgaaggcgggagttggtggtgatgcgtatacaaaggcaaaagcccggtgtcggtgctggtgttgggatctcaggaggcgctaaagttgccagtggcatccggagcgaacgcgggagttggtgctgatgcgaatgcaaatgcaaaagccggtataggtgctggagttggtatctcgggagccgctaaagttggtgctgacattggagcgaaggcgggagttggtggtgacatgaatgcaaaagccggtataggtgctggtgttggtatctcgggaggcgctaaagttggcgctgacatcggagcgaaggctggagttggtgctgacacgaatgtaaatgcaaaagctggtataggtgctggagctggcatctcaggaggcgctaaagttggcgcagatattggagcgaaggcaggagttggtgctgatgcgaatgcaaaagctggtataggtgctggtattggtatctcgggaggcgctaaagttggcgctgatatcggagcgaaggctggagttggtgctgacgcgaatgcaaatgcaaaagctggtataggtgctggtgttggtatctcgggaggcgctaaagttggcgctgacattggagcgaaggcgggagttgctggtgacacgtatacaaaggaaaaagccggtgtcggtgctggtgttgggatctctggaggagctaaagttggcgctgaaatcggagcgaaggctggagttggtgctgacgcaaatgcaaatgagaaagccggtatagatgctggagttggtatctcgggacgtgctaaagttggcgctggtatcggagcgaaggctggaattggtgctaacgcgaatgcaaatgcaaaagccggtataggtgctggtgttggtatctcgggaggcgctaaagttggcgctgacattggagcgaaggctagagttggtgctgacgcgaatgcaaatgcaaaagctggtataggtgctggagctggtatctcgggaggcgctaaagttggcgcagatattggagcgaaggctggtgttggtggtggcgcgattgcaaaagccggtataggtgctggtgttggtatatcgggaggcgctaaagttggtgctgacatcggagcgaagacgggagttgctggtgacgcgaatgcaaaagttggtataggtgctggtgttggtatctcgggaggagctaaagttggtgctgacatcggagcgaaggcgaaagttggtggtgacacgaatgcaaaagccggtataggtgctggagttggtatctccggaggcgctaaagttggcgctgacattggagcgaaggcagaagttggtgctgacgcgaatgcaaaagcaaaagccagtataggtgctggagttggtatctcaggaggcgctaaagttggcgctgacattggagcgaaggcgggagttggtggtgatgtgtatacaaaggcaaaagccggtgtcggtgctgatgttgggatctcaggaggcgctaaagttgccggtggcatcggaacgaacgcgcgagttggtgctgatgcgaatgcaaatgcaaaagccggtataggtgctggagttggtatctcgggaggcgctaaagttggcgctgacattagagcaaaagcgggagttggtggtgacgtgaatgcaaaagccggtataggtgctggtgttgatatctcgggaggcgctaaagttggcactgacatcggagcgaaggctggagttggtgctgacgcgaatgcaaatgcaaaagctggtataggtgctgtagctggtatctcgggtggcgctaaagttggcacagatattggagcgaaggcgggagttggtgctgacgcgaatacaaaagctggtataggtgctggtggtggtatctcgggaggcgctaaagttggcgctgatatcggagcgaaggctggagttggtgctgacgcgaatgcaaatgcaaaagatggcataggtgctggagctggtatctcgggaggcgctaaagttggcgctgatatcagagcgaaggctggaggtggtgctgacgcgaatgcaaatgcaaaagatggcataggtgctggagctggtatctcgagaggcgctaaagttggcgcagatattggagcgaaggcgggagttggtgctgacgcgaatgcaaaagctggtataggtgctggtgttggtatctcgggaggcgctaaagttggcgctgatatcggagcgaaggctagagttggtgctgacgcgaatgcaaatgcaaaagctggtataggtgctggagctagtatctcgggaggcgctaaagttggcgcagatattggagcgaaggcaggagttggtgctgacgcgaattcaaaagctggtataggtgctggtgttggtatctcgggaggcgttaaagttggcgctgatatcggagcgaaggctggagttggtgctgacgtaaatgcaaatgcaaaagctggtataggtgctggcgttggtatctcgggaggcgctaaagttggtgctgacattggagcgaaggcgggagttggtggtgacgcgtatacaaaggcaaaagccggtgtaggtgctggtgttgg

SEQ ID NO: 40314 - DNA, 216 bp, Oryza sativa
  Clone ID: PAT_MRT4530_43769C.1
atggccttcgcgctgcagcggcgacgagtttgggaacaatacggacccatgggcctaggcgcacgggccctcctcgataccccgcccccagagagccacctcaccggctgcgggtgcggtggcagcgttggaggaactaaacgggccctacctatggggcgaggtgatgcactcatgcacgttcaaccggactgtttccccgtgctgcgcacgtag

SEQ ID NO: 40315 - DNA, 203 bp, Oryza sativa
  Clone ID: PAT_MRT4530_4376C.1
acgccgcagcttcggaagatccgctcttcgtggaagttgaagccgtcgtttgggaaagcgagcaaggcaagtcacatcatccttgagcatattgaatcccaggcaaatgaaggctacacgagctgcggcccggtagtcgagatgtcatacggcggagggttggtgcccaatgctaggggctcagttctacctgcctgtcccgg

SEQ ID NO: 40316 - DNA, 282 bp, Oryza sativa
  Clone ID: PAT_MRT4530_43770C.1
atggtcctggtgcccctcagagaagtcgtgcccctggtggttgatggcggggacggcgaaaccaaccttggtgagggaggcccaaatgccgccgccgccgagctgccagggccttgccggcgaaaagcctgcctaaattattgcagctcgtggtcactggctaatggttttgcaaaattgatacctgcattttggttagatttccaaatgctgggaaatggcgactctgtttctgaatttggtggcaacttctttttccatctggtagttaatcagtactga

SEQ ID NO: 40317 - DNA, 858 bp, Oryza sativa
  Clone ID: PAT_MRT4530_43771C.1
atggagccactgtcactggatccgatggctggcggcgtggagaggagtgcgacggccaacacctccacctccttcgcggccaccagccaccacctcgccctctgtgccagccttctccaccaccgctgtcggatcaggagaaggggaaaggtcacctatcgccatgatgccgacggccgccacagtcccgcccgcctcctggagccaccaccagacatggactctctatatcctgtcatgaactcgaacccccacttctgttgccgccatctctactgccaccagctccgtctcctccttccatgcgggtttccgcctcctctggtgccgtcgctgcaccgcgagcagtctcgtccagatccggagggagagagcagccccaccgtcgccttccttgctgccacatggagattggaaacatgtgctggttggctacaagaaccatcttctccgaccccaagaacctcactgccgactaggttggccttgacgtgtgcggctacactggtgtttcctatgtgctgctccccgacaactgcggctgggaaggtcagcgacatcgtggattacctccccgtcgagctcgagttgctatccgacatcgcgctgctccacctcaactccacccgcttctgccaccctccactgcctccacgagctcgaccacagcaacaaccgcctcgtccgccacttccgcaccattgtgctcgacttcctctacaacaacttcaagggcgccatcccgcgccagcatcgccaaaatacaatgcgtccatcgatgatgagatgtgtatgatgccttactcaatattacgatacaccaatccagatctcgtggaggtgctcatggatgtatga

SEQ ID NO: 40318 - DNA, 819 bp, Oryza sativa
  Clone ID: PAT_MRT4530_43772C.1
atgagcccgtccgatcaggtgttgctcttcgtctgcctacggcgtgttctcctgctctacgtcaccatctcggcggtggccgggcagagcatcaccgaggtcgtcgtcggtgatgaggtggtgcacgctgtcaccaagctggtggtgggtggcggcggcgtcgactccgcaaggaacatcaccgatgtggacggtggcgacatatgtcaccgcgaagtgcactccatcaccgaggaggacggcaacgtcgacgacgacgaggtgcagtacgccatcaccaacgagggcgtcggtgccgacgatgacggctccgacggaaagttgtcatcagcgtccgaggttctttatgcggctagtgcgcagccgaacacggcggccgccggaaagtggcaccgccgcatcatgcccaccgccctgcagccagagctcaactccgacgacggccatggccagcagttcgatcggaccttcgaccaaatccaatcaagcatcgccgacagactgatcgccacgacgatcatcgtcatgctcatggtcgtcacgaatggtcgtcgtgcgagcgagaggaagaagaggagcggacgggcgacatggttctcaccggcggcggctctgacgatgctgctgttggtcgtcgctgcgtctgccaactctgcgacggcggcgcggccgttgcccgccgccggcggcggccataacgaagctgctgctgctgcagcagcatctgggacgatgccgctgaaggcggcagcaccaggacactcatcatgtacaacagatcccaatacgcagcagcctgtgcgttgtattccccactag

SEQ ID NO: 40319 - DNA, 162 bp, Oryza sativa
  Clone ID: PAT_MRT4530_43773C.1
atggcttccgatacttgcagtgggctgcacctagtcctggtgtgtctgcatgtgttggcggagattgagatgggcgtccgatttttagctaaaagatcagacatccgatctgtagtcacctttgcatgtgaaactctcagatgctctaagctcaagccttaa

SEQ ID NO: 40320 - DNA, 1506 bp, Oryza sativa
  Clone ID: PAT_MRT4530_43774C.1
atggctaataagtttacaactaagccccatgttttcgatggaacggatttttctcattggtgtagtaggatgcaatcttacattatggctgagaattatgatatttggagaaaagtttctcatccttatatgattcctgaagttattaatactgctgctgcaaaaactgagtttgaacaaaattgcaaagctcgcaatattcttttgagtgggatttctcgttcggattatgatcgtgttgctcatcttcaaactgctcatgagatttggactgctttgagtaattttcatcaaggaacaaataatattaaagaacttcgtcgtgatcttttcaaaaaggagtacattaaatttgagatgaaacctggagaagctttggatgactatctttctcggtttaataaaattttgagtgatcttgattcctcttatgatgctaattatccacaatctgagatttctcgccaccttttaaatggtcttgacatgtctatttgggaaatgaaagttacatctattcaggagtctgttaacatgtctaccttgactttggattcgctttacacaatattgaaaactcatgagatgaatattcttgctcgtaaagttgattctaagtctagtgctttggtttcttcctcgacttctttggatgttggtacttcttcatcgaagccttctgttcttgctttatttaatgccatgtccgatgatcaactcgaacgaaaacaaaaaggtcttttggatgcttgcaaaaattgtgctattcttactcaggagatttcttatttgcaaagattttctgatggtaaaaagaacctcaacatgattcttgatcaatctaaagttagcacacacaatcgtggtttaggttttgattcttatgctcatcatactagacatcctcctactgttttgggtgttgctaggagaggtgaaattttgattgaaactgagcctaagaacactgtgtttaaatctgctggcatcatgtcttctttgaatgcatcttctttgaaatcaaatgatgtgaatgcaaaaccttctgttgttgcaaaaccatcaatttcaaaaccatctacttcacaaacttgttgtgagaaacttgcccataaacagaaaaaggaaagagaaattgcttttgcaaaacgatgttggcaaaaatcgggttttaattcgaggaccacggttagaccgagactgaccagccggtcagaccggccagcggtcagaccgccggccagccggtcagaccggccagcggtcagaccgcagttgaaccggcggtcagaccggttgccaggtccagtcagaccgcaggtgatgatcggattcactgttattttatgtgaccagtccgaccgggtggaggttgccggtgactcgatgcctcgggagagtatttgcggtgatggatcgggagtcggcttggtggtaagacgatgtccgtggtggtcagatatcatgaaggatactaaggctagagttgatgcacgtggttggtga

SEQ ID NO: 40321 - DNA, 554 bp, Oryza sativa
  Clone ID: PAT_MRT4530_43775C.1
ggataaatgcgtgctgctgctgctggtgttaagtacgtgacggggtatgctggttgagtagtagggaaggactgcaaggagaagcaccctaacgtcaagcaggtattttgtggcgcatttgggttgctctgctgcgttaactgctacaatgtgtgttctgacttggttgatttggtggtgacaagtgcaagtccatgtctgatgctgtgagttcctcacttcctgtgcccatgttctgaaccgttccatatgcatttctcacttgatgtaatttcaaattttgggccatatatctggtagttttgggccatatatctggtagtaattcaaacaaatatagttttacctggagttctagctaacatctcttcccgatccttgagatcacatccgtttggttctgcatgtcctattgtttgaaacttgctgcctattagaacctccttagttgtctcaatacttttacttttattactgccatattaattatcttgttgctgagtcctgttttgatgattatgcacaaagtatccagtttgtctggtacctaaatg

SEQ ID NO: 40322 - DNA, 2442 bp, Oryza sativa
  Clone ID: PAT_MRT4530_43776C.1
atggcaaggcggcggtcagaccggcgagagcacggcggtcagaccggcggcggcaacagaaaagtttctcatccttatgtgattcctgaagttattaataccgattctgcaaaaactgagtttgaacaaaattgcaaagctcgcaatattcttttgagtgggatttctcgttcggattatggtcgtgttgctcatcttcaaactgctcatgagatttggattgctttgagtaattttcatcaaggaacaaataatattaaagaacttcatcgtgatgttttaaaaaaggagtatattaaatttgagatgaaacctggagaagctttggatgactatctttctcggtttaataaaattttgagtgatcttagatctgttgattcttcttatgatgctaattatccacaatctgagatttctcgtcactttttgaatggtcttgacatgtctatttgggagatgaaagttacatctattcaggagtcagttgatatgtctactttgactttggattcgctttatacaaagctgaaaactcatgagatgaatattcttgctcgtaaagttgattctaagtctagtgctttggtttcttcctcgacttctttggatgttggtgcttctttatcgaagtcttctgttcttgctttatttaatgccatgtccgatgatcaactcgaacaggtttcttatttgaaaagttttttgcaaagattttctgatggtaaaaagaacctcaacatgattcttgatcaatctaaggttagcacacaaaatcgtggtttaggttttgatccttatgcttatcatactagacatccttctactgttttgggtgctgctgggagagctttaattgctcattgtgaaaaagagaataaaaaatatgaaaaaagtgaataccgaatccttggaaacagtcttgacgacaaggacgtatttgatattatcgtcgaagtggttttgcagataatcaattttcaggtgatgattggattcattgttattttatgtgtccggtccgaccgggcggaggttgccggtgactcgatgcctcgggagagtatttgcggtgatggagcgggagtcggcttggtgagagaagcaataaagttatcatctactttaagagttcttcgatttgtgtttcttcgggttcggtggtctaaccggcaactcaccagcggtcagaccgacggcaaggcggcggtcagaccggcgggagcacagcggtcagaccggcggcggcaccaggcgcggcaggtgacatcggcggtcagaccgggtgatctatactggtcagaccggcggcatccactcggtcaaaccggcagatcaatctcggtcagaccaacttccatcgaattcgagggtgacatatccgtcgatagcgagacgtccgtggtgacttcgtcaatctcaagatatgccgtcctaatcttccggaggtgctcacaggatgcgatgcttgatggttccacgaaggcagccctgctgcagcagacaaatttgtctgatcgcatgactatatcagtcaatctcttttcaaatcagaaacatgaaagaaaaaataagtaccgacttgacagacaaagcaagagaagagcaagtgatagtgatcaactcactttgcagagggctgaaaagattaaagctgggaggaatttggaggttcaaaatgttaaagataaagttatttcgtcctctttttctaaactgggttttatcgatgcaaacaatgatagtaattttgtgaatgctattaaggatataaggactttggaagaagctaggttaagtgattgtattagtttgaaagacaagcataattctactgtttttcctgaaaatgaattgaccgacgatcagttggaggataattcagttttggaaaaactttgtagtgaaatcatggaggaggaacaacaactagatttcattgctttatcggagactgttaagagagattttacatctagtgcccttaaaaatctttgtggtgggaaagattttttgtggcattgtaaacctcccagggggcgttctggtggttggctgttaagagatggttttgttgatatggtaaaggaaatttggttaagtgttgatgaaggaaatacttctctagagaggtggcaggcaaagattcgtagactaagacaatttttaagaggttgggctaaacaaactagtggtacctataaaaaggagaagaaagccctgttagaaaaacttgatttacttgataaaaaagctgaatcaaccttgttaactcaggaagagcttaatgctaaacattatatgaggaataggttagcttttttgctcagagaagaggaaattaaatggtatcagcgggctaagaccaaagatattttggaaggtgactcaaatactaagtattttcatttggtagcaaatggtgtcttctctagaaaataa

SEQ ID NO: 40323 - DNA, 1635 bp, Oryza sativa
  Clone ID: PAT_MRT4530_43777C.1
atggctactcccgctaggttttcaactaagcctcatgttttcgatggaacggatttttctcattggtgtagtaggatgcaatcttatattatggctgaagattatgatatttggagaaacgtttctcatccttatgtgattcctgaagctattaatactgctgctgaaaaaactgcttttgaacaaaattgcaaagctcgcaatattcttttgagtgatgactatctttctcggtttaataaaattttgagtgatcttggatctgttgattcttcttatgatgctaattatccacaatctgagatttctcgccacttttttaatgatcttgacatatctatttgggagatgaaagttacatctattcaggagtctgttaacatgtcttctttgactttggattcgctttacacaaaactgaaaactcatgagatgaatattcttgctcgtaaagttgattctaagtctagtgctttgatttcttcctcgacttctttggatgttggtgcttcttcatcgaagtcttctgttcttgctttatttaatgccatgtccgatgatcaactcgaacagttcgaggaggaggacttggttttgttatctaacaaattttctcgagctatgaaaaatattaggaacaggaaaagaggagaaccgaatcattgttttgagtgtggagcacttgatcatcttcgctcgcattgtcctaagcttgggcgaggaaagaaggaagatgatggaagagtcaaagatgatgacgtgaacaagaagaagaacatgaaggagaaggagaagaagaagcattgtatgcaatggttaatccaagaactcataaaagtttttgatgaaccagaagataaagatgagagcaaaggtaagcatgttgttgatctagcttttattgctcgtaatgcaagttctgatgttgatgaatctgatgatgataatgaagaaaagcttagttatgatcagttagaatatgctgcttacaaatttgctaagaaacttcaaacatgttctattgtgcttgatgagaaggatcatactattgagattcttaatgctgaagttgctagattaacatctttgattcctaatgatgataattgtcaatcttgtgaagttttattttctgaaattaatgctttgcgagatgtcaattatgttaattgcaagaaattggaatttgagattgaaaaatctaaaaagttggaatcttcttttgctcttggatttgctttacatgctcgtgttgttgatgatttgattttgacaaagaacgaggtttcttatttgaaaagttctttgcaaagattttctgatggtaaaaagaacctcaacatgattcttgatcaatctaaggtgactcgatgtctcgggagagtatttgcgatgatggaccgggagtgggcttggtggaaaagtaaattgcacaaatgtaaatgcgacaatcaaaagagacaaggagacaagagatttttcaccgaggttcggaaactcgccggtttcctactccccgttgaggcgagcccaactccaccactcaaccacgaagccaccgcacgcccctttgtcatggggtgggcaaggcgggagccggcccacggagaggactaccaaagccttgatcactag

SEQ ID NO: 40324 - DNA, 1179 bp, Oryza sativa
  Clone ID: PAT_MRT4530_43778C.1
atggactgggagttggcttggtggatactaaggctagagttgatgcacgtggttgatggagatttcatatggcatacgatggagtctaaccggcatctcagcggcggtcagaccggcggcggcgacagcaagcgacagctgatcaggcggtcagaccagagtttcatctcggtcaaaccggtggctttcagacggtcagaccggacgactacctcgagtgatcttagatcttttgattcttcttatgatgctaattatccacaatctgagatttctcgtcactttttgattggtcttgacatgtctatttgggagatgaaagttacacctattcaggagtttgtgaacatgtctactttgactttggattcgctttacacaaaactgaaaactcatgagatgaatattcgttctcgtaaagctatggaaaatgttaggaacaggaaaagaggagaaccgaatcgttgttttgtgtgtggtgcacttgatcatcttcgctcgtattgtcctaagcttgggagaggcaagaaggaagatgatggtagagttaaagaggatgacgtgaacaagaagaagaacatgaaggagaaggagaagaagaagcattgcatgcagtggttaattcaagaactcataaaagttttttatggatctaaagatgaagatgagggcaaatattgttcaaagtgtgttttgaatgagatgaagttgaaagatgctttagggcgtgttaaacacatggaggaaattgttaaacaagatgaggaggtttcttatttgaaaagttctttgcaaagattttctgatggtaaaaagaacctcaacatgattcttgatcaatctaagaaaaaggaaagagaaattgcttttgcaaaacgacattggcaaaaatcgggttttaattcgaggaccacggttagaccgacactgaccagtcggtcagaccggccagcggtcagaccgcagctttttcatgtgctaatgtttgaggtagtagtttttgttaatactattggatctttaattgctcattgtgaaaaagagaataaaaaatatgaaaaaaatgaataccgaattcttggaaacagtcttgacgacaaggacgtattcgatgtgagcaaaataatgggtgccgaatccctggaaacagtcttgacgacagggacgtacccggaataa

SEQ ID NO: 40325 - DNA, 383 bp, Oryza sativa
  Clone ID: PAT_MRT4530_43779C.1
ggtgggttattatttaagccaaccaacgaacgaacggggaccctaacataatgcaggacaaaagggtaacgcaatacccaaaaatggaactatttgaacaagaggggttcactagaacagattgaagggagaagacgcatcgcacacctgggaaaggaacatatgaggaccccttgcctacaaagggccagcaaccccaagggtggggacggtgctcatcaaggaaaaccaccttttgcaagaaaaacgagaggatgccaaaaagaacagactcttacagcaaggtcccaccccgaaaactgagctgttgagcaaaaaaagcccaggatattggctaacatccactcttccgcagttggcccgccaacccctattgctgtggc

SEQ ID NO: 40326 - DNA, 330 bp, Oryza sativa
  Clone ID: PAT_MRT4530_4377C.1
ggattaaacataaattcatccccatttgaaaatgataatttataaaagcgaaagggggcggaaaagctaaaccctggacgccaaccttctccatttcccacaaaggtttttttttcttttttagtttgcccggtttttgaaaatggaaaaaaaaaccgaccacaaaattccaaacccaaaaaaactaaaaaaacccaaccggtaccacaattccattatagcaggtggggttttactagcagcagcagggggggtaatgccgggcccgggggttccccccggaaagcgggggttaagctgtcctggcccaaggggcggaaaaatgggttg

SEQ ID NO: 40327 - DNA, 4881 bp, Oryza sativa
  Clone ID: PAT_MRT4530_43780C.1
ttcgaggaggaggacttggttttgttatctaacaaatcttctcgagctatgaaaaatgttaggaacaagaaaagaggaaaaccgaatcgttgttttgagtgtggagcacttgatcatcttcgctcgcattgtcctaagcttgagagaggaaagaaggaagatgatggtagagtcaaagatgatgacgtgaacaaaaagaagaacatgaaggagaaggagaagaagaatcattgtatgcagtggttaatccaagaaatcataaaagcttttgatgaatcggaagatgaagatgagagcaaaggtaagcaagttgttgatacagcttttattgctcgtaatgcaagttctgatgttgatgaatctgatgatgataatgaagaaaagcttagttatgatcaattagaatatgctgcttacaaatttgctaagaaacttcaaacatgttctattgtgcttgatgagaaggataacactattgagattcttaatgctgaaattgctagattaaaatctttgattcctaatgatgataattgtcaatcttgtgaagttttattttctgaaattaatgctttgcgagatgtctattctgttaattgcaagaaattggaatttgagattgaaaaatctaaaaagttggaatcttcttttgctcttggatttgctttacatgctcgtgttgttgatgagttgattttgacaaataacgaggtttcttatttgaaaagttctttgcaaaggttttctgaaggtaaaaagaatctcaacatgattcttgatcaatctaagaaaaaggaaagagaaattacttttgcaaaacgacgttggcagaaatcgggttttaatttgaggaccacggttagaccggcactgaccagtcggtcagaccggccagccgtcagaccgcagttgaaccggcggtcagaccggttgccaggcccggtcagaccgcaggtacagcagtggtcagaccggcctcggggcaatttttcgcgaaattcaaatcaggcttttgtgaagcgacaagatgactcgatgcctcgggagagtatttgcggtgatggaccgggagtcggcttggtgtctaaccggcaactcaccggtggtcagaccggcggtaccgcggcggtcagaccggcgggtacacggcggtcagaccggcggcgacaggagtcggcggcaggcaatctcggcggttcgaccgatcgatctacatcagtcagaccgacgttcatcaagcggtcagaccggcgcaacaactttgggggtcgcacccgggggcggatgtgcctcgagaacctcccatggggatcgtgctcgggcctcgatgtgccccgagcaccgctcgcaggaggctgcacccagggatggacataccccgagcaccacccgcggtggttgcgctcgggggcgaatgtgctcaggcacaacctgcgggagaggagtaattttaacgccgaggtctttgcattggggcgttgcggccccttaaggtctgacggcaatcggtcacgcttagcgacgactggttcggtgtcagtttattttcggttatatgaggagctaatagcaggacatatgcgaggcacagttcgtccaagaattcaggccgcaggacctgctggtcgccggtggctgaggttagcagccaccctccgcccaatctcgccggctacggcggctgtcaggtatcctctgttccctctcgcctgcggccgcggcggtcaggtgccagctgtcaccatggcgaaggaggtcgatcggttcgtggagctggtggttgtccggcacggcgagacgtcgtggaacgcctcccgcatcgttcaggggcaaatggatccagagctgaacgagattggaaaacagcaggctgttgtggtggctcgtcgtctggcaagagaagctaggccagctgctatatactcgtctgatctgaagcgtgctgctgagactgcagaaatcatagcgaaagcctgtgatgtatcaaacttaatgttgactgaagcactaagagaaaggcacatgggatatctgcaaggtttgatgtgggatgatgctgtgaataaaagcccaagcgttttcaaaggcttcgctaattttgaagtcaaaaatggtttggactttgatgacagaaaccacgaattgccgcaaatatacgctcaaaaataccaatggcataaaaatgagggtggtggagaaagtcttaatcagttaagtgagcggtgcatctcctacctgaacaaagttgctcagaatcatatcggggagcgggtgattgttgtcggccatggtgctgccatactagaactctgccggcacactgatccacccaacaggtcgattcgcaggaaaattcccaatacttcactgaacattttccgcatttccggcgtcaccggccggtggatccttgagaggctcctgccccgcatcaccccactcccgcgccgccgcctccgccgcagccacagcccaaacccactaatctcccccgccgtcgccgcttccctcgccggggtcctcgccacccgctccacgaaccccacctgggcacggtccctcgcggcgctgctcccctccccgctctccgatgcccacctcgccgccgccgtctcctccctgcccgaccccgacctcgccctcgcgctcctctcctggtcccagtcccccgaccaccatgaagctctccccggccccgccacccctctcgctcactccgccctgctccgcctcctcgccagctcccgccgcttcgacgccgtggatgacacgctccagtccatgtctctcgcgggcgccgcgcccacgcgcgcctgccttggcgcgctcgtcgccgcctacgccgacgctggcatgcttggaaaggccacagatatgtgcgagcgcttaagggagcagtacggctcgctcccggaggtgacccattgcaaccgtctgctcaagctcctggtggagcagcggcgctgggatgacgcccgtaagctgtatgatgaaatgcttggcgaggatagtggtgcggataactacagtacttgtgtgcttgttcgtgggctgtgtctggaagggcgcgtggaagaggggttgaaattgattgaagcaaggtggggagctgggtgcattccacatgtggtgttctataacgtcttgatcgatgggtattgccggcgtggggatatgggtagaggattgttgctcttgggagagatggaagcgaagggattcttgccaacccttgtgacatatggttctcttataaattgtcttgggaagaagggtgatctagagaagattgggagtttatttttggagatgaggaaaaggggattgtcccccaatgtccagatttataacagtgtcatagatgctttgtgcaaatgctggtctgcaacacaggctatggtgatcttgaagcagatgtttgcaagtggatgtgacccagatatcatcacatttaatactttgataactgggctttgccacgaagggcatgttcgaaaggctgagcattttttgagggaggctatcaggagggagttgaacccaaatcagcttagctacactccattgatccatgggttctgcatgagaggggagttgatggctgcatcagatttgcttatggaaatgatgggcagagggcatactcctgatgttgtcacatttggagcactaattcatggtcttgtagttgctggcaaagtcagtgaggctttgattgttcgtgagaagatgacagaaagacaggtattcccagatgttaacatatacaatgtattgattagtggtttgtgcaagaaacacatgcttcctgcggctaagaacattcttgaagagatgcttgagaaaaatgtccaacctgatgagtttgtttatgccacattaattgatgggttcattaggagtgagaatcttggtgatgcaaggaaaatattcgaattcatggaacacaagggtgtccgccctgacattgttagctgcaatgccatgataaaaggttattgtcagtttggaatgatgagcgaggcaattctatgcatgagcaacatgagaaaggttgggtgcatcccggacgagtttacatataccacagttattagtggctatgctaaacaaggtaaccttaatggagctctaaggtggttatgtgatatgatcaagcggaaatgcaagccaaatgttgttacatactcttcattaataaatggatactgtaagacaggtgatacagactctgcagaaggcttgtttgcaaatatgcaggctgaagctctgtctcctaatgtggtaacttataccatcctaattggtagtctgtttaaaaaagacaaagtactcagagctggtttgtactttgaaaccatgttgcttaaccattgttctcctaatgatgttaccttacattatctagtcaatgggctcactagttgtaccccttgtgtcatcaactctatttgctgcaacactagtgaggtgcatggcaaggatgcccttttagtcgtattcaagaaattggtttttgacataggggatccaaggaattcagcatacaatgccatcatcttcagcctgtgtagacataatatgctcagggaagcattggattttaaaaataggatggctaaaaagggctatgtgccgaatcctatcaccttcctttcacttctttatggcttttgttctgttggaaaatcaatgaattggaggaccatccttcctaatgaatttcagcaagaggagttcgagataatctttagatacaaatttttgtttgaccaatatgcaactgagtcagtttgctgtgaagtctccagggttttacagcaatatctcgcagagtgtaaatccttgcaacgagtggagcagaaatttgctaattcttga

SEQ ID NO: 40328 - DNA, 1938 bp, Oryza sativa
  Clone ID: PAT_MRT4530_43781C.1
gtgctgttggtgcactttgtaaacacagagagaagtaataaagttgttgtctactttgagagttcttcgatttgtgtttcatcgggtttcgacggtctaaccggcgacataccggcggtcagaccggcggcaggtggcggtcagaccgacggaggagaggcgatcagaccagcggcgacttcacacgcggcaggcaatcttcaggcggttggaccggcggatcaacaccggtcagatcgactgctcatgagatttgggttgctttgaataattttcatcaaggtacaaataacattaaagaacttcgtcgtgatcttttcaaaaaagagtacattaaatttgagatgaaacctggagaagctttggatgactatctttctaggtttaataaaattttgagtgatcttaaatctgttgattcttcttatgatgctaattatccacaatctgagatttctcgtcactttttgaatggtcttgacatgtctatttgggagatgaaaattacatctatttaggagtctgtgaacatgtctactttgactttggattcgctttacacaaaactgaaaactcatgagatgaatattctttctcgtaaaggtgattctaagtctagtgctttggtttcgtcttcaatttctttggatgttggtgcttcctcatcgaagtcttctgttcttgctttatttaatgccatgtccgatgatcaactcgaacagttcgagggggaggacttggttttgctatctaacaaattttctcgagctatgaaaaatgttaggaacaggaaaagaggagaaccgaatcgttgttttgagtgtggtgcacttgatcatcttcgctcgcattgtcctaagcttgggagaggcagccaaggatgatgatggtagagtcaaagatgatgacgtgaacaagaagaagaacatgaaagagaaggagaagaagaagcattgtatgaagtggttaatccaagaactcataaaagtttttgatgaatcggaagatgaagatgagagcaaaggtaagcaagttgttgatctagcttttattgctcgtaatgcaagttctgatgttgatgaatttgatgatgataatgaagaaaagcttagttatgatcaattaaatatgctgcttacaaatttgctaagaaacttcaaacatgttctattgtgcttgatgagaaggatcatacgattgagattcttaatgctgaaattgctaaattaaaatctttgattccgaatgatgataattgtcaatcttgtgaagttttattttctgaaattaatgctttacgagatgtcaattctgttaattgcaaaaaattggaatttgagattgaaaaatctaaaaagttagagtcttcttttgctcttggatttgctttccatactcgtgttgttgatgagttgattttgacaaagaacgttttgaaaaaaatacaaagttgctttttgtgcaagttctttggtcaatgcttcatgtgcaaataaggcaaaacaaaacaatggtgttttgatttctcaagattgttcaaagtgtgttttgaatgagttgaagttgaaagatgctttagagcgtgttaaacacatggaagaaattgttaaacaagatgaggttttgattcttatgctcatcatactagatatcctcctactgttttgggtgttgctaggagagaaaaaggaaagagaaattgcttttgcaaaacgacgttggcaaaaattgggttttaattcgaggaccacaattagaccgacactgaaccggttgccaggcccggtcagaccgtaggtacaatggcggtgagaccagcctcggggcaattttgtgcgaaattcaactcggacttttgtgaagcaaaaaaataaaaatatcaaaaaaaatgaataccgaatccttggaaacagtcttgacgacaaggacgttttcgat

SEQ ID NO: 40329 - DNA, 3495 bp, Oryza sativa
  Clone ID: PAT_MRT4530_43782C.1
atggccggaggactagctcaactctggaaagagtggcaaattcaaatactaatcatcctcagcttcactctacaagttatcctccacctcttgtcatggatccgtcgacacaaaggttacaaagtgttaaggatcatcctatggctttcctatctatctgctgactccactgccatctacacgcttggccagctatccatgaccacaagcagcagctcacgtgagcacctgctgaatgcgttctgggcaacattcctcttacttcacctgggtggcccggataacatcacagcttattccttggaggacaaccagctctggttgcgccacctgttaactttcacagtgcaggtgttgggtgttgcttatgttctctacagatacattgccggcagtaggactttggtcgaggccatcatcctaatgtttgccgtcggtgttgtcaagtatgggaagagggtatgggcattcatgtgtgctaacatggacagcatccgaagctctcttgattttttagatgattcaagtgctcacaatccttaccttgagcaggccagaaaagagaggatgaacagagatctaaagcaggctctgttgggtgctcattacatgttcgatttttgcaagagcctattcgttgatgctctttcgatgtcagagccccaaagaagtgctgtcgataggagagatgcttatcacatagttgattttgccgtcacttatgctttgttgatcggggctatcctccttgagatcacaacattgctgaggactgtagggtcttcttggacatgtgcgttcttgcatactaggaaatgggattggccctgcaattctgtaatgtttactcgtcagattgtgaaagcaggacgaagtagattatggctggattctattggacaatataacttgctagatttctgtacccgtgatatgacggatctgagaggcaggattgccatgaaagtggggcttgagaactggtttaataaactgcattactcaaacacaacctcaatttcaagtgatatcaaggagtttgtgctaaaagagatacaaaagagaggccgaggggacatcaggaatgcacggcgtatgtgcatcctctatgagaataaaatggatgaggaactcagctggagcacggtagacattgactttgaaaaaagcatccttgtgtggcatgtcgcaaccgatgtctacctatgttgtttcaaagaagaggtggaacatacagagaaacctgttgtaaaggtgatcaaggagatctccaactacatgttgtacctccttctgcagcacccggatatgctacctgggccaattcgcataggtctgtacccaaaggtatgtgcaagtttggttgaactctggcaggagcactccaccagtagctcggagggtggagacaacaaccgctcaaaaagcaagaaactagcaagcttgttgttccaaaaatttggcagtgagagcacagataatgaacacggccaggtttaccttgatgggactgcagtcgctgggtacctacttcgcaacgaatgcaatgtgcccaacatgctggggttgattgctggggtgtggttcgagatgttgtgctatgcggcgcaccactgcagcgaggagtcacatgccaggcagctgagcactggtgtccgtgagaagtacaatggcactgaacaaatccaaatggcaagtggtgcaggtgactcgatgcctcgggagagtatttgcggtgatggaccgggagtcggcttggtgagaagcaataatgttgtcatctactttgagagttcttcgatttgtgtttcatcgggttacggcggtctaaccggcgatatattggcggtcagaccggcggcaagcggtggtcagactggcagcgtacaaaataacattaaagaacttcatcgtgatcttttcaaaaaggagtacattaaatttgagatgaaacctggagaagctttggatgactatctttctaggtttaataaaattttgagtgatcttagatctgttgattcttcttatgatgctaattatccacaatctgagatttctcgccactttttgaatggtcttgacatgtctatttgggagatgaaagttacatctattcaggagtctgtgaacatgactactttgactttggattcgctttacacaaaattgaaaactcatgagatgaatattctttctcgtaaaggtgattctaagtctagtgctttggtttcgtcttcatcttctttggatgttggtgttttttcatcaaagtcttctgttcttgctttatttaatgccatttccgatgatcaactcgaacagttcgaagaggaggacttgcttgggagaggcaagaaggaagatgatgggagagtcaaggatgatgacgtgaacaagaagaagaacatgaagcagaaggagaagaagaagcattgcatgcagtggttaattcaagaactcataaaagtttttgatggatctgaagatgaagatgagggcaaaggtaagcaagttgttgatctagcttttattgctcgtaatgctatttctcatgttgatgaatctgatgatgataatgaggaaaagcttagttatgatcaattagaatatactgcttacaaatttggtaagaaacttcaaacatgttctattgcacttgatgagaaggatcacactattgagattttaaatgctgaaatttctagattaaaatctttgattcctaaagatgatgaatgtaaatcttgtgaagttttgttttctgaaattaatgctttgcgagatgtcaattctattaattgcaaaaaattagaatttgagattgaaaaatctaaaaagttggaatcttcttttgctcttggatttgctttacatgctcgtgttgttgatgagttaattttgacaaagaatgtgttgaaaaaatacaatgttgctttctgtgcgagttctttggtcaatgcttcatgtgcaaataaggcaaaacaaaacaatgatgttttgatttctcaagattgttcaaagtgtgttttgaatgagatgaagttgaaagatgctttagggcatgttaaacacatggaagaaattgttaaacaagatgaggtgttttcttgctcaacttgtagaaaacaaaaaggtcttttggatgcttgcaaaaattgtgctattcttactcaggaggtttcttatttgaaaagttctttgcaaagattttctgatggtaaaaagaacctcaacatgattcttgatcaatctaagctttttcatatgctagtatttgagaattttggtgatatcgttgggtttgctgttttgttgggatcggtcagaccaggcagtggttgccggtcagaccggcgctatgtgagcggtgactcgatgcctcgggagagtatttgcggtgatggaccgggagtcggcttggtggtaaggcgatgtccgtggtggtcagatatcatgcgggttactaacactagagttgatgcacgtggttga

SEQ ID NO: 40330 - DNA, 684 bp, Oryza sativa
  Clone ID: PAT_MRT4530_43783C.1
atggctaataaattcacaactaagccccatgttttcgatggaaaggattttccgtattggtgtattgattctaagtctagtgctttggtttcttcctcgacttctttggatgttggtgtttcttcatcgaagtcttctattcttgctttaattaatgccatatccgatgatcaactcgaacagttcgaggaggaggatttggttttggttactaacaagttttctcaagctaggtacagaaaaaagcttgggagaggcaagaaggaagacaacggtggagagaagaccaataatgacaacaagccaaagagtgcattcaaagggaagaagatcaaggagactctcaagaaggcttttgatcaagtctacgccgcttttgagccactaagcgatgtagatggtgaaagtggaaatgaagttaagggaaagaacatctccggtgtttgcttcatggcacgtggtgaatcggatttagagtgtgaagacaatgagtgttttcttgccccaaatgtcgtaaaagcaaggggtgtcatggtagattgtgaaaattgtgttaatttagaaaaagaggtttcttatctgaaaagttctttgcaaagattttctaatggtgacttgatgcctcgggagagtattgctggtgatggatcgggagtcggcttggagataagacgatgtccgtga

SEQ ID NO: 40331 - DNA, 462 bp, Oryza sativa
  Clone ID: PAT_MRT4530_43784C.1
cccacgcgtccgcccacgcgtccgcccacgcgtccggttttgtactgaactgcgaattcatcgtaagtatgacttaaagggctctacacaaggccgatcaacaaagaagcaaaatataaatgagaacacaacactaaaggaccttgacctatcatatgtttttcacgtggataaaccatggagggaggcacttttcaggcagatagctcttgattgtatgttcctggaatcccaatctataattgactatagcatgctattgggaatccatttccgagctcccaatcacctgaagcgtatcacatcatgtcagaacgctcttgaaagtactggaatttcagctgaaacggaatgtagtgttgcactgcatcatgaggagacaatttcttcaaagggatttctactagttgctgctgatgagccaggtccagcagtacgtggttcgcacataagaggaagcat

SEQ ID NO: 40332 - DNA, 1910 bp, Oryza sativa
  Clone ID: PAT_MRT4530_43785C.1
ctgtgatgaacaattggcatcttttgagatgaaacctggagaagctttggatgactatctttctcggtttaataaaattttgagtgatcttagatctgttgattcttcttatgatgctaattattcacaatatgagatttctcttcactttttgaatggtcttgacatgtctatttgggagatgaaagttacattaattcaggagtctgttgatatgtctactttgactttggattcgctttacacaaaactaaaaactcatgagatgaatattcttgctcgtaaagttgattataagtctagtgctttgatttcttcctcgacttctttggatgttggtgcttcttcatcgaagtcttctgtttttgctttatttaatgccatttccgatgaacaactcgaacagttcgaggacgacgacttggttttgttatctaacaaattttctcgagctatgaaaaatgttaggaacagtaaaaaaggagaaccgaatcgttgttttgagtgtggtgcacttgatcatcttcgctcgcatttttctaagcttgggagaggcaagaaggtagatgatgagagagtcaaagatgatgacgtgaacaagaagaagaacatgaaggagaaggagaagaagaagcattgcatgcagtggttaatccaagaactcataaaagtttttgatgaaccggaagatgaagatgagggcaaaggtaagcaagttattgatctagcttttattgcttgtaatgcatgttctgatgttgatgaatctgatgataataatgaagaaaagcttagttatgatcaattagaatatgctgcgcttgatgagaaggatcatactattgagattctaaatgctgaaattgctagattaaaatcttgattcctaatgatgatgaatgtaaatcttgtgaagttttgttttctgaaattaatgctttgcgagatgtcaattctgttaattgcaaaaaattggaatttgagattgaaaaatctaaaaagttggaatcatcttttgctcttggatttgctttacatgctcgtgttgttgatgagttgattttgacaaagaacgttttgaaaaaaatacaaagttgctttttgtgcaagttctttggtcaatgcttcatgtgcaaataaggcaaaacaaaacaatggtgttgtgatttcacaagattgttcaaagtgtgttttgaatgagttaaagttgaaagatgctctagagcgtgttaaacacatggaagaggttgttaaacaagatgaggttttgatccttatgctcatcatactagacatcctcctactgttttgggtgttgctaggagagaaaaaggaaagagaaattgcttttgtaatacaacgttggcaaaaatcgggttttaattcgaggaccacggttagaccgacactgaaccggttgccaggcccggtcagaccgcaggcactgcggcggtcagaccggcctcggggcaaatttgtgcgaaattcaaatcggacttttctgaagcaaaaaggtaaaaaatatgaaaaaaatgaataccgaatcctcgaaaacagtcttgacgacaaggacgtattcgatgtgagcaaaataataggtgccgaatccctggaaacagtcttgacgacaggggcgtacccgaaataaaagagaaaaatatgagcaaacaggctcaggaaaagaaaaagttcaaaaaattctcttgcttggaggtaagacgatgtccgtggtggtcagatattatgcgggatactaaggctagagttgatgcacgtggttggtgaagattccatatggcatacgatggaggtattgtgtgcgtatgggatgcggagtcgaatttggaaggagtccaaatttggtacgattggttatgtaaagtttgtgtcttgtactagagggtttccta

SEQ ID NO: 40333 - DNA, 294 bp, Oryza sativa
  Clone ID: PAT_MRT4530_43786C.1
atggaccagatcgaggacgccgacgtcgagatgcctgagctggtggagttggtcgacgacgagggcggcctgcaggagatcatcgacatcatccgtgtccaccgatggaaggcgacatatgagaggatcatcgccactgccgctgacgtcaactcgctcatcctctccaaccacgtgcagctcctctaccagtttgacaaggacctcgacagttgcccactattcaaggccgcctactgccttggtggattggctaagtcctggccatctcacatgctgtcacgctccggctag

SEQ ID NO: 40334 - DNA, 439 bp, Oryza sativa
  unsure (1)..(439): unsure at all n locations
  Clone ID: PAT_MRT4530_43787C.1
aaaagattgtccctcgagaaatacttgaagaagtacaagtacatggcatttcaatggtgagcncgttcgggtgcgaaggggaggccctttgacatagtaagcattctcccaatgtcaacgcttgaanccttgaaccatgtaatgatgagacgacctagaaggacacaccttcaatgtatttagcagttactgaccctggtcctttgtgattactgtctttcctgaggctgtacaaagatttctgtcgttcctcttatgtgaaagcatggttagattgtactgctttgtaggcaaatgaacagtggactcaatacagttactaactagatactggtttagttaatggaaagcattgtgatgctccaaacaagtaagatgtgattctccaatgggtatttggaacaccagtgtaatgaccaaaaaaaaaaaaaaaaaaaaa

SEQ ID NO: 40335 - DNA, 687 bp, Oryza sativa
  unsure (1)..(687): unsure at all n locations
  Clone ID: PAT_MRT4530_43788C.1
agcttcaccgtccttctttgtgatacccaattgaaaatggaaactccttttaccgtcaaggctcagccgggagctgatgtctggaagcagcctccttctacagacgtcttcacagcccccttccgtcctcactctatcgctcccctgaagcactttatctcagcaacaatcactttccgcacaacctacgtccaccagtacgatcaagcctgtcttctcctcaccttcaccaagccaggcgccccccgaaagtggatcaagacgggcattgagctgtacaatgagcacccgcgctactcaactgtaacatgcgactcttgggccgattggagcgttgaggcggtaggacccaacgatgaagctggtgtcatgagtggtgagaagagcgtcactatcaaggcgatgaaggtcgaggatgccctgggtgtttgtctctgggtctacagggtcgatgagaacggcgaaaagacgccgttgagacagactagctgggtgtacggcgacgaaggtggtgagggctgggagctcgaggtctcagctgctgtcgccaggccagatcctcataagaacatcaaggatgatcttgaggctacgtttgacaagttggacgtcgaatgggagaagcctacagcttanacaaatttcacaagttaagcaagtatttgacatatacancaagacatcgca

SEQ ID NO: 40336 - DNA, 336 bp, Oryza sativa
  Clone ID: PAT_MRT4530_43789C.1
cgaaccaaaagtaaccaaccattcattggactgatgtatatatgaacacacatgattgacctatgagtttatcgagcgtccgtcgattgcatatacttcgcttgcgcgacaacattgggcctgaatgagccaactcgataagactatggcccaggcacaatcgtctctcgacacaacttgatcctacccctgagacccatgatctgggtcacatgcactaactatgcatgtatgatacgttaagctcgcggaggatagtctgtctttcttgctcacacacatatgaacctgtgatcattaggggtaaacaaacgatcgatcaccattgatgacgac

SEQ ID NO: 40337 - DNA, 270 bp, Oryza sativa
  Clone ID: PAT_MRT4530_4378C.1
atgggaacatgggctgatcgagccgcctctcgtgcatgggcggcggccatcattgtgtcggagaacctggaatacaactgctggctgcatgaaggcatgacgacaaagaacgagcaaggaactagcagagtagatagcagcccgaggattcgtgcggcggcggtgacggcgacatgctgctgcgtacctcagctgcgaccggcgggcgttacgggcgcgtgcgacagcggtatccggctcgagcggcaggcgcagcaggccaaggcctga

SEQ ID NO: 40338 - DNA, 570 bp, Oryza sativa
  Clone ID: PAT_MRT4530_43790C.1
atggagaaatacgagccagttcgggagatcggggcgggcaacttcggggtagcgaagctgatgcggaacaaggagacgcgggagctggtggcgatgaagttcatcgagagagggaacaggatcgacgagaacgtgttccgggagatcgtgaatcatcgttcgctgcgtcacccgaacataataaggttcaaggaggtggtggtgacggggaggcatctggcgatcgtgatggagtacgcggcgggaggggagctgttcgagaggatatgcgaggcggggaggttccacgaggacgaggcgcgctacttcttccagcagctggtgtgcgggcccggccccgcgcctcaagatctgcgacttcggctactccagtcctccctcctccactcccgccccaaatccaccgtcggcacccccgcctacatcgcccccgaggtcctctcccgccgcgagtacgacggcaagctcgccgacgtctggtcctgcggcgtcaccctctacgtcatgctcgtcggcgcttaccctttcgaggatcccaaggaccccaagaacttcagaaagaccatctcg

SEQ ID NO: 40339 - DNA, 1734 bp, Oryza sativa
  Clone ID: PAT_MRT4530_43791C.1
ttttttttttttttttttggccgcgggttttttttttttttttttttttccgaaatcaaagttgtcacttctgaagtaacagtaaaatggtgattgtgcctgaacataccctgcagttacatccatcatctagtggtctctgattctgatcacaattaagcagagagatgataacaggctactcgtagcaggggagatttacatcaatgaatgctgccttactcatataaacaggtgatgtaataatgtacccaaagtttgtttggggactgatcgatcgagtatctatctatgtatgaatgagaaaatgcatgcaatcagtgcagatggggttgatccaaaacgaaatgatcgatgctggtcagaagaacacaacactagtgaagtggagtatggacgacgatggatcaggagatttggaggtttgacatgtcgaggtcgacgctggcgtgaacctcgcgcaccgtcctgtcgtagtcgtcttcttcgtcctcctcctcagctggttgttggtcgtcgtcgtcgtcgtcggtgccccagccgtagccagagacgggcttgtcgggcttggggacggtctgcgcctcctgcacgatcctcatgatgtcctccacgctctgcggcgagaaggcagctgcagcagccgcactacttgcgctggcagccgcgtgatcggctccccggcggttgtagtagacggcctgcgcctcctccttgagctcgcgcggcaggttcttgaggaaccaggggtggctcttgatctcgcccatgctgatgcgcttgtaggggttggcgacgaagatgcgggagaggaggtggcggcagggctgggagacgtggacgtactcggggatcttgtactggacggacatgatgcgcgagatggtctttctgaagttcttggggtccttgggatcctcgaaagggtaagcgccgacgagcatgacgtagagggtgacgccgcaggaccagacgtcggcgagcttgccgtcgtactcgcggcgggagaggacctcgggggcgatgtaggcgggggtgccgacggtggatttggggcgggagtggaggagggaggacttggagtagccgaagtcgcagatcttgaggcgcggggccgggctgccgtccagcagcgtattctccagcttgaggtcgcggtggcagatctgcatggcgtggcagtagctcaccccgcacaccagctgctggaagaagtagcgcgcctcgtcctcgtggaacctccccgcctcgcatatcctctcgaacagctcccctcccgccgcgtactccatcacgatcgccagatgcctccccgtcaccaccacctccttgaaccttattatgttcgggtgacgcagcgaacgatgattcacgatctcccggaacacgttctcgtcgatcctgttccctctctcgatgaacttcatcgccaccagctcccgcgtctccttgttccgcatcagcttcgctaccccgaagttgcccgccccgatctcccgaactggctcgtatttctccatatcctacctcctcttcttctcctctcacttaatttcttgctttcaattctccttctccttctgcttctgcttctgcaggaggaacagtatctggaggaaagaagcagagcagagcaagaagatgaggaggagatgacagacgacgacgcagataacctgcagacagatagacgacggacaggctgaaagaataagaggaaagccagccggccgg

SEQ ID NO: 40340 - DNA, 1296 bp, Oryza sativa
  Clone ID: PAT_MRT4530_43792C.1
gtagtggctcccccccacgggcccgggaaagagaaagaggatcgtctcggctcgtcgtcttctagctagggttcgtaagttctagggtttgcgatgatccccaactcctcctccctctagtatttcgagcgaattctccaacactttcacccagccgcgcgcgagaggagaaggaagatagatagatagatcgctccgcacatactatggtgctcaccccatcgccgtctccaccgccgatgctccccaagaagctccgcgcgctcggtccaggcttgaatccctttgctcccttcggcatgggtaactactattcctcctctcgctaatatatttctcctcgctcgatccatcttcccccacctccccccttctcaaacaattaatccccttcccgattcgattcgattcggttcggttcgctttcggactcggtttcaatttcgattctccctccgtcgtcgcggccctattctagccgccccctcccctccgctcgattgcctgcctccggatggtgcaattccgcagctctctcagcatgagccgggcacggacccgccacggcgatggcgacgaccgcggctggaaccagctccacgtcgcctcccgcaagggcgacctcaaccaggtgaggcgtctcctggatgatggcatggatgtcaatgcacctgcatgggggccaaaatcacctggcgctacccccctgcatttggctgctcagggtggacatgttaaaatcatggacgagctactggagcggggtgcaaatattgatgctcgcacaaaaggagcttgtggatggacccctctacatattgctgctaaggaaaggaacaaaagagctgtcaggtttctgattgagaatggtgcattcttgccacctgacatgaatgaccacaggttcaatcctcctctccattactgctctggattggaatgggcatatgagatgaagcgcatgcaagacgaaagtgattcgaccggtgaaacttctctgggctcggagagctagaggaaagcaatctcctcagtctggcaaagaggtcaatcttggatcaacagagtttgtaaacatcaagggtcacgtttactttgtgaaattggaacgaattaccatgtgaatcttacatgcgacatggtactagcatgcattgcgatgttgttgtggggttacttgtgttttcgataattgcattgtgttcttactacactggtagcatgtattctactacacattcttaatatcagaatcaatatccggtttgcgtcctaaaaaaaaaaaaaaaaaaaaaa

SEQ ID NO: 40341 - DNA, 417 bp, Oryza sativa
  Clone ID: PAT_MRT4530_43793C.1
atggtcctgagagagaggctgggagaagagggcgttgtacgccgcaactgcctcagccgacacaagacccttctcacgcacaaacacaagcttgcgcttcaaattcaccacccacatggtggcgatggcaagcgctggagacgaggacagcaggagcagtgttggggaagagacctagagcagctggcgaggaaggcgcgcaacgccgcgctctcggcgaccgaaagcgggagctacgccatcgggacaaggtcgatagaggcggagagcagcgggccagtgggggagggagccggaggtgtcgaagaggcactggcactgctagagaagagacctaccatcccgccagcgtcgctgaaagaagagagggtggcggggcctgtgcgtgatgcgaggttggcgtgcgagagcgattag

SEQ ID NO: 40342 - DNA, 1452 bp, Oryza sativa
  Clone ID: PAT_MRT4530_43794C.1
atggagattgcagtatcagcagtaaccggtgaactcttcagccggttcatctccttcctcctgagcaagtactcgagccatgaaatttcagaggataagcagctggaaagactgcagcagctgctcctacgaatatgcgcggtcgtcgaggaggcggacgggcgatacatcaccaactctgggatgctgatgcagctgaaggggcttgcagatgccatgtaccgagggcaccatgtcctggacatgctcaggtgcaggaccttaactcaggagaattccatcaaggaggttcaggttggcagcccatttccccctctcaaacgttttcgcgcaattgttgatgctgctgggaaggacaaggccaggtactttgagattcatagaactttggagatattagaaacagctgttgatcacatgccagaatttgttgtgcttttgggtggatgcgagcgaatgtcgcggaggccatatgatgcatatctttacatagacaacttcatgtttggccgtcatactgaaaagcagaggcttctgaatttcctgttggaatacaaccctccaagtcttcctgctgttcttccaatcgtgggaggtcatgcagttgggaaaaaaactctgattgcacatgtatgcgctgatgagcgggttcaatctcagttctcttcaattttgcatttgaatgaagatgatcttttgagaatagcacacagtgatactctcttgtcagggaagatgttggtagttgttgagtttgtttcagatttgaatgagaaaaattgggaggaattctatacaagtctagcacaaatgaatgaaggaagcaaggtgataaccataagcaggtttagaaaatcagagaaacttggaactgtgaagccaattttacttgacatccattcacatgaagaattgacctaccttttcaagacactcgcatttggaagtgcaaaccctatggaccatccacgattactgcaagtagccgaagaatttgccatgcaattgcagttgagagggtcacttatctcagtgaatatttgtgcagatgtattaagatggaatttggatgtcaatttctggattagtatactgaacaggtgcataacagtggctgaaaagaacttctccttgtacggtaagcatgttaggtcactttttgaacaaggtcatcgtctagatatcaccaactttgcttcatcttcagctgctccattgcacatcataccatttgctggtcacagtagtgcactgaaggacttacaaagggttacattaagagaactattactagatcctagtgttagaccaaaaggtgacttcaatctagtttcatgggaatcaaggctacctccttatacttcatttattcactttgttccaaattattctcaagattttcctaaagataaacccttgtcaggaaggaagcgtcgaggagatccttcctaa

SEQ ID NO: 40343 - DNA, 237 bp, Oryza sativa
  Clone ID: PAT_MRT4530_43795C.1
atggccggccactctgacgcctggaaaggcgccattccaacgtgcaagctagctagtgcctggacgagttcgagccggcggcgagcgcaggggtgcctgccggagtgccggtggaaggacggcagcgtcgacagggacttcgtggcgctgccgctggcgagcatgaaggctataggtcgtatgaacatgtgggctgtggcggggcaagttgaaattcaaccaaacaacccattgtag

SEQ ID NO: 40344 - DNA, 659 bp, Oryza sativa
  Clone ID: PAT_MRT4530_43796C.1
actggtctgatggtgtttgccccaacaactgcagtcatcctagcagccaaaatgatgtggctaccccagacccagagcatgaggaagagatctttgagagcctacggccgcacaagaacatcgaagaattggaggagttccgtggaaacatcaccacaaaggcattcccagctgttgaggagctggagtttcaagaaatgttgaaatgggttgagtggtctcaagttggtcaggatgactttccttcactccgcctgctaaaaatcaaggatagccacgagttgaggtacctcccacaggagctatcttcctccctcacaaagttagttatcaaggattgcagcaaacttgctagtctaccagctattccaaacctcactactttggtcttgaagagcaagataaatgaacaaattctgaatgatttgcactttccgcatctcagatcactgaaattacatgagtctaaagatgcttggtatgaagagcaacaagctctgaatgaattgaatgatgcaagtgaggacgagcacagagaggagtttgggcttttgtacgaagatgacaatggagaggacaacgatgagcaagaccatgagcagtcagaagatgaggaaattcagtacggcagtgatgacagtagcgaagaggatgaatag

SEQ ID NO: 40345 - DNA, 816 bp, Oryza sativa
  Clone ID: PAT_MRT4530_43797C.1
ctacacgaggatggatcgacggttgtacgtgccttcaccagtcaagctcgaggggcgcccgcactcgtctcccagtggcagcgccaacgacagagcccattccatctcgcgcatcgcgtcagccgatggagcggacgagcggtgatcatcttcaagagggagggatgcggcacagagctgccgaggacatgccggcggccactcgatgttcgtgcagctaggctcctcttcttctctggcgccggcgacacccccggggtagggtgggggttggaggaggagttcaccggcgtagagggatggccgggggaggcggcagctcggcgatgggcggcggatcgggcgggcggcgaggcgccggcggcggcgccggagccgcggggctggaggagggcggtgggctggcgttggtggcgggggtatcaccgacgacgactcgtggaggaaggagggggagggggtgagggggaggaggctggccggggaggtctcgccggcgccgttgacgccctctggtgagccggcgcgacgcggtggggtggtggcggcgggggatcggccggagggatcggtcggagggtggcggctgaatcgcgcgacatcggaggggaacggaaggagagctagggttaatgcctcgggctcctcctcctcgtctcctgctctcttcaccgccgcagaccaggtcagcagttgagcaccatggcaagaaagttgagaggtcaggcggccagcagcggcacgtacgtacctcgcgcccagcacagccgcgcagtcgcagatcgagcagatgtggtcagactcagagctggacat

SEQ ID NO: 40346 - DNA, 2603 bp, Oryza sativa
  Clone ID: PAT_MRT4530_43798C.1
atggctggactactagcatctggaatcataaagtggacaacaaacaagctttcttccttggtttctcctcaaatcgtttcatcatcatctgacgagcaaagtgcttcgttcagagatctaagagatctgcagaggacgatggcaaggattcagcggaccctcgatgcgatggatgaacacaatataagagatgaagccgagagacttcgcctgtgggagctgcagcagcttgcatatgatgcccaggatgctgtcgatgaatacaggtatgagttgcttcgacggaggatggaggaccaaagcaatcaaaggcagagcagcagaagtcgcaagcgcaagcgcaaaggtgacaagaaggaacctgaaccatcccctatcaaagttcctgttccagatgatttggcagcaagggtgaggaaaattttagaaaaattcaatgagatcacaaaggcatgggatgatctccaactcaatgagagtgacgcaccaataagagaggaggcctatgacatcaagatatctacaaccccgcatgtaggtgattttgacatagttggtagagaagaagacaaggaaaacatcatcgaaatattaatttccgatgaagctgctcaagcaaatatgtctgttgtttctattgttggcatggggggtttgggtaagacaactcttgctcaaatggtgtacaatgatgaaagagtcagcaggtactttcaactaaagggctgggtggatgtttctgagggtcattttgatgttaaggcaattgcaagaaaaattatcatgtcgttcactaggaatccatgtgatatagaagatatgggtaatctccaaaatatgataacggcgcaagtacaagacatgaagttctttctagttcttgacaatgtgtggaatgtgcagaaggaaatctgggatgctttgctttccctgttggtgggtgctcagttgggaatgatcttattaacaacacgcgatgaaactatttcaaaaatgataggaacaatgccttcttatgatcttagcttcctaacttctgaagaatcatggcagttgttcaagcagatggcctttggatttatagatcaacatatggatcaacagttcgaaggatttggtaggaaaattgtgggaaaatgtggaggcctaccattggcaattaaggcaataggatcctctcttcgcggtgagacaaatgaagagacatggaaagatgtctcagagagtgatcaatggggcttacctgcggaagaggatcgagtgctgccagcactaaaactcagctatgatcgaatgccagtacaattgaagcgctgctttgttttcctttcactgctccctaaggggtactatttctggaaagaagacatgataaatctctggatgtgtttgggactcctcaagcaatattgtactgggcgccatgaaaacattggcaggatgtacttcgatgatttaattcagagggcaatgattcaacgagcagaatctgatgaaaaactggaatgctttgtcacacatgatcttatccatgatctggtacattttgtttctggaggagatttcttgagaataaatactcaatatttgcatgaaaccattggaaacttccgctacttgtcattggttgtcagttcttctgatcatacagatgtagcactaaattctgtgacgatacctggaggtataagaatccttaaggttgtcaatgcacaagataatcgaagatgttccagagaattgaaactactcagatatcttagctttttccaaacacgaattaccactatcccagaatcaattagtgacctctacaatctgagggtcttggatgcaagaacggacagccttagagagctcccacaaggcataaaaaaactggtcaacctccgccatctcaatttggatctttggtccccactttgcatgccatgtgggataggtgggctaaaaaggctacagacattgccaaggtttagcattggaagcggaggttggcattccaatgttgccgagctacaccatctggtgaacatacatggagagttatgtattacaggactacggagggttataaatgttgatgatgctcagacagctaatttagtcagtaagaaccaattgcaaatcctgagattagactggtctgatggtgtttgccccaacaactgcagtcatcctagcagccaaaatgatgtggctaccccagacccagagcatgaggaagagatctttgagagcctacggccgcacaagaacatcgaagaattggaggtagtcaattatagtggatacaaatatcctagctggtttggggcttctaccttcatgcacttggcaaagataatcctatgtcagcaaagctgcaagttccttcctccacttggggaattgccacgcctccgcatactctctatggagtgcatgacagatgtggagcatgtgcgacaggagttccgtggaaacatcaccacaaaggcattcccagctgttgaggagctggagtttcaagaaatgttgaaatgggttgagtggtctcaagttggtcaggatgactttccttcactccgcctgctaaaaatcaaggatagccacgagttgag

SEQ ID NO: 40347 - DNA, 3369 bp, Oryza sativa
  Clone ID: PAT_MRT4530_43799C.1
atggctggactactagcatctggaatcataaagtggacaacaaacaagctttcttccttggtttctcctcaaatcgtttcatcatcatctgacgagcaaagtgcttcgttcagagatctaagagatctgcagaggacgatggcaaggattcagcggaccctcgatgcgatggatgaacacaatataagagatgaagccgagagacttcgcctgtgggagctgcagcagcttgcatatgatgcccaggatgctgtcgatgaatacaggtatgagttgcttcgacggaggatggaggaccaaagcaatcaaaggcagagcagcagaagtcgcaagcgcaagcgcaaaggtgacaagaaggaacctgaaccatcccctatcaaagttcctgttccagatgatttggcagcaagggtgaggaaaattttagaaaaattcaatgagatcacaaaggcatgggatgatctccaactcaatgagagtgacgcaccaataagagaggaggcctatgacatcaagatatctacaaccccgcatgtaggtgattttgacatagttggtagagaagaagacaaggaaaacatcatcgaaatattaatttccgatgaagctgctcaagcaaatatgtctgttgtttctattgttggcatggggggtttgggtaagacaactcttgctcaaatggtgtacaatgatgaaagagtcagcaggtactttcaactaaagggctgggtggatgtttctgagggtcattttgatgttaaggcaattgcaagaaaaattatcatgtcgttcactaggaatccatgtgatatagaagatatgggtaatctccaaaatatgataacggcgcaagtacaagacatgaagttctttctagttcttgacaatgtgtggaatgtgcagaaggaaatctgggatgctttgctttccctgttggtgggtgctcagttgggaatgatcttattaacaacacgcgatgaaactatttcaaaaatgataggaacaatgccttcttatgatcttagcttcctaacttctgaagaatcatggcagttgttcaagcagatggcctttggatttatagatcaacatatggatcaacagttcgaaggatttggtaggaaaattgtgggaaaatgtggaggcctaccattggcaattaaggcaataggatcctctcttcgcggtgagacaaatgaagagacatggaaagatgtctcagagagtgatcaatggggcttacctgcggaagaggatcgagtgctgccagcactaaaactcagctatgatcgaatgccagtacaattgaagcgctgctttgttttcctttcactgctccctaaggggtactatttctggaaagaagacatgataaatctctggatgtgtttgggactcctcaagcaatattgtactgggcgccatgaaaacattggcaggatgtacttcgatgatttaattcagagggcaatgattcaacgagcagaatctgatgaaaaactggaatgctttgtcacacatgatcttatccatgatctggtacattttgtttctggaggagatttcttgagaataaatactcaatatttgcatgaaaccattggaaacttccgctacttgtcattggttgtcagttcttctgatcatacagatgtagcactaaattctgtgacgatacctggaggtataagaatccttaaggttgtcaatgcacaagataatcgaagatgttccagtaagttgttttctagtagcatcaatgttaaaattcctaccgaaacatggcaaaatcttaaacaacttcgtgcattggatttcagtcatactgcacttgcacaagtacctgattcaataggagaattgaaactactcagatatcttagctttttccaaacacgaattaccactatcccagaatcaattagtgacctctacaatctgagggtcttggatgcaagaacggacagccttagagagctcccacaaggcataaaaaaactggtcaacctccgccatctcaatttggatctttggtccccactttgcatgccatgtgggataggtgggctaaaaaggctacagacattgccaaggtttagcattggaagcggaggttggcattccaatgttgccgagctacaccatctggtgaacatacatggagagttatgtattacaggactacggagggttataaatgttgatgatgctcagacagctaatttagtcagtaagaaccaattgcaaatcctgagattagactggtctgatggtgtttgccccaacaactgcagtcatcctagcagccaaaatgatgtggctaccccagacccagagcatgaggaagagatctttgagagcctacggccgcacaagaacatcgaagaattggaggtagtcaattatagtggatacaaatatcctagctggtttggggcttctaccttcatgcacttggcaaagataatcctatgtcagcaaagctgcaagttccttcctccacttggggaattgccacgcctccgcatactctctatggagtgcatgacagatgtggagcatgtgcgacaggagttccgtggaaacatcaccacaaaggcattcccagctgttgaggagctggagtttcaagaaatgttgaaatgggttgagtggtctcaagttggtcaggatgactttccttcactccgcctgctaaaaatcaaggatagccacgagttgaggtacctcccacaggagctatcttcctccctcacaaagttagttatcaaggattgcagcaaacttgctagtctaccagctattccaaacctcactactttggtcttgaagagcaagataaatgaacaaattctgaatgatttgcactttccgcatctcagatcactgaaagtgttactgtcacggagcatcgagcaccttttacttgacaatcagaatcacccattgctcgaagtcttggttatcagtgtttgcccacgtcttcactctataatgggtcttagcagccttgggtcactcaaatttttgaagatacatagatgtccttatctgcagctaccatctgataaaccactgtcaacacagcttcagcgacttaccatcacaaagtgcccattgctagcagactggttggaagtccaaatttcgcaccagcaatgccagttacatgagtctaaagatgcttggtatgaagagcaacaagctctgaatgaattgaatgatgcaagtgaggacgagcacagagaggagtttgggcttttgtacgaagatgacaatggagaggacaacgatgagcaagaccatgagcagtcagaagatgaggaaattcagtacggcagtgatgacagtagcgaagaggatgaatag

SEQ ID NO: 40348 - DNA, 2434 bp, Oryza sativa
  Clone ID: PAT_MRT4530_4379C.1
tttttttttttttttttttatctggtttcagtaaattatactccgtatttttactgaatgtgtacaatttttgattgaatttagacacaatatttattgtttttaataaggaagatgaattacatccccggcctctgcatctagcatgcacagagccaaagttcttgtaactaaataataatgatccagtaaatagtacaagaatatgagcacattacaaattaaatagaagcaatcactaataccaagctggcatattaagaaaatgagactcaaaacagtacttgacctaaatatgcatcaaaatgaatgttcattgttcttagggaaatcagtcttcagacagcttttgtagcgcctcgtggcattcactctctttgaagctgttgtgcgttgagtacatgggggcatcagcgagtacagctaaaaaagatggatcaaattgtgcggtaaccacctgttgctcttggtggaattcagcaactgaagcatcattttcacaagctggatgatctattctgaaagatgcttgcctcatcaccactgatccagtaatttcatttgtagaagcggttggacaatggaatgtcaccgagcctgctatctcatttgtgttcatgcttgcatcatgttggtcagatagagaattcaggaggaaactgaagtccaaagaatcttcatcgtttttgttcaaggatgccacgcgtgtcactcgcacagatccaaaccttgataatttgcactgcctgggatgactgccagaagttccttgctgatcatcagattcatggacatttctcttcttttgatccatatttccttgtataaggccagcaaaattaggatccatatgtccttggatttggtcagtaaatttaggctccaccattctcgattcttggaaagcgcattcgttgatttgtcttggtttgccatttttcatttcaaaatcaggtaggaagtggttcaaatctgcatatgctaatttgcttcagaaccagaggaatacctgcatagacttgtcaagatcactgaagggagtgtaatggtcaccagttatcaccccaacaatctgatggatagagttgaagaacagcacaacattgcggttttccggcaagaaagagtacagctctcttccaggatcacacttcttagcatgctcaatgatagtcgtccaaactttatcagtggctttgcgcagagctggctcatcagtatagtacagcctaaggaattccttcacgtttgaaatgccactctgtttcaatgcatcatggaagacaccatcttttgatatcttcttcaggcgccagacatcatcatccaatgatggaatttcatgctttttggaaccttctccgcgacgatccttcacaacgaaaggttcagttatgccttcctgaatacgttcaccgagatcatcaataaccattaccccaagtctgaacttaccactcctcatgaacttggagttatcaacaaaagtggcatcatggatgtaagcctctccatttttcaggctaagctcaagctctccagtcagcacagtcccaactttatcacgtgggcgcactatgtggtttctgaactcctctgatgtccagcacccctgatcattcttgttgaagtcaccatcaagaacaacaactctgatcttagcagaaagaaggcgatgcgagcaggcctcttgtgggttgtttacatgcacagatatcttgagagactctccattaacatcacagattcctttctttgtgaaaacttcattgctcaagccatttgagaacctaagcttgtaccttggaggctggttctgatcagacagtgttctaggagcacggattaggaagcttgtaagtgcttttgtcacctcctctggaatccggctaatggcggactcgagcgcggcctcgagcgtgcggacgcagccggcggcgagctcctgcaggtgcctgcaacccctgatctctaggtcgaacgaccggcaccgcttcttcagcgccgccgcctgcggcgactcctcctccggccgccgcttcggcggcatcagctggactaactggctaccgctgctgctgctctccctctccctctccctcccgggagtggtcgtggtcgagctggggaagagacacttgccactgcgaggagtcggggatggattggatggagtgcgctgccgcctgcgcccgccacccgtgcactgctgcctgagccggtgcgccgccacctgcgcccaccacccgtgcaccgccgcctcgcctgccacccaggcgactccgcctactcccgtgcgcggtgcaccgccgcctgcacccgtccgccaccgcgtcgccactttctctttcccgtgcaccgccgccgctccatttcctgacatgtgccatttgctgctgtctgtcatgcctgaagaaacaggacaggtgtccat

SEQ ID NO: 40349 - DNA, 627 bp, Oryza sativa
  unsure (1)..(627): unsure at all n locations
  Clone ID: PAT_MRT4530_437C.1
ttttttttttttttttttttttttttttttttttnggctataacgccaaacgatcatatttcgaatcaaattagtataaattccacaggtattacaaattacttcggggcaaataatggtagaagccaccacaacaatatggcaaaagaaaaggaaaaagaaaaatttccccatcttatttagattagactaaacacgctccaaatctgactccgccgccggcgatcttcatttcttgatgaattcgacgttgcgctccagcagctcgacggcctggtcggagcccgccatgccgacgaagtggaacgcgtggccgacgcccttggactcgaacagctccacctcgccgccatagccgctcgccttgagctcccggtggtaccacagcccccgctccttgagcaggacgtcctgctcggccacgcacacctgcacgcgctcgcacgggatcgcggcggcggcggcgcgcgtcgcgtcgtcgacgaacgggttcacgcgcgggtcgtccagcccggacgtctccgggaacacgaaccgccatgtccggtcgaagaactcgcggacgtccgggccgaacgccgcctcggcgcccacggcctccttgccggtgaagtaggggtggaccat

SEQ ID NO: 40350 - DNA, 378 bp, Oryza sativa
  Clone ID: PAT_MRT4530_43800C.1
atgcgcatgcaggacatcgtcagggatgcgatcaagctaggattccagcgtgcggacttcgacgacgtgatccgctcattctgctggtactactcgtcgttcttctccaagcaggccgccgccacggcagtggcgccgcccaaggacgacgaacaggccaagaaaaccggcgccaccatctcctacgagctcacgctcctggattgcctgcatgccagccttgtgccgccgtcggagggagccgccactgggggcggaggggtgaaaggcggcaagacgtcgaggatccggacggcgaacgagctccgccgctctggcattcgtctcatggccatggaggaaggctgcgcgtggtccagttcagcgaggacaccatga

SEQ ID NO: 40351 - DNA, 2141 bp, Oryza sativa
  Clone ID: PAT_MRT4530_43801C.1
ccggccgggatcttcgattcctcctccccacgcgtcgcgtccgacgcaaggcactttccttctcctctctctctctcgacgcatcctccaacttgtgcacgtcttcctcctcgatctccatggccgagttccttcgccggccggagttttgtctgcccatgcacatatacacatcacgcggatcgaagatgggatgaacgtacgtggagcggtggaggtgcaaccggcaggcacggtggcatctcgatcgatctatcgatcgatgaggaggccacggtggcgtctcgatcgattcgcgacatgttcgccgagatctatcgatgaagaggccggatcccgaccgtgatgcgcgtgcgggcgtgcggcgtcctcggcggcgccgatatgctttgtggtcgggttatcaagtttgtttgcatatctcggagctgatccctatcaacggaatggatttttgtgtacaacgacgagggagaagagaatcagatatccagttccggtggcgttcatggccgcgagatccggatccggactccccattccacagtagccctaactagttgttcaatactctagatctgaatcttattatcacccttagcatgtttccattaaattttagcatctccatgagtccatgaccatgccggtacgtgcatgcagtagagtgccttccttttttaagaaaaagagcacctgagggatgtggggcccacatgtcatactcacagccttcctcttcttcctcctctctccatctctctcccctctcctccctcctctcgcagtctcgccagccggcggagataacgacggcctggagaggcgtgacctcctccgcttccaccccctcgagcctatcgccggcggccgctgggaaataagcagcacacgagcgtcagccggagggaggagaggagcggtgcgcaggcgcgggcgtgggcaccggccggagggaggagaggagcggcgcgtgtgctcggccggcggaagtataggagccacgggcggaggccgaggggagcgggagaaatccgcgacgcgctccgcgtccacatgctctgtcacggcgccccgcgcccccaccgattcaccacctacctcgtcacgcgcgtcaaccactgcctcccccactcgccaccaacgcctcctcatcctcgagggcgatggcgggctcgagaggctcctcgacctcctcgacgcggctgacgccggcgtcgatgcgcgggcggcgcttgagcgcgacgacggcccggtcttcgaggccgtagagacggacgcggagcacggcggtggcggcgcagagggggcgcgcggcggtggtgcggcggaggcggggcgcgaggaaggaggagaggcggcggtgcgcggtggaggcggggcacgaggaatgaggagaggcgacgggaggctgatgcggttggacttggagggcgcggcgccgggcggcgggtggaggaggaggttggagttggaggacggcggggtcgtggtcggagtggatgaggcagtgggtgtgctggctgccgcggcggcggcggcaacttaggtgccgccgccggtgtactgcatgcgcagtcgtgttcccaatttgctccacatgtgccttgctgccattgatgacctcgaccaccactattcccaacgctggagaaatcttactgcgcagactcgagagacaccgaacgctcgcacaacactaattggatcactgaagtgcatttttcaaaccgaggaagcaataaactttggatctctgaagtggcaaaaattaaaaaaagaattcgttctctcaatctcagaaagagtcttgggcaagcaagttgccgttcccatgtttgttgaagaaactatcgggactatgtttcgccatactcctatacacacgttttgctggatatataagaaaagggacatgtcagttatcactttgcaaaggattcagatggtcttcggcctaggaaggctagaactcccaaacccaatgacgaaccttgcctgcctgcccttcagagggaagcataagttcagaaaatgccactctcaaagacatgatctttgggataagacagttgacctcccatgagggtgtcatggtctcttgccacatcctacgaggaatcggactgcagtcactggag

SEQ ID NO: 40352 - DNA, 594 bp, Oryza sativa
  Clone ID: PAT_MRT4530_43802C.1
atggaggaatggccggccggcggaggacttcagctccgtcgaggggagacggtggcgcaggcgttgacgatgacgccgaagtttcgagaggctcagacggttccaatcttcgatgactgtgtttatgaactcgaaatggtcaaattaattaatccagagaacgccttcccaaccgatagggagacgctcgccgtactcgtgggctcgggtcaccggagattggcgccgacgatgatcggggtacgtgagctagcggagctccggcgaacggcggcaccgcagctgacgatcgagaggttgacaggtgggtcccgagactcttgccacatcaccttctcgatcgtggctgtaccgtccgatcgaatattagcggtcaagataaaaggaaggataacagttggagctctaacactgaagaagtctgaattttggcagcaagagctggttgctagtacttgctacaacaagcctgtgacctctacatcacaggaggccgtagcgtccaaaccccagctcatcgcacggcgccattgcagagcagacgaagcaacgggaaccccacgtactcgtaggcgtagtagcctagtaggcgtg

SEQ ID NO: 40353 - DNA, 309 bp, Oryza sativa
  Clone ID: PAT_MRT4530_43803C.1
caaacaaacccataaattaacaggggggagaagcaaaacattttaggggagacccaacatcctttacaacattaacgggacagacttgtccggaaaaagaacatgggacctggggagccccaaagggaagggaaaaaagggcaaaaccaaaaaatggggcagttaaaatcttgatagggcccaggggggaaaaaaaactgtacccctaacgggggcaaattagttaaacacaccccccttgtccccagcaaaaatttcagaaaagggcataaaaccaaccatgcctcctgggttggaacccacaggttt

SEQ ID NO: 40354 - DNA, 125 bp, Oryza sativa
  Clone ID: PAT_MRT4530_43804C.1
caaaaccgaccagactaaactcaaagtgaaccctatgaaggtaaaatgtttgcgaataacgcctccgtctattacaatgtttggagataaactttttcaccacggggctaaaggggcttacacaa

SEQ ID NO: 40355 - DNA, 612 bp, Oryza sativa
  Clone ID: PAT_MRT4530_43805C.1
atggcactctgcccactcaccgacacccaccgtgctctcccttcgctgccaccaccgtgctctccctccgctgccaccaccgtcgctccccttcttcccacccctcctccgttcctctctagcctctcctccgcgtgcatctgtgccctcctggacgccaccaacgggagtgacggcaggagcaacgctgatataggagcagatgcatcatcatcgtcttcctctctaggcggtgggacgtcgcgggaatatgtggtgaagactgctccgccggcgacgcaagggactgcggcggatactcgaggaggaggatgtgtcagtggccatgttgacgaggcactcggagccgatgcgttggcggattgacccgacgagctcctcggcgtggtcgcaggcgacacggaagagctcccagcacgtcgtcaccgccccgaactcttggtacgcctcgcacaatcgtccaccgtcgcctccatctcctctcaccaccggcttctccccaacacgcttcgccgcctccaccgacttgattccccccaacttgacctccgccaatggccccaggggtattttcgtctgatccagctgtgtccaagatagaaatagtggcat

SEQ ID NO: 40356 - DNA, 451 bp, Oryza sativa
  Clone ID: PAT_MRT4530_43806C.1
ctcaactgtagacggtggaacggcaatgtgttcaacagctctggtttatgagttcatgccaaatgggagcgaggaccgatggctacataaagaaggggacgggaaattttcaaaacgtctcggcgtaagtcatagaataaacatagcagttaacatagctgaggcgttggactatttacaccacgactgcggaaggcccacatatccactgtgatttgaagccaagcaatatactcctcgatgatgatatgactgctctttagggcgactttggaattgcaaggttttatgctgatccttcaacggcgacagttggaacaaatagttcaatcggcatcaaggggactataggatatattgcaccagagtatgcgggaggcagtcgtgcatcgacttctggggatgtttacagctgtggaatagtgttgctggagatgatgacggccaaaag

SEQ ID NO: 40357 - DNA, 393 bp, Oryza sativa
  Clone ID: PAT_MRT4530_43807C.1
atggacaagctccagtgcgatggggcgcttccaaatgctcgggcgattgagcgcacaaaaggtgttcttgcttcaagtcgaggcatcggctgcaatttctcgacaaaaggcattctcatcggtcgtgtcatccccaatataaattgggagcacgtcttcatagttaagtccaaggaggtcgagcagcaagaaggcaaggaagacgtcagtacatgccgtgggacgggcgcaactctagacgatggggtgggctggcgcatagacgggcaccaccggcagcgagaaatgtcgggctgcagcggctactcaatgttgggctttctcgtctgccgtgtcatcaccgatataaatcgggagcacgtcttcagagtggagtccaaggcggtcgagtag

SEQ ID NO: 40358 - DNA, 832 bp, Oryza sativa
  Clone ID: PAT_MRT4530_43808C.1
gcgggtcggcaggaggccaccacaagctctagcttacagctcactacccagtgtacatcgccacaagctctagcttacagctcactaccagtgtacattgttgctagttagctagagctagatctcgatcgagacaatggcgggtgctcgcaggacgatggcgctggttgcgttggtggcggtggtggcggcggcggtggtggcggagagggcgtcggcggcggtgagctgcggcgacgtgacgtcgtcgatcgcgccgtgcctgtcgtacgtgatggggagggagagctcgccgtcgtcgtcgtgctgcagcggggtgaggaccctcaacggcaaggcctcgtcgtcggccgaccgccgcaccgcctgcagctgcctcaagaacatggcctcctccttcaggaacctcaacatgggcaacgccgcctccatccccagcaaatgcggcgtctccgtcgccttccccatcagcacctccgtcgactgctccaagatcaactaattactagcttgatcatctccagctgagatcgatatgtatgggaagatctagagagtgactgttcactgctagctttgtttattttcttgctgcatgcgtacgtgcactatataatgtaataatgcgtttcaatgtttacatgtagtgtactatgtacactacttatatatttttcatatataataatctaataatgataataatgttgtactgataaaagaaaaaacaaacttgaacatgctgtgacccgtttttttacttcagataagtaatagtatatggatggaataaaaaaaaaaaaaaaaaaaaaaaaaaaaaaagaaaaaaaaa

SEQ ID NO: 40359 - DNA, 649 bp, Oryza sativa
  Clone ID: PAT_MRT4530_43809C.1
gcacgagggaactttggctgcttgctgctcgtcacttctccctcaggctgctggaatcgtggaagctgtgcggaggatctactcagatgttgatcgaaatggtgctggatttgggagctgttgttctcaattgccgggctgatcactggaggtgtgattctgcttgtcagttgagggaagaattcacacacttgtgttcactgaggacatcttctcaacctattgcttccaccgatcatctttaatgctagataatcaagaaccatgatgccaatagtccactactatgctttactgctttcagattaatgaagatatcagttgcagagagggctattgtggttcctcagccatggcaatactctggttaaattttaacaagcatggatgaagaaccaaatcctgcaaaggagcttgttggctgaaatgccaagttagatatgattataacttgaaagagtagctgtcttaattaatcaagaaacatgtgagctatgattttcctcttttagtacaggtatttcttgtcatggtttttgtgaaaaaaaaaaatcttttgacaagtatgcaggccaataaaaccaggtaatatcatggaacagaagtagattgtattgatagaggtgcaaatcgtttaattctttgtttt

SEQ ID NO: 40360 - DNA, 431 bp, Oryza sativa
  Clone ID: PAT_MRT4530_4380C.1
gaagcaacttaaacaggacggggcggtttaaaaaactctggcgcggattcgttacctgacgcacctaatgtaaccatacatcaacgcaacaggtaagcggaatagaacattagaacctacatgtgcttacatcactcatgatcgggggggggtgctgccaaactgacacctaccaaggtcaatctaacaagactactactcgctcctgtttaatcatgcactaagggcatgggctagcttgctttgtacaaaagataaacaatgagtcgtgcacatgatatgtgacagattagcaactaggatgtaagtaaccgaatgaatgctgccctgtcacacctgctttgcaagatgtgagctagagccttgacgggctaagaagctcaaaatgtctgacctgaagctaacgacacactttgaagaacccacatctg

SEQ ID NO: 40361 - DNA, 1300 bp, Oryza sativa
  Clone ID: PAT_MRT4530_43810C.1
agaaaagccacgaactccggcgacggcgaggagcagcagcggcagcccatggcgatggcgatccccaaggtggacctacgcgggctcgagccggggacgccggggtgggaggcggcccgggccacggtgaccgcgtccatggtgtcgcacggctgcgtcgtggtcgcgcacggcgagctcggggcggatctccgggaggcgctgttcggccgcgccgtgcgggaggcgttcgcgctccccgccgaggccaagcggcggaacgtgtccacggtggggccttacagggggtacatcgccaacatccccgggatggactgggagagcctccgcgtccacgacgccgacgacgccgcccgcgtccgcgagttcgccggcctcctctggccggagggcaacccggaagtcagagctcgatttctcatgggggattgggggggtgttcgtccgggggattgcagtgagacgatcgtgtcgttcgccacgaagatgagggatctggagcggacggtggagaggatgaccctggagggcctcggcgtcggggaggaccacatcgcctcgcacctcgccgcgcaggactacggcgtccggctgtcccactacggcccgccgccggacgcgtcgaccgccatctccctgcaggcgcaccgcgacgacagcatgaccaccatcatcgtgcagcacgaggtggagggcctcgaggtgcaggccggcgacgggagctggcacgccatcccccccgagcccgacaccatcgccatcgtcgccggcgagctgttcagggtggtgacgaacgggcgggtgccggcgagcgtgcaccgcgtgaggacgccgagcgggcgggagcggtactgcgtgctggtcggcagccggagcaaggacggcgcggtgctgagcgccatggacgagctcgtcgacggcgagcacccgctggcgtacaggccgtgcaaggcggaggagttcatccagttccgctactcggaggaaggccgcaaattcagcgacccactcaaggcgttctgcggagtaaacgctacagaatgatatcgcacagatgtaatgatagcgttcgaataattgtgacagttaattagtccgtccgtcctaaaatatagcaactttatactggataggacacgtatactggatgtgacatatcttattagtataaatttgctatattttgagatggagggagtatttataatcaatcgtcttcaagttgattctgaacttagcttatgagatgaaattattcgagtgattttctttcaatacattaagattaatcttgcgtgtg

SEQ ID NO: 40362 - DNA, 631 bp, Oryza sativa
  Clone ID: PAT_MRT4530_43811C.1
gtgattactcctataactcgtaaattttgcaatggactctcgtaaattttgcaacggacgagaattgaatccagcgcaattgataacacacttggtgatgcgtggatttgttgttggctacaaaaattggtcacaccattgagagatcccaagctgccacacgagttcccaaccaagagacacacgatgaagtgttcaagggtaggaatttcatggtagtagaagaatccgttgataatgagttggatgatgatgttggggtgacgatggtcatcacacaattgatgatgtcgatgatggtcatgtcacggtagatgatgccgatggaagagatattgcgtcatgctgaacctgaagttgtggctgggtctgctcgtggtttggataatttcaatgtattacaaaaggcagcaaagaaacttttgcatgatgaggcaaagggttgtggcaatgatttcacattattgcatacaatgcttgaacctaagattgaaagccagaaacggttggtccgacaatagttttaacaatttattggtcctgttgaaagaattgtttccggagcccaactccctgccaaccaacacctatgaagcgaagaggctgctgggggtactggatctagatataa

SEQ ID NO: 40363 - DNA, 298 bp, Oryza sativa
  unsure (1)..(298): unsure at all n locations
  Clone ID: PAT_MRT4530_43812C.1
atgccattccccattcgcctcatagaattcatcaatacatgcatgcatctacatttttttctagctttctttatccaacgatcatgcaatgcttgatcgcatgtctctgattcttgatgctaatacaataatctatcaatcgttcatactccatgtcataggggtcgccggccttgggatcctttagagagcccgtcaatcatagcgacattggctctaagctccttgcaggtgatgttgaatccgatgatggggagatcntcaggagaaggaggaggaggaggacgcgacaatgtgt

SEQ ID NO: 40364 - DNA, 488 bp, Oryza sativa
  Clone ID: PAT_MRT4530_43813C.1
atggaagcagacgccgtgtgccaaccgaggcgagtggcagacaaacggactccactagacaccacgcgggctgcacacgtgcaaaccacgtggctaccgagtggacacacaaacacggtcaccacacgcacccacgaatgactaccgacaccggtacatgggtaccggggtcgacaaacacacaatgggcatggggagacaacgaaaggacgaggacggggcagtgagaggacggatccttactaccacgcgacgaggcgtgggaacgacgacgacaaacggcgcggcagagatggacaggaacgacggagacgaacggacgacacttctccggcgatccttggacgaaggcaggacgaggccaactcagggcttgacgatgtggagccgaggacgaagacaacgacgaggctgcagcagacttgacgaaacgcgggcgacgaacgaacgcggcttgacggagggacgaacgccacgacgatcgagaa

SEQ ID NO: 40365 - DNA, 731 bp, Oryza sativa
  Clone ID: PAT_MRT4530_43814C.1
ggttccaaattacccataaatattaggccccttaggaggagagaggacacaatcaacatacacggaacaatagatcaagacacaagatcaacatacaagccaacatacgccaagacaagacgtcggatatcgatttcagagataggcatggctagtcccctacggtgcctacggatactgtcaggagagatatagcgctgtctctgatctcgccggatgcggattcgaggaggaaggctaccctgttgtcgactacgagtcagtactacagaccgccaagtcgacaacagttagataggctggtgtgttctccgtctcttttacctaagtctcacatatatcctagtaccaacgatccccatactatacaaataccggaatcgcgacatcaaacgtcgatagtttctccacaacactgccctgagaaatgccagtgacaacgcctcctgagttccgagcagctacctcgccgccaccaccacctcccatccacctctccccatcgtcacggcgtcgccaccatcacatcgcccgcgagtagaagcgtcaagcgtcgcgcaaatcccctcgcctcgagcagccaccgccgccatctccccatccgacgcggcagcacagtcgtcacccagcctcgccattgcccctccccgtcatctgctccacccatctcgcctcgcttctcgccttcccgcctagtcggctgcgcagtggtggagacttgggcggtggcg

SEQ ID NO: 40366 - DNA, 261 bp, Oryza sativa
  Clone ID: PAT_MRT4530_43815C.1
cccacgcgtacagaaaagagataagaagacgagtgaaaaagaaagcatgggcaaaggtgtaaaaaaaaaaaaggttagctggtgttgtgggaggtaagagtttaattgtcgtgtatgaaatgtgatagcttttttattgggttaactatggtgatttaattgagtgaatttttagactgatttttatgggaatagctggtgtttatttataataaatgttttgatgctgatatttttttgggcaggtgttttataactgaa

SEQ ID NO: 40367 - DNA, 476 bp, Oryza sativa
  Clone ID: PAT_MRT4530_43816C.1
atataagctcaatatttcttgaactgaattttcacagaagcctggtaaacctaactagatggcattaacagaacatcgcaggaggaaaacatcatcaatatacaaaacctggccaaaatttgcgccggcggaactacagcactactcaacatgaacctaataaatagatgcgctaagataacatgatcagcattccttgaaacaaagtgtcagcatgtataccaaacgtgaattggctccactaaagagggaatgtaatatgacttaacttccagacaagagggggacaatagagctacgcttgacctatgtgctaggggtccaggtcacaaaactaagacctacacagacgtccacaactgaacgcctaacaccgggggctatgaggtccctatttctgaggacttaactgcgcccaccgtcgcgattccagagcaaaggcttgttgattccagcctgcttaagaagctgacaca

SEQ ID NO: 40368 - DNA, 372 bp, Oryza sativa
  Clone ID: PAT_MRT4530_43817C.1
atgctcgccgtcatgctacctgctgccgcggccgcgggcggatcttgtgctaattgtctcgccaccgcccaagtctccaccactgcgcagccgactaggcgggaaggcgagaagcgaggcgagatgggtggagcagatgacggggaggaggaaagggtggggcgacggaggcctggggcggagatgttgacggcaatggcgaggctgggtgacgactgtgctgccgcgtcggatggggagatggcggcggtggctgctcgaggcgaggggatttgcgcgacgcttgacgcttctactcgcgggcgatgtgatggtggcgacgccgtgacgatggggagaggtggatgggaggtggtggtggcggcgaggtag

SEQ ID NO: 40369 - DNA, 362 bp, Oryza sativa
  Clone ID: PAT_MRT4530_43818C.1
aaaacaaaacccccaacgcttaagttttttcttgttcttctggcaattaacaaaccaaacgcaaagattgggggccggaaggccttcaacttcttcgcctccgtcaatgaaggggaaggctttcccattccggttaacaagggaattccggcccacttggggaagggccaattcccacctgttgaaggcggcaaacgcggggggaaaaacaaggccaatcaacaacttggccgggcccccccccgccgtgccgggtggggggcttcagttcgagcggttcttccccttccccttccccttgccaaggccttgcttgttttccctgccccggttgttgggccgatatcccaaccctaccttgg

SEQ ID NO: 40370 - DNA, 688 bp, Oryza sativa
  Clone ID: PAT_MRT4530_43819C.1
agtggatccccgggctgcaggaatcggcacgaggtttagccatctgtactgcaggtaatgctcatctagcataactgctgtaatgctaccgctattactatgtactgtctattctgccaccatgcatgtgtcaaattttgctagataaatcctgtccacaatctgcatatatctaatgattagcttttagcctctatgtcaaccatcgatatacacgctcacatcaacatgttaattataaggcgactggtagggcacgcaaagcatgccgcgcatccttgtttgattcacgtaatgaatgaatgatgaggtttagtgttttgtcccctgaattagttggactgttggtgtgttttggtatattttgtgtgaggtcctgattttgttgtctctttaccttattagctcttaagcataatgtttagagagatgcaggttatggtgaatggttttttttttcttccaaggctagtaaaatttggagtcgtccagttgtgcagctgctcaccatggaaaagctaccatattattggttacctcaatttggtctatgtccagtttcaaccaaggttgtattctaaactgttcagaatcatgaggctgaggtcaatccatgctataatctatagaaaatttctaaactaaactttgttgcagggtgtttgattctttcttttatctaatatgt

SEQ ID NO: 40371 - DNA, 374 bp, Oryza sativa
  Clone ID: PAT_MRT4530_4381C.1
cctgcgcttaccagcaacaattccacaattttttaggccaagtcagccaaagtagatgagcaccaaagataatttagcgggcattgtgcctcccactgggttgcattgttcaatgatggatgcatattgtgctatatgtatgataaaccacccatactgaacctagcaaaagagtctttagccgacactggctacacacagtatgagtattgacacttggcaactttaggtttgggttaagctaatgagttagctaaccatacagaaaagtcagagcaatgtaaaagaaaatcattgaaatggcttaatgtgaaccattgaacacacagacagcacagccagataattaacagttatcaggaacacgaaaattt

SEQ ID NO: 40372 - DNA, 2911 bp, Oryza sativa
  Clone ID: PAT_MRT4530_43820C.1
gtgaccgtccgctcactaactggaggtttgaacggtggttggatcagcccaaattcaggtcttctcactattttagctgaaggcatggatgaaccaggtgaacctttgcttgggctagagaatttcttcgacgaagatgttgatttggagaatctgcccctggaagacgtttttgagcagctgaatacgtctcagagtgggctctcatcagcagatgctgcagaacgcttgaagttgtttggtgcaaacagattggaggagaagcgtgagaacaagatcatcaagttcctcagctttatgtggaatcctttgtcctgggtgatggaggcagcagcagtgatggcattggttctagcaaatggtggtagccaaggtactgactgggaagatttcctgggaattgtctgcctcctgattatcaattcaacaatcagcttcattgaggagaacaatgcaggcgatgctgctgctgcactcatggcccggttggcgctaaaaacaaaggttcttagagatgagcaatggcaagagcttgatgcttctacattggtacctggggatattatcagcatcaggcttggtgatattgtccctgcagatgcgcgcctacttgagggagatcctctgaagattgatcagtcagctctcaccggtgaatcccttcctgtcacaaaaagaacaggggacatagtgttcactggctcaacatgcaagcatggtgagattgaagctgttgtcattgcaactgggatacactctttctttggcaaggcagctcatctagtggattccactgaggttgttgggcattttcagaaggttcttacctccataggcaacttctgtatctgttcaatcgccatcggtgcgattgttgaggttataatcatgttcccaatccagcaccggtcataccgggatgggatcaacaatgttcttgttcttctgatcggagggataccgatcgcaatgcctactgttctgtcagtcacacttgcaataggttctcatcacctgtctcaacagggtgctatcactaaaaggatgacagccatagaggaaatggcaggaatggatgttctctgctgtgacaaaaccggaactctcaccctcaaccatctcactgttgacaaaaacctaattgaggttttcagcagagaaatggacagggaaatgattatcctgctggctgcaagagcatcaagagtggagaatcaagatgcaattgatatggccataataaacatgctagctgaccccaaagaggcacgctctagcatcactgaagttcacttccttccattcaatcctgtcgataagaggacggctataacatacgttgattctgatggtaactggttcagagtcagcaaaggtgctcctgagcagatcctcagcctatgctacaacaaggatgatatctctgaaaaggtgcagctaatcatcgacagatttgcagagagaggcctccgttcactcgccgtcgcttaccaggaggtgccagagaaatcgaagcacggccatgggcggaccatgggtgttctgcggcctcctgccgctgttcgacccgccgcggcacgacagcgccgacaccatccgccgagcgcttgatcttggcgtctgcgtgaagatgatcaccggcgatcacctggccatcgcgaaggagaccgcccgccgtcttgggatgggcaccaacatgtacccgtcggcgtcgctgttcggccgccacggcgacggcggcggcgcggctgttccggtggaggagctcgtggagaaggcggacgggttcgccggcgtgttcccggagcacaagtacgagatcgtgaggatgattcaaggggggggcggccacgtgtgcgggatgaccggcgacggcgtgaacgacgcgccggcgctgaagaaggccgacatcggcatcgccgtctccgacgcgacggacgccgcgaggggcgccgccgacatcgtgctcaccgagcccggcctcagcgtcatcgtcagcgccgtcctcaccagccgcgccatcttccagcggatgaagaactacacgatttatgcagtgtccatcactataaggatagtgattggatttgttcttctggcatcaatttgggagtacgacttccctccgtttatggttctgatcatagccatactaaatgacggaactatcatgacaatatcaaaggatcgcgtgaagccatcaccaagcccagatagctggaaactgaatgagatattcgcagctggagttgtcataggaacctaccttgcattggtaaccgtgctgttctactggacagtcacaagaacaaccttctttgagtctcacttcaaggtgagatctctgaagcaaaattccgacgagatctcgtcagcgatgtacctgcaagtcagcatcatcagccaggccctgatattcgtcacacgcagtcagggcttgtccttcctcgagagacctggagccctgctgatttgtgctttcatcctagcacaattggtggctacactgatcgccgtgtacgcaacgatcagcttcgcgtcgatcagcgcgatcgggtggggatgggcgggcgtgatatggctgtacagcctggtgttctacgcccccctcgatctgatcaagatcgccgtccgctacacgctcagcggcgaagcctggaacctgctgttcgacaggaaggagagactacggcggcaacgagcggcggccggagaccaggtggccgcgctcccatcatcatcatcatcaacaacggagggcgctttccgatcatctcctcagcagcggatggcggcctacgcggatcgcggagcgagccaagcgacgggcagaaatcgccagattgggagatgcacatatgctgagagcgcatgtgcaatctgtgatgagactgaagcgtgtggattctga

SEQ ID NO: 40373 - DNA, 1491 bp, Oryza sativa
  Clone ID: PAT_MRT4530_43821C.1
atgaagttgtctttggtatgcagtgctaatcccaacaaccataggtcaagaagttcggatatcacacgccatcagaagggtggatcagctcggaggaaaagtaagccttaccaggagaaagatgactctgagaatattgatgaattcgatactgatattatgtcctccaaaaatggaccacccatctctttgacaagcaattcccgtcctcaagcaacatcagtcccaggggaaagagagaaggagatagtagagttgtttaaaagggttcaagcacaattgcgagcaaggggaaaagggaaggaggagaagaagcctgaacaagcaaaagcacagggtgagaggggcagtgttgactcccttctaaatctgcttaggaagcactcagtggaccaacgaaggaagagcggtgatgagaaagaacagagtgttgaccaaacaaagagaagcaatgaatctggaaataaacaaaattcaagcatcttcataaagaatgacactcaggaagaacagaaaaagccacatcctgcagccttcaaaaggccagcttcaaattttaggcgaagatcccctgttcctaatgtaaagttccagcctgttaccaatgttgatgccgaacgagtcatcaataacatcaatgatgccgtacaagaggctaagccaactttggaaaataaggctgctacagatgaaccagactcggtttctacattcgaacctaattctgtaatagaaccagaaaacctatctttggatgaccttgatcatatttcagatgatgaacctgatgcttctgatactgatgaacccagtggagaatatgatgagccatctttgcaaatcccaagtgttccaattattgatgaatctcatgatacgactctgaaatcttccttaggaggtcctgatttaagcactttgaaggtcacagaactaagagaacttgcgaaatctcgaggaatcaaaggatattccaagatgaagaagaatgacctgagccaaggtactgattgggaggatttcctgggaattgtctgcctcccgattatcaattcaacaatcagcttcattaaggaaaacaatgcaggcgatgcagctgctgcactcatgtcccggttggcgctaaaaacaaaggttcttagagatgagcagtggcaagagcttgatgcttccacattggtacctggggatataatcagcatcagtcagctctcactggtgaatcccttcctgtcaccaaaagaaccggggaccatagtgttcactggctcaacatgcaagcatggtgagattgaagctgttgtcattgcaactgggatacactctttctttggcaaggcagctcatctagtggactccactgaggttgttgggcattttcagaagatcatcaagggagagattagcaaggacattgatataaccagtaaatttattgttctgcagatatctgagaagaacgagtatgggatcacaggcatatcactctaa

SEQ ID NO: 40374 - DNA, 496 bp, Oryza sativa
  Clone ID: PAT_MRT4530_43822C.1
agccaaggtactgattgggaggatttcctgggaattgtctgcctcccgattatcaattcaacaatcagcttcattaaggaaaacaatgcaggcgatgcagctgctgcactcatgtccggttggcgctaaaaacaaaggttcttagagatgagcagtggcaagagcttgatgcttccacattggtacctggggatataatcagcatcaggtttggtgacattgtccctgcagatgcgtgcctacttgagggagatcctctgaaaatgaattgccacacgccgttcatgcgaaagatgtcgatcactggaattcagctctcactggtgaatcccttcctgtcaccaaaagaaccggggaccatagtgttcactggctcaacatgcaagcatggtgagattgaagctgtgtcattgcaactgggatacactctttctttggcaaggcagctcatctagtggactccactgaggttgttgggcattttcagaaggtgatt

SEQ ID NO: 40375 - DNA, 457 bp, Oryza sativa
  unsure (1)..(457): unsure at all n locations
  Clone ID: PAT_MRT4530_43823C.1
cgctgcccagactggtgcttcgccactgtnancccgcgctccgcgccacagtcgtcgccagnctcgcctccccatcaccgtcctcctcctcctcctcctccaacagcagcaacctcccggcccccttccgccccccgcctcatcctgcaacaccccngtcttcgccgcccctgtcgccccnccgcnnatggantccgccntccnanngcctcaangatgggttcgccaagtttcaangacccaatttctatgaagaaagaaagccggaagctctttctaagccgctctaggccggccaagcaccaanttncatgggtgttctcgtgcgccgantcttttttttttgtccgtcnggtgancatggggcctggancccgngngaagggcttctnccgttccnccaanatctccaanaatggttcccaccttaactggcaaanatcaaagcatccttggt

SEQ ID NO: 40376 - DNA, 1625 bp, Oryza sativa
  Clone ID: PAT_MRT4530_43824C.1
ttttttcagatttgcaccgttttggagggggataggatatgcagattgagagtgcttggcgaaattactaaattaccctcgccgtttttgacgtattgttttcgtgagttatccgttagttcgcccgccgccgccgccgccgccgatccccatccatcccgcgaggcgcgagcgagcagggcgccgtcggcgccgtcgttcgtcatgctgcttccgccgcatccaggcagaacattaccagcctatcatggagacaacagatttcttcttggagcttgtttcctgagtaaactgcctatgctgcgcccaatgaagttgtctttggtatgcagtgctaatcccaacaaccataggtcaagaagttcggatatcacacgccatcagaagggtggatcagctcggaggaaaagtaagccttaccaggagaaagatgactctgagaatattgatgaattcgatactgatattatgtcctccaaaaatggaccacccatctctttgacaagcaattcccgtcctcaagcaacatcagtcccaggggaaagagagaaggagatagtagagttgtttaaaagggttcaagcacaattgcgagcaaggggaaaagggaaggaggagaagaagcctgaacaagcaaaagcacagggtgagaggggcagtgttgactcccttctaaatctgcttaggaagcactcagtggaccaacgaaggaagagcggtgatgagaaagaacagagtgttgaccaaacaaagagaagcaatgaatctggaaataaacaaaattcaagcatcttcataaagaatgacactcaggaagaacagaaaaagccacatcctgcagccttcaaaaggccagcttcaaattttaggcgaagatcccctgttcctaatgtaaagttccagcctgttaccaatgttgatgccgaacgagtcatcaataacatcaatgatgccgtacaagaggctaagccaactttggaaaataaggctgctacagatgaaccagactcggtttctacattcgaacctaattctgtaatagaaccagaaaacctatctttggatgaccttgatcatattgcagatgatgaacctgatgcttctgatactgatgaacccagtggagaatatgatgagccatctttgcaaatcccaagtgttccaattattgatgaatctcatgatacgactctgaaatcttccttaggaggtcctgatttaagcactttgaaggtcacagaactaagagaacttgcgaaatctcgaggaatcaaaggatattccaagatgaagaagaatgacctggttgaactgctgagcaacatggcttgatccatcagcagccctgtcaacttggctctgttttgtcccttgttagtcacattgtcttgggcatatgcactatcttgccattcctatcttatctagatgaagttcttttaggtagaaaactgtaaatgagcaaggtaaacaatgttctgttctggttttatcgttgccctttctgttacctagcctctagttaccattgtttttgcgtaaatccttcatcagaattgaaccctggattggccataagactggcaacgattcgacgtcatgctgataaaaaaaaaaaaaaaaaa

SEQ ID NO: 40377 - DNA, 316 bp, Oryza sativa
  Clone ID: PAT_MRT4530_43825C.1
atctttaccgaggcttttacttatcaccggcggaacatggcacctgacacggggctgcattggcttttccaaatctagcgaaggggtaagtcctacgttccgcaggccctagcaattgtatcggctacatattggtgttgttcaaggctgcatcgcttcgatctcttggatcgctctggttcggttgatatacttgcgtacatatttatcatatatcttagttaatctagttttagcatcttaatttgaccgtatcggctgagattcattttagggtttatgccggtatcggctaaattatcttgctagattagat

SEQ ID NO: 40378 - DNA, 411 bp, Oryza sativa
  Clone ID: PAT_MRT4530_43826C.1
tttggttttttttttttttttgtttttttttttttttttttttttttttttttttttttttttttttttttttttttttttttttttttttttcccaaatccattccctttaacttttgggtataccccaagccatgccaggggaaaaaaaatctcctttccgcttgaggccccgacctttctttgaaaccagggggggggattgcccatttttgttttttccaaaagggccccaaaaaagggttggccccaaaggggctttaaaattaacccctccccttttacccgcccttgaaaagggttccctcccaggggggtttaaggccccttttttctaaattttccccccaggtttttcctttgttgtggggggggcttgacaaaaaaatccccataaaatgggggggcttt

SEQ ID NO: 40379 - DNA, 480 bp, Oryza sativa
  Clone ID: PAT_MRT4530_43827C.1
atgtgcggccccgccgcctgcgccgcgcgctgtgcctcgtcgcccagctaccgtgtgagggcgcgcgaggccgcctccaccgcccggccgcgcgagtccgcctccacggccgcccggccgccgccgcctgagaagtggggaggagaggggagggggcggatccagacgaggttagcagccgcacaactcacggtcggcgcgacggcccgagccgggacggctcagctcacggccgggaaagcggcggcgccccgccggggacccaccgccaacgacgacaaggcgcagcggccacccgacgcacagcgcgatggcaagcggcggcaccgagcacatgagcacggcggcggcggagcaatgtcgataaaatcgggactaagtttgcagactgtaactgaagctgacatttttgctaggccgctctggcacacgcagccgtaccctaactcgagacatcctgccctttccatgcccgagtaa

SEQ ID NO: 40380 - DNA, 492 bp, Oryza sativa
  Clone ID: PAT_MRT4530_43828C.1
atggccgccaccactgtcattaggggcaccatcccctatgacctccggtgccaagagtcgctgctgccactagagaagagcctcgagcgccgttggattcgtcacgcgagacggcttgctctcttgcgagtgtcactatcgatgcctggggagaagtcgatccacctccgcgtgccctcctgcaagctagctagctctcatctttcctccatgtctcctccccatgatctccaatcccacctctacatagcttctcatgttagcgcgcccactcacacgtgcgcccaaggaaaacactatgctctccatcaagccgagcggcaaacgatgatgcaccccaacacaaaatggaacacaatgtcccacactcccatgtcaacgcctttttcatcttcggtggaagttcttcatgaggcgactaatggtgttgagccaacccaagttgaccctgacctcctatgcatggaggccccttttgggtacggttttcgg

SEQ ID NO: 40381 - DNA, 2941 bp, Oryza sativa
  Clone ID: PAT_MRT4530_43829C.1
agattgatttaggcctggatgtaagacatgcgacaacctcatctggcatttatgaagaaagcatataactttgttcaccatgctaaggcacatgctttaaggaaaaataggaaagacatatattttgttcgttctttgattgcaagaatcagaaattgttgagagaccccagtacaatattggtgtactcaatggagcatgaatttaaggaggattgcagggtatggctatcacggggaaatcaccgttcctgaaggtgacagtaacatggaatgtgacgagacttgttttccccttgatggggcagaagattttacaattgatgacatggcccttgaaagaatggatgaagatggttcgactagtagtgacgattttgaggcagaattcagtctagaagatatgatgcaccacgctaaaccagaggttcttatgggtacagcacggggattagacaactaagaggcattatagaaaccaacggaggatcttctttatgaagaatccaagggatatgagaaggattatacgtgttgcgtttggtgcttgaactctttatattgaaggctaggtatgaatggtccaatagcagcttcaatgatttgatgggtttcttgagagttttacttcctaagcctaacttattgccatccaacaaatatcaagcgaataaacttatatggccattatctctaggtgttcaaaagattcatgcatgtgtaatgcagacaattgtcccacctgtgagaaaattaaagtcgttacaaaatgggtagtgggtcctctgacagtgaggttgttgaaccagattcatcaggcatacaaagaaaaagattttggccatggtgatgtggaacctgcactgaaagatcgcatgagcatttgttctcaaagcctaacgacgctaagttgatgagatgacgtcaagataaccggaaagtagctggtatgattcgatacccaacggatgctcactagtggaagtttttgattcactacatccaaaatttcctatggatccaagaaatgtaaggtttgcattgagcacaaacagaatgaattcatttggtgacatatacatctcacacaacacctggccagttctgctcaccatgtgcaaccttcctacatagattgtcataagggaaagtatattttgttgactatacttatacaaggtccaaaacaacttggcatcaccatagatgaatttcctgaacctttgatggagggtatggaagatctatgtcaagaagggttacgaatgtgggatgtataccaactggagtactttactctatgtgctatcatattcgtgatcatcattgacctgcttgcaaatattttcctctttggccagattaaaaggtaaactgcatatcttatctatcttgacaagatgtcatacaaatatgtgacatcctcaagcaagatagcttacatacgccatcaacggttcttactccagaaacaagtattgtacgatggccaaatgttttgacaatacaatagagaacgagtctgccaccgcaaaacgaagtggtagtgttgtcttcgatatgacaaagaatattaagatcgcgtttgagaagggaaagaagtagtcaagaggaagaaagcagtggaggaaaatatatgccttacaggaagcactctatcttcttcaaatacatgctgtactgggaggacctggagattcatcatgccattgatatcatgcacctcgagaagaatatgctcgatagcaccattgacaccttaatagacatctagagtaagatgaagcacaggctggattcatgtaacgacttggtaactttagacataaggaacaaccttcacccaaaagatttggcgaatgggaaacaagattctcctgcttgctactccatgacaccaaaaaagaaaaacggatttttgtaaatacttgaattgggtgaatgccaattggtttctcatcgaacatcaggaagctagtctcaatgaaagatatgaccatctcagaatgctcatgattgtcataatgctaacggtctttctccctattgctataaggacaatcaagctagttcgaaggtagtgataacaaagatgtgttactttttcaatcaaatttcctagaaaatatttgatcctatggaattaggaccaatccagaacttcacaatcgagacagcgtgccaacttgagatgtattttcctccatcttattttgatatgatggagcatctgattgttcatattgtccttcagattacgaacttggtctgctatacttgcatcaaatgtgggtgtatgagtggtacatatcgattctaaaagggtatgtccgcaatcatgcttacttagagggatcgatgacataggggtacacaactggttgagtgcgttctagattacataaaggatgtcaattccaccaggaaacccatggctagatacgagggaaggttaactgggaagggggccgtaggcaaaagatgcttatttgataatgattacaaagcagtagcggaggcagacaacaacgtactgcaacaactcgccatcattgagccctatattgagcaacacatgaatgaggttagtgcctgcaatgctttcctcaatggttgttggatcaaagcctgctattggtgaatccatgaaggaaaataactttagaaagactggcatctggcctgtcaagtctagtgacctcatggcaatggtatgtcattaacggatatgaaaataaaggacaagaaaagctcagcacagaatagtggagttcgtgttgaggcattcaacacaacggacgagaagaaattgcactagggatcatacaagaaattgcagtaaacatccagatccctatcatcgatgctaatgggtgaaagacacaataggcatttctctggataactacaacctgacgattgtggaaggtagtagagtaggc

SEQ ID NO: 40382 - DNA, 192 bp, Oryza sativa
  Clone ID: PAT_MRT4530_4382C.1
acgacgttagaccgggaatgtttgaagtctcttgttaacttcactaatgacaaagggattcatcttattgctgatgagatttatgctgctactacttttggtcaatccgagttcataagtgttgcggaagtaatcgaggagatcgaagattgtaaccgcgatttgatccatattgtgtatagtctatctaaa

SEQ ID NO: 40383 - DNA, 496 bp, Oryza sativa
  Clone ID: PAT_MRT4530_43830C.1
gtctcctgaatgacattcgaggcattgagagggaggattcggacggcaaaatgacggacggcgtctcgctgctcgtccacgctagcgcggctccatgtccgtagacgaggccaaaaccgaagtgatgaagcgcatcgacgcctcacggaggaagctgctgagcttggtcgtcggcgagcaggaaggccctatcccgaggccgtgcaagcagctgttctggaagatgtgcaagattcttcacctgttctactaccagaccgacggattcagttctcccaaagagatggtcagcgcggtggatgcggtcatcaaggagccacttcaactcagatcattgtagattcatctctgtcactttttcttttcttttttttggatactgaagtactaccagtgttgcatttaaaagctgaggtaatcagaatgtggagtttgatcgaaaaaaaaaaaaaaaaaaaaaaaaaaaaaaactcgagactagttctctccctggtgc

SEQ ID NO: 40384 - DNA, 164 bp, Oryza sativa
  unsure (1)..(164): unsure at all n locations
  Clone ID: PAT_MRT4530_43831C.1
aaacctggcgtgcaacaggtcctgttctcggcgttgctcctcatcatcgtctccgtgctcgcctcgacggccaccatgccgccccaccacacagacctttttctgtacaacctccacaaacattgtgtggggggggggggctncccnctntactcnctcccacc

SEQ ID NO: 40385 - DNA, 300 bp, Oryza sativa
  Clone ID: PAT_MRT4530_43832C.1
ttaaaggaggagatggcatcttatggagtcacctttgcgaatctcaccgctttccccaccgccacccttttctccttcagcgccttcgacttcattgccgatgactccggccaacttcaacagttcagccctagtatcgttggatttgtccaagcgatcagtttcgcttctggaactgagttccgctttggagatctggacttcaccgccaacaagaattttgcatcagatttggagaaggtcgaagcggatttggtgtggaatcgagttgatctccaagtcggactacacatcggctga

SEQ ID NO: 40386 - DNA, 278 bp, Oryza sativa
  Clone ID: PAT_MRT4530_43833C.1
aaagggcccgcccggcacggcccggcccaggcacggctgggcacggcccagcagccattgggccggcacggcccgataggcacttcgtgccgggctgtgccggcccatgggctgcacctcccgcccaggcacggcccaccagctcctagctgccggcccatcgtgccaggccgggccggcccaacgtgccggtggaggggcccaggcacggcccggtggtcgggccaggccggcacgggcctgacctccgtcgggccgtgccgtgcttgggccgggcc

SEQ ID NO: 40387 - DNA, 410 bp, Oryza sativa
  unsure (1)..(410): unsure at all n locations
  Clone ID: PAT_MRT4530_43834C.1
nccgcccaaggatgcntgctccgtctgagaaggaggaagtgcaatccaccagtcgtcttcggaagggttcggtctcgacgacgtcatgaaggggtccgatgtcgctgatggagaagaagggcggccggggaggagagctccggcatgtcggcggcgccagccggtgggctgttcaagatggcccagggtttgcatgaagtaaggagagctctttggctggatgatgatgagctgcatggcatggcttgtgctctgggactctcgtgggctctgctttgaatttgcttgttgaattaactggatggatgctggtatgatggttttggtaaatttgctctcagctctgttgttaattttgtgtggtgaataataagaagacagctactttgtgtgtaaaaaaaaaaaaaaaa

SEQ ID NO: 40388 - DNA, 694 bp, Oryza sativa
  unsure (1)..(694): unsure at all n locations
  Clone ID: PAT_MRT4530_43835C.1
gttcaagccatttagattttcatgtttatcctatgtttacaacattattcttgtttcaatattccggattctggttctgggtaaataattcaagttccctgcttgccatgaatgtgcaatatgatttcaatttggttctttgattccggtttcaattattcaagtaccatgcgtagtcatgggagtgcaatttggttctttattcatgttcgtgtgggtaagcactgatcacgcttactcggtttgccggcaaatgttaggatgtattcactattgttcgggatggaaactactatttcaattcatgcctgcttgggatgggaactactatcttctttgacttggtgtttgaaattgtgtttcctatcagagaaagaaagccttctgttcatgctttattgccaatgatgtgtatatgtgttttctagttccatattgtacttgctgagtatttttatactcactcttgtgttttatttggttntaggtacatattgagaccgacatgcatgggcgggaagtagcactcttatatacatatttatctgcacactatcaaactatattgcctaggtccataatgatacttaaactatatcatgggtttggntcttgtaataatcttttagaattttaatagttttcttccccatggattataaggatgggatcgtattatggggaatgatattgg

SEQ ID NO: 40389 - DNA, 294 bp, Oryza sativa
  Clone ID: PAT_MRT4530_43836C.1
gggattatgaaaggctaactttctatattaactgagttaggtcattattgctgaggcattgagaccacactgaacacatatcatacattagacgctgtccatcgccaggtgattataccagcgagagaaagcgtacgtacatactcccgaatgcacagttcacataggtagaaccatcgcctacttccctcgtacgtctagcacacgttacatgtgtacaccgatagctagctcaagctgtctctcttattctaagcagtgcgcgtccacgtacacacatgaacaccacacgtg

SEQ ID NO: 40390 - DNA, 1890 bp, Oryza sativa
  Clone ID: PAT_MRT4530_43837C.1
atggccgccggcgtcctcatgacaaaaccgttcatggctgccgcttctgctctagcctgcttgctcgtcatgctgcgctgcttgcctagcgtcgtcgctaccacggtatctttcaactactccaccttcagcaacgcgaagaacatcaccctccagggcagcgcggcgttcgccggcggggggtgcatcgagatcaccaccggaagcaacctgccgagcagcggcaccatgggacgcgtggcgtacacgccgccggtgcagctctgggacgccgccaccggcgaggttgccagcttcaccacgcgcttctccttcaacatcactccgacgaatttggacaacaagggcgacgggatggccttcttcctcgtcggctacccgtcaaggatgccggacaagggcgacggtggcgccctcggcctcaccagccggtactttgacaccgtccagcccggcgagaaccggttcgtcgccgtcgaattcgacacttatctaaaccgcgacttcgaccccaacgcaacctacgaccacatcggcatcgacgtcaactccatcagatcggtgcagaccgagtcgctgcccagcttcagcctcaccgggaacatgaccgccattgtcgactacaacagcagctcgagcatcctgtcggcccagctggtgaagacatggacgaatggctcgactacactttacaaccttagcaccaccgtcgatctcaagagcgccttgccggagaaggtctccgtcggcatcttggcggcgacgggcttatcccttgagctccatcagctgcattcttggtacttcaactcctcgttccagcagaatccaccaccggcggtgcaacattccccgaccacctcaggttccggacttgccggagttatagctggagccaccgttggtgcagcactgttcgtcgtgctcctctttgccatggtagttgtccttgtgcggcgacgtcggagcaagaagagaagggaggtagaagaggcagaggaggcgagacacgtagggttggccagagatgacgatgatgacgatgacggtgagcccatcgtggagatcgagatgggcatggggccaaggcaaatcccataccaagacctcatcgaggcgacgaacagctttgcggcggaggagaagcttgggcaaggcggcttcggtgccgtgtacaggggatacctgagagagcagggcctcgccgtcgccattaagaggtttgctaaggattcctccaagcaagggaagaaagagtataggtcggagatcaaggtgataagccggttgcgccaccgcaatctggtgcagctcattggctggtgccatggccgcgacgagctcctactcatctatgaactcgtccccaaccgcagcctcgacattcacctccatggcaatggcaccttcctaacatggccgatgagggttaagattgttcttgggcttggatcagcactattctatctccatgaggagtgggaacagtgtgtcgtgcaccgtgacatcaagccgagcaatctaggcgacttcgggcttgcaaggttcatcgaccatgccgtggggatgcagacgatgaccgccgtctctgggacaccaggctatgttgatcctgaatgcgtgatcaccggtagagcaagcttagagtctgatgtttatagcttcggcattgtcttattggaagtggcatgcggaaggaggccaatgagcctacaagataaccagaagaatggcatcttccggttggtcgagtgggcctgggacctgtacggacaaggagatgttgtctcagcggctgatgagcggctcaacggtgattacgacgtgtcagagatggagcgtgtcatcgttgtggggctttggtgtgcgcatccagacccaagcgcatga

SEQ ID NO: 40391 - DNA, 2154 bp, Oryza sativa
  Clone ID: PAT_MRT4530_43838C.1
atggctgctgcttctgcttctgccatagcctgcctgctgttcttgggattcttgcctagcctcgctactgccgtgtcgttcagctactccaccttcagcaacgggaccaagaacatcaccctccagggcagcgcggcgatcgccggcgatgggtggatcgagatcaccaccggcagcaacctgccgagcggcggcaccatgggacgcgtggcgtactcgccgccggtgcagctctgggaagccgccaccggcgaggtcgccagcttcaccacgcgcttctccttcaacatcaccccgacaaacttggacaacaagggcgacgggatggccttcttcctcgtcggctacccttcgaggatgccggacacggcggacggcggcgccctcggcctcaccagccggaccttcgacgccgtcatgtccggcgacaaccggttcgtcgccgtcgagttcgacaccttcaacaactcgttcgatcccagcgccacctacgaccacatcggcgtcgacgtcaactccatcgtatcggtgcagaccgagtcgctgcccagcttcagcctcaccgggaacatggccgccattgtcgactacaacagcagctcgagcatcctgtcggtccagctggtgaagacatggacgaatggctcgactacactttacaaccttagcaccaccgtcgatctcaagaccgccttgccggagaaggtctccgtcggcttctcggcggcgacgggctcatcccttgagctccatcagctgcattcttggtacttcaactcctcgttccagcagaatccaccaccggcggcgcagccttccccgaccacctctggtcccggacttgccggagttatagccggagccaccgctggtggagcactgttcgtcgtgctcctcttcgccatgatagttgtcctcgtgcggcgacgtcggagcaagaagagaagggaggcagaagaggcagaggaggcgagacacgtagggttggccggagatgacgacgatgacgatgacggcgagcccatcgtggagatcgagatgggcatggggccaaggcaaatcccataccacgagctcgtcgaggcgacgaagagctttgcggcggaggagaagcttgggcaaggtggcttcggcgccgtgtacaggggatacctgagagagcagggcctagccgtcgccattaagaggtttgctaaggattcctccaagcaagggaagaaagagtataggtcggagatcaaggtgataagccggttgtgctaccacaatctagtgcagctcatcgggtggtgccatggccgcgacgagctcctactcgtctacgaactcgtccccaaccgcagcctcgacatccagctccatggcaatggcaccttcctgacatggccaatgagggttaagattgttcttgggcttggatcagcactgttcaatctccatgaggagtgggaacattgcgttgtgcatcgcgacatcaagccgagcaatgtcatactggatgagtctttcaatgccaagctaggcgacttcgggcttgcaaggttcatcgaccatgccatggggatgcagacgatgaccgccgtctttgggacaccaggctatgctgatcctgaatgcgtgatcaccggtagagcaacctcagagtctgatgtttatagctttggctttgtcctattggaagtggcatgcggaaggaggccaatgagcctacaagataaccaaaagaatggcatcttctggttggtcgagtgggcatgggacctgtatggacaaggagatgttgtctcagcggctgatgagcggctcaacggtggttacgacgtgtcggagttggagcatgtcatcattgtggggctttggtgtgtgcatccagacccaagcgcacgaccatctatcagaaccgccatggccatgttccagtctagtgggcaactactggtgttacctgctaagatgcttgtgccaacatatgcgccgccggtggcctcagtggaggggctcttcacatcgtccactggaatgttgtcctcaagtgcaacacaatcatcatcgacaaccagtggctatattacccacacctcaagttcctctaacacatccacttcagctggttcaaaggactcgtcttcgttgctcaaacatcaatacttatga

SEQ ID NO: 40392 - DNA, 834 bp, Oryza sativa
  Clone ID: PAT_MRT4530_43839C.1
atgtccaccctggcgacggagaagctctaccgcatgctcggcatgtacgaggtgctcaccgacatcaagtcggacctcgaatccctcttcacaggatacgcgcgcaacttcttctccttcgaggtcaccagcatcgtggcccagctgggcaacaccatccgccatttatcgatgcagttttggataagaataagggaaggggaggggaggaggcagcgtcgggaggagggcttcgtcgggacgctgctccggtgctcccgtgtcaccgccgtcgtcgcgtcgccacgccatcagaggctgttgctagtgctcctcaccccgccgcccgagcctagctgctcccctgccggccgccgcccgtggccagctgctcccccgccgccgcccgtggagagggaaggagagaggtggagaggggagggaaagaagaggctgatgggcaaagtaaaggaggaatccctcccaattaccacctcctacccagagcgaagcttcggatccggcacccccgtggctggatccggcgccctaccgccggagacgagcgtcactgccgttcacggcggtgtgacggggcgcggaggaggcggagcggcggcgcttgtgctggcggccagcaaggtagaggccgaagtgggtgcgacggtgctggccctcccgcggcctgtctggaaaggggcggcggggagcgctggacccggtggcggctggcggcgcaggctgcagcggcagcaggcaggcacgacctcgtcggcgccacacctcccccccaccccccactcgtcgccgcttggattacagtggttctatgccctcctccaaagttgtcgttga

SEQ ID NO: 40393 - DNA, 632 bp, Oryza sativa
  Clone ID: PAT_MRT4530_4383C.1
caatcaaactacgaatgctttataattcgctatttccattgccaatatcgtctttgtaaagaagatataatcatcattatatatgcacatgattaattaagggggtaataacaaaaaggagaagaaaacaaagaagtgatcaaaaaagaatctgatgaacagaatcatcatcatcaagaatcaggcgtcctgggagtagaagtcgatgatctccttgaggtcgaggtggaggagggaggaggaggagcggtcgtggtggccggcgagccagagtatgtgctcgaagaggatggcgtcgacgtcgacgaagagcgccgccttgctctcctccttcctcaccgccgtctccagcagcagccggaacgggtaggtgtcgagcaccagctggtcgacggagaacacccgccgctccttcccgacgacgaccgtcgtcgtcaccgccgccggagacgggccgtcgtcgccgtcgtcgagggagcggtagccgatgcgggacggcgaggccgacggccaccggaggaacacgcagcagccggccatctcgaacgaactctcctctcttgatgagcttttcttgcggctctaatggcggcgtcgcggcctcgtgccgaattcctgcagcccggggatcc

SEQ ID NO: 40394 - DNA, 867 bp, Oryza sativa
  Clone ID: PAT_MRT4530_43840C.1
atgctcaatgtcatggtaatcgatgaagatagacgtcatgcctactctacaagttccatgctcactcaattcaacttttgtgtcacagtgtacacaagccccatcaaagcgctggattttcttgagaatcatgcacaagattttgatttggtactggcagaggtgcacatggaagagctgaatggttttgcatttcttacggcttctaggaagattcataaatccattcaagtgattaatctaaaagttgtacgaatggagaagataaagggtttgcttcaagatgactcatctaaaaatacgaaggtgatcaagaacaagggcaccactgattgcaatcaaattgctactcatgttcatcagatgcaagtcctcaatggagatgatgtttacaccgctatgagaagatccttgcatcttgggactatctttgatgagtccaactattccaatgatccttgcagcaatgaatataaagttggagaagatgagattggaggttatggctgtgccaatgaggcaaatgccacacactcatctgatgatcacaatgttgttgttcctgatctatcctgcaatatagcagatgatgtttcacaggagattatgagcaaggctactacttgtgttgatcatcggaagcaagacaccacacgaactgatgggccagcagctatgagtgctgatgaagctaatgctacattctcaactggtaacctgcagcaggttaatgtcattgtgacctgcaatggagatggttcacaagagagcatacagaagaatacttgtgatgaccagcatgcccccacaggaagtaagccagaaactttcagacttgtgaactattcagactccgagagcgattaa

SEQ ID NO: 40395 - DNA, 486 bp, Oryza sativa
  Clone ID: PAT_MRT4530_43841C.1
cccgggctgcaggaatcggcacgaggaaagctttgagctaccatctgcacagttactactggcttgacttccagaggctgaatgagatataccgctacaagacagaggagtactcagagacagccttgaacaagttcaacgtgataccagaatcaatccctgactggatattcgacttcatgcccagccgcggcgggtacttcatcggcaacgtcagccctgcgaggatggacttccgctggttctgcctgggcaacttcatcgcgatcctctcctcgctgacaaccggagaacaggctgaagcaatcctggaccttgtggaggagcgctgggaggagctcatcggagagatgcccatgaaggtgtgttaccccgcgatggagaaccaggagtggcagatcgtcaccgggtgcgaccccaagaacaccagatggagctaccacaatggaggatcatggccagtgttgctgtggctgctggtggcgg

SEQ ID NO: 40396 - DNA, 483 bp, Oryza sativa
  Clone ID: PAT_MRT4530_43842C.1
gaggtgtttgtttccccagtgttttccctgccgagacaacagctctgccatagttgcacagatgcaagttcattgcctctttggaatttaggtcaggctaagcagaattaggcctgctgggattttttttgttagccgacaacacctcagccataactgcacggatgcaaactgttagattacatgacccctttagaattcaggccaggctaaccagaactaggccaacatagaaaatttttcgttgatatttggattttatttaacacccgcatgagaatatggaaagttctctactttttttaagtttgggactaggtaccatgtcctagatatcgaataagagattactctgaaaaattttcttcataaactggtgtgaatgggggagcatcagtcattggattatacctgataatttagatgtacgttgtcttcctatggcttttcatctaatgtatatgatttattattcaatggaaa

SEQ ID NO: 40397 - DNA, 973 bp, Oryza sativa
  Clone ID: PAT_MRT4530_43843C.1
gcacgaggggaggccgagcctgccaaggaggaggtggcgccagagcccgccgccgccgccgaggcggaggccaaggaggccgagccggcggcaccggtggccgaggaggtgaaggaggaggaggcggcgccggcgccggccgccgaggaggtttatgtggaggaggcggcgccggtcgcggagccggaggccgataaggccagcgagtgagtgcatgccggggaaggctgggtgggcgtggtcggacaccgttggtgtgcatgcatggtccattcgcactctctatctggggttactgtgctgaagaatacatgtctgtgttactccggtgcgctttatatttagatattttattattctatttctattgttcacccccgccctgtttttttgcatgtgtgttaggggaacttgctgcggccgtagcccctttcttgtttagtcgaatgtttcttttgtttttttgtttttattgatttgtgtttctattatagactgacgtctgcttgtgtctgtttttttttgcttctcttttttgtttttgcccgggtctttgccctgttagtgtgtttgttttttgtgatgaggttgcagttttagttgtgttgttgtagaggcttcgtatcgccgatactctttttcttagtcttttttcagttccacttttcttctcaatcccttctttccgtccatatattaggttgctattggttcgtatcttatctttagttgttctatgttttaatctttttgtcttgtgctatattgtttcttgtctatgttgtggtcttgtctgttgttcctgattttttcatgtgtgctcttagggttccttttttagatttggtagcgactgttgtagggcattgctttgtctatgcttttgtggtattcttggcctgtttttatgttgtcgttgtggcatttatttttatggtttagttcggtattttttttcctctctcctcttttt

SEQ ID NO: 40398 - DNA, 123 bp, Oryza sativa
  Clone ID: PAT_MRT4530_43844C.1
atggagatcaagaaagaaaggctggttcgctcgtccaacatgagacaagccgcagataaggtctcccggcggttttggctgacgtggcgcctacatggcaaatttgacttggtcttcatctga

SEQ ID NO: 40399 - DNA, 339 bp, Oryza sativa
  Clone ID: PAT_MRT4530_43845C.1
gcgcccacgcgtccgaaaaaaaaaaaaaaaaaagggaacagaaaaaaaaaaaaaaaaaaaaaaaaaaaaaaaaaacatacacattgtgatgtggttataatttaaaaactccaccatcacaaccccatacatcttaaataaataactcttaaataaaatcccctaaccttaattcaactaacccctgttttacaaaaaccctactgagaaaaaatttaatttacttaacttaaacccctatttgcacaaccccctttatacacaacaggacatgataaaaacgcttttacacaaatatctttccaaaaaattgccaatcctaaatgcccaatggaaccc

SEQ ID NO: 40400 - DNA, 464 bp, Oryza sativa
  Clone ID: PAT_MRT4530_43846C.1
tggcggctatttgttgggattaggacgtgtctggtggaacgggccggcccccggcggcaccggatccaggcgcgcccccgagtgtgggggggtcgtcgccgtgggtggcggaggaccggcagtgggcggtggacttcggcgggcggcgaggcagcagcggcgccgccggagccgcggagatggaggagggcggtgggccggcgtcggtggcgggggcaaagcaagagtgaggttaggaggtggtgggcagtggttgcagatccggcggcggggagccaccggagatgggggaaaacggcggcgcgggggcacctcgccgtcgccgccatgaggagaaagagaggggggaaggggaggggggggggggcctcgccgacgccgttgactctttccggccagccggcgaggcaggcagcggcgcggtggggtggtggtgacggtggaatcgcgcaacggcgcgagga

SEQ ID NO: 40401 - DNA, 576 bp, Oryza sativa
  Clone ID: PAT_MRT4530_43847C.1
tagtcaatcagatagatgctcgatgtggacaaatttgcgagaacgctgcgagtgagatggctatcgttcagctgagagagctcaaacaaaccttgagcagggacatccccaccttgtgatgagctggatagaaaactattcggatcagcgaccaaggtatcaataggagacggacacaaagtgagcttttgagaatcaaactgggttggaggacaaccactcaaggaattggctccaactctatacaagcatgtaaataaaaaaaggaaggtcagtgcagaaaggactaacaaatgaccaatggataaaagacatcgggcacaaccccacagtttggctagtcaaggagtaccttgaggtattcaaccaagtttggagcaatgacaccacaccctcgtggaaggtgttgatgataccataacttggagatggacgagtaatggatttggatagcggatcggttacatatcagacaatggccaaacaattatttctgtcaactatgctacaagaatctagaatcagctcaacatctcttcaaggattgtccttttgtgcagcaggtttgggagaggg

SEQ ID NO: 40402 - DNA, 3825 bp, Oryza sativa
  Clone ID: PAT_MRT4530_43848C.1
atgggcggcgacgaggaggaggttgccggtgacgtgcgccgcaagttagggggctacctccccgccgtcgtctccgtttcatccgatgtgggcgtggaggcgctcgcgccgctttccccgtgctcgctcttcgcctgcgggggcgtctccctcgcgccgaaccccgacggcagtggcgcgacgcctcggtccaatgggagggcgtgcggcggagggggtgtcgtgcggcagctgagggcgctggtgtcgagccggtgcgtggaggtggaggggagggtgctgagggcggtggcgaggagggggagggagggaggaggaggggatggggaggtggaggcgagggcggtggtgctgttcgacgtgtacctccccgtctccgtctggtcggggtggcagttcccgcggtcccgcgcggccgcggccgccgcggtcttcaaacacgtcagttgcaattgggatgccaggaatgctttgcttgcttttaactggacctctcctgacaatccacactgtgatgaccagtatatttggacctgcaccgattgccacgtccttggttgtgaggtacatcagataccatctgtattgaataatgataagtcgtttgacctgcatgaaatcttcaaaactctacctagtgttatggtggagaagaggatgcagataacaagaataacaccagatgaggcagcatcgggagtgggtatttggtctgtccctgatgatgtcttgtataaggtgctggttcgactgaaacccagagatttgattagagttgcagctgcttgtcatcatctaaggaatctttctgcttctatcatgccttgcatgaaacttaagctttttcctcatcaagaggcagctgttgaatggatgctaaggagggagcagaacttgcaggtcctagaacatcctctatacaagggtttgtgcaccatggatggtttcccttattacataaatgttacctctggtgaaatatccactggtagtgctccaactgtacatgatttttgtggaggtatgttttgtgatgaacctgggttagggaagacagtgactgcactgtctcttattctgaagacacatgggactctggcagtccctccaccagggatgaatgttatgtggtgcatgcataaaccagataaaaaatatggatactacgagcttagtgctagcaactcttctaatggaaacatctttttgtcgggatcaaaaaagttgcgaaaggacgtgattagagaagatacatgttcaagtgagtcactgaataatggtggttcagttgttagtacaaggtcatcaagaaagagaggcaggttagtaaaccctgatttgaatatgatcgctgcacatccgagtgggaagtcgccaatgtcagcaccaactggtgctcattcaactccagctactcatgtgctaaagattaccaaaaacttgaaacatgttaggaaaaacctcatggaggcatatagcgatggttcagttggcaataaaaggaagagagatgccacctctgagttaagtgaaacctgggttcaatgcgatgcttgcagaaagtggcggagattattggacggaactgcacttgattccagtacagcatggttttgcagcatgaaccctgattctgcacgtcagaagtgcagcatcccagaggaatcttgggatttaaagcgaaagataacttatttgcccggatttcacaagaaaggtacaccaccaggaaacgagcaaaatgcatctttttttacaaacatattgaaagagcatgctgctttgatcgattcagaaaccatgaaggctttgttgtggttggcgaaactttctcccaagaaacatatcgagatggaagcagttggtttgacacggccagttctagatgcacgtgctaacataggaaagggtgcccgcccgtattacaagatttttcaagcatttggccttgtgaggaaggttgagaaaggcataactcgatggtattatccatctatgcttgatgatttggcatttgattcggctgcacttggaattgcccttgaaaagccgctggatttgatacagcggcatgtttcctcggacacacttaatgtttatgtatggggagatcacaagaaaccatctgctcacaaccttgcatgggactatgacattgtcataaccacatttagtagattaagtgcagaatggggtccaaagaagagaagtgttttaaagcagatccattggtttagggtaatattagatgaaggacacacattaggttccagtctcgccctcacaaacaaattgcagatggctgtttcattggttgcttctaatagatggattctaactggtacccctacgccaaacacaccaactagtcaagttgctcaccttcatcccatgcttaagtttcttcatgaggaagtttacggtcaaaactaccagtcatgggacactggaattcataggccttttgaggcacaaatggaagacggacgcagtcgtctcctgcagctacttcagaggactatgattagtgcaaggaaacaagacctgaaaaacattcctccttgcataaaaaagataactttcctggacttcagtgaggggcatgcgaaaagttacaatgaactggctgttactatccgcagaaatatattgatggctgattggaatgacccttctcacgtggaatcacttctgaaccccaagcaatggaaattccgtactacaactattaagaatgtgcgcttgtcttgttgtgttgcggggcatatcaaagtagcagaggctggtcaagatatacaggaaacaatggatgcattaatgcagctgggccttgatccttcttcgggggagtatcagtccataagatatgctcttttaaatggtgccagctgtttcaggtgcagagattggtgccgcttgcctgttgtcacgccctgtcggcatctgttgtgccttgattgtgtagctcttgatagtgagaaatgcacgttacctggctgtggcaaccattatgagatgcagactcctgaaactcgtgcacggccagaaaatccaaacccaaaatggccagtgcccaaagacctaattgagttgcagccttcatataagcaggatgactgggatccagactggcagtcgacaacaagcagcaaagttgcttatttggttaataagttgagaagtttgaaggcagaaaacataaaacatgggtactctaggaacatggccaatggtgcttgcctttctagtcaatcttcttgtcaagaccataataatgtggagggcaggttaccacacacaatgcctgacaaagtaataatattctctcagtttctggagcatatccatgtgattgagcagcagctgacgattgggggcataacatatgctggaatgtacagtcccatgccattaggcagtaagagaagttcactgacgaagttcaaagatgatccagcatgcatggccttagtcatggatggaactgcagcactgggccttgatttgagttttgtctcttatgtttttctgatggaaccaatatgggataggagtatggaggagcaagttattagtcgtgcacatcgtatgggtgctactcgtcccatatttgttgagactttggccatgcgtggtaccatcgaagagcaaatgttaaaacttttacaggattccaatgcttgcagacaaatggtgaataaaggaacaagcagcactgataatgaaggtgctcggcctcaccggagcctgcatgattttgcggaaagcagttatctggcgcaactcagctttgtgaaaggatctgacgcggcggaaaaattatag

SEQ ID NO: 40403 - DNA, 723 bp, Oryza sativa
  unsure (1)..(723): unsure at all n locations
  Clone ID: PAT_MRT4530_43849C.1
gccagttctagatgcacgtgctaacataggaaagggtgcccgcccgtattacaagatttttcaagcatttggccttgtgaggaaggttgagaaaggcataactcgatggtattatccatctatgcttgatgatttggcatttgattcggctgcacttggaattgcccttgaaaagccgctggatttggtgaggctttatttgtctagggcaaccttgatagtggtacctgctaacttaattgatcactggacaacacagatacagcggcatgtttcctcggacacacttaatgtttatgtatggggagatcacaagaaaccatctgctcacaaccttgcatgggactatgacattgtcataaccacatttagtagattaagtgcagaatggggtccaaagaagagaagtgttttaaagcagatccattggtttagggtaatattagatgaaggacacacattaggttccagtctcgccctcacaaacaaattgcagatggctgtttcattggttgcttctaatagatggattctaactggtacccctacgccaaacacaccaactagtcaagttgctcaccttcatcccatgcttaagtttcttcatgaggaagtttacggtcaaaactaccagtcatgggacactggaaatcatangccttntgaggcacanatggaaagacgacgcagtcgtctcctgcagctacttcagaggactatgat

SEQ ID NO: 40404 - DNA, 367 bp, Oryza sativa
  Clone ID: PAT_MRT4530_4384C.1
aaaaaaaagggaacttaaaactaccccaccattttatttataaacagaaaacctttgaagaaggggaaatgttgatgagattaacaggatgcccaaacaacctaaattattttcacacaaaaacaacacatttcaacacccagatccgggaaacagatcaaagttaattaaacccctactactacaccataacacgaacctagatgggtctagctagctaagccccccttcgagattcttatttacttagaaggggggggccaaaaagcctaatgaggccctatgatcacggttttttggggggcccatggatgccgaagacccccccccccggcgagagcggggagggcccaccggcgccgggaaa

SEQ ID NO: 40405 - DNA, 291 bp, Oryza sativa
  Clone ID: PAT_MRT4530_43850C.1
atggattcgctcgtccactccatcggctccgccggctcccgcgaccgcatcgggaggaagggcaccgtcgccgacctcgccgacgcccgccgctgctccaacagggccccagcccccgtccccgccgccgccgtcgatctgtaccactcccacgaattcatcatccataaagtcgccggaatctcgtggcttgcaacaccagaatacaagaacaactataacaagaacgatggcctgttctacttgttgagctttgatggctcatggctccatatgcacattggattttaa

SEQ ID NO: 40406 - DNA, 496 bp, Oryza sativa
  Clone ID: PAT_MRT4530_43851C.1
cggtattccatgcgcttacggatttatctatgatcgtaagaaatatcaacaactacatggatttctagtctctggatagggaatagaaaccaatctagaaaagatcagggctatcaagaacttgaagtcgccattaaggcttgaggaggttgaaaaacttaccggatgcatggaagcactcggtcggttcgtagccagcatgagaaagctaggcttgcctttcttcaacctagtgaagaagcacaacaagtttaagtggacaacagtaaccgaagaagctttccagatacttaaacgatatcttgcaaattcttctattctcgtcgcttcgcaacccagaggaggagctcttcctctacaatgtcaccacaccgtactcggccagtactattctcgttatcgagcgcgatcaggttcaacaaccgatatattatgtcactgaagttcttcacaatgtgaaggcaatattcccaaatccaaaagctgttacactgtg

SEQ ID NO: 40407 - DNA, 528 bp, Oryza sativa
  Clone ID: PAT_MRT4530_43852C.1
atggcggttgtggagaggagaagaaagatcggccgtggcgtcgtctcggctcgggcggacacaggtggcggcaatggaagggagaggccggcacgggggagctcagtgcggcagcggcggcggcggcgtaggcacgcgacgatgcggccgaggcgagacgcacggcggctcagcgaaactgcagcagtggcagcgcccatgccgtgcggtggttcggcatcgccgccgctgtcctccccccataaacgccgcccccaggtgctcgccgccgccgcgtgctcgcctccgaccttggctacagcctcctcacgcaggcttccccgcctctgccgccctccctccgccgcgccggtcagccggcacctcgccaagcaccactgcgacagcccctcccctcgtgccgcctctcaccaccgaagaaaaaagaaggaagaagggagaaaaaaatataaaaaattccatgtcatcgtccacatggcgtgccacgtaggcaagaccacggtctaacgcggctttggaccgggatga

SEQ ID NO: 40408 - DNA, 645 bp, Oryza sativa
  Clone ID: PAT_MRT4530_43853C.1
gtgaaatccttcaacctccctgccgggaaaggggggcggaaaaaaaattggggtccggaagccaaaaaagcctttaggctcccccctgggtttgaagaagggcccccgcccttgaacgaaaagaaaaaaactgggggaccggaagtccccgttcgcacccggaagccaacattggcggcgcacaagccgcttgcgccgaaaagaagtcgcactcgcctccggaggaggcgctcccgagcggggcgagctttaagaagccgaggccccggcccagggctggccgaacagcctgttcctccgcgagccagcgcggaagagcaggcgccccgcaattctgaaagcgcccgccccgaaagggcgccactggatcaacgggcccgtgagctcgaagcgcgggcgaaggagctggacgcgaaagcgcacaacggcggggcggccacgggccacggcgacctaaccgcccgccttgcagccgccgaacacaccattgccgagctgcagggcgcgctggacttgtccgccggggaggtcgaggccctccgcttggcgaacgaggtagggcccggcatgcttcgggacgccgtctcccgtttagaccgcgccgggcggcaggcgggcctttggggcgggcaaaacgcgaagtaa

SEQ ID NO: 40409 - DNA, 170 bp, Oryza sativa
  unsure (1)..(170): unsure at all n locations
  Clone ID: PAT_MRT4530_43854C.1
tgcacgtttcgtaagtttggatccccttttcgcccgccttnnttttttgggtttggaaaactggaaccagaaaacttcgactttgtaggctcggagaaaaatattcactattacaaaaatccatgcaggagtaaaggttaaagaagaaacagggcttttgttttttgaga

SEQ ID NO: 40410 - DNA, 438 bp, Oryza sativa
  Clone ID: PAT_MRT4530_43855C.1
tccctctcgtcttcccccagatccccccattccctaaccctaccatcgccatggcctcccgcatcaaggaccgcggcaaggccgcacccgccgccgcgggatcccgcccgctcacccccaaggccttctccgcctcgtcgtccgctcgccgcacccccgccgccgccgctgccgggaaggagaactcggcgtccaagccctccaagcccaccgccgcggtgcggtggtccacgtcgtcgatcccgagggccagcaggatcccgagctccgtggagtcctccaagctcgtctccaccctcagggcgtcctcggtgatgccggggagggcatctgtcgggaaggaaatggaggcggaggcggccttgcggcggagcgtgagcggcgggatcagggccgctgccccggagagagcgaggaggctcgttgggtggcgttggg

SEQ ID NO: 40411 - DNA, 633 bp, Oryza sativa
  Clone ID: PAT_MRT4530_43856C.1
atggcggcgacggtggtttccaaatttgaggtggagaagttcgatggcaccgggaatttcgttctctggcagatgaggctgaagaatctgttggctcaacaggggatatccaaggcacttcaggagacgatgccggaaaagatggattctgacaagtggaatgagatgaaggcgcaggcagctgcaacaatacgcttaagtctctcggattctgtcatgtaccaggtcatggatgaaaaaacgccgaaggaaatttgggacaagttggcaagcctgtatatgtccaagtcactgacgaacaaggccataattcttctgtgctcgcttccaccgtcgtatgaacatgtggtgactaccctgacgcacgacaaggatactgtcaaaactgaggagaagaggaaaggtggcattgcaagtttagcagctcgtggtgaggattctgataggaagaccatgaatatcatgaaggacggcaagactgttatgactggtgagaggacgagctcatgtttgtacaagttacaagggagtgctgttgcaggtggagtaatggaagatgggtatgctggtgttgcggtgcacgatcctgaaggcggcgagcctggcgtaggctcgttgggcggctcggcgtga

SEQ ID NO: 40412 - DNA, 1062 bp, Oryza sativa
  Clone ID: PAT_MRT4530_43857C.1
atggatgctgacaagtgggatgagatgaaggcgcaggcagctgcaacaatacgcttgagtctcttggattctgtcatgtaccaggtcatggatgaaaaaacgccgaaggaaatttgggacaagttggcaagcctgtatatgtccaagtcgctgacgagtaagttgtatctcaaacaacagtcgtatggtttgcaaatgcaagaggagtcagatcttaggaagcacgtggacatcttcaatcagttggttgtggatctaagaaagttagatgtgaaactggatgatgaagacaaggccataattcttctgtgctcgcttccaccgtcttatgaacacttgagaagatcaaagaaaaatgaggcaacggaggcttctcaggctgagagtttgctggtcaaggcaaagcatgattatgaagcgggggtgtcgaagagcaaggagaagggggcacggtgctataagtgtcatgagtttggacatataaggaggatttgcccgttactaaagaagaggaaaggtggcattgcaagtttagcagctcgtggtgatgattcagatagcagcagtcatgagattctcacagtgtctaacgagaagtctggagaagcgtggatgttagactcagctagttcctatcatgtgacatcgaagcgggagtggttctcttcatacaaatctggtgattttggtgttgtttacttgggcgatgacacgagttatcgtgttgttggagtgggcgatgtcaagttcaagatgtatgatggaaacgaggtgctactttcggatgtgagacacatgccgggactaaggaagagtttgatttcgcttgggagcctacatgagacgggttggttgtatcaggtggattctgataggaagaccatgaatatcatgaaggacggcaagactgttatgacttgtgagatgacgagctcatgtttgtacaagttacaagggagtgttgttgcaggtggagtcatggaagatgggtatgttggtgttgcggtacacgatcctgaaggcggcgagcctggcgtaggctcgtcgggcggctcggcatga

SEQ ID NO: 40413 - DNA, 270 bp, Oryza sativa
  Clone ID: PAT_MRT4530_43858C.1
atggccaaaaccttcctcccagcctatgcaccaaaccaattctctcagaagatcgagaattggatgaacgaggtcacaacattgttgtctttgttgatctgcttcaacaattttggtcttgagatcatgtgcgatggcgcaaggcgaagcagagacgcaaagcatgcaatggttacaaaagctatctatctgtatttcaactgtgcaaatgaggccatcatgggagcacagttcaaccgggccacagaagcagtagagaacttacattga

SEQ ID NO: 40414 - DNA, 1227 bp, Oryza sativa
  Clone ID: PAT_MRT4530_43859C.1
atggcggcaacagcggtttccaaatttgaggtggtgaagttcgatggcaccgggaatttcgttctctggcagatgaggctgaaggatctgttggctcaacaggggatatccaaggcacttcaggagacgatgccggaaaagattgatgctgacaagtggaatgagatgaaggcacaggcagctgcaacaatacgcttgagtctctcggattctgtcatgtaccaggtcatggatgaaaaatcgccgaaggaaatttgggacaagttggcaagcctacatatgtccaagtcgctgacgagtaagttgtatctcaaacagcagctgtatggtttgcaggtgcaagaggagtcagatcttaggaagcacgtggacgtcttcaatcagttggttgtggatctaagtaagttagatgtgaaactggatgatgaagacaaggccataattcttctgtgctcgcttccactgtcgtatgaacatgtggtgactaccctgacgcacggcaaggatactgtcaaaactgaggagataatttcgtcgttacttgcacgagacttgagaagatcaaagaaaaacgaggcaacgaaagcttctcagggtaagagtttgctggtcaaggataagcatgatcatgaagcgggggtgtcgaagagcaaggagaagggggcacggtgctataagtgtcatgagtttggacatataaggaggaattgcccgttactgaagaagaggaaaggtggcattgcaagtttagcagctcgtggtgatgattcagatagcggtagtcatgagattctcacagtgtctgacgagatgtctggagaagcgtggatgttggactcagctagttcctatcatgtgacatcgaagcgggagtggttctcttcatacaaatctggtgattttggtgttgtttacttaggcgatggcacgagttatcgtgttgttggagtgggcgatgtcaatttcaagatgtatgatggaaacgaggtgctactttcagatgtgagacacgtgccgggattaaggaagagtttgtttcgcttgggagcctacatgagacaggacggcaagactgttatgactggtgagaggacaagctcatgtttgtacaagttacaagggagtgctgttacaggtggagtcatggaagatgggtatgttggtgttgctgtgcatgatcctgaaggcggcgagcctggcgtaggctcgtcgggtggctcggcgtga

SEQ ID NO: 40415 - DNA, 119 bp, Oryza sativa
  Clone ID: PAT_MRT4530_4385C.1
gcacgagggtcaactcaaactttcctggcttcatttcccattgtcatttctttttccaaaaactcatttgctaagtagaatagttaaaattcatgctctgctagagcaaacacacttct

SEQ ID NO: 40416 - DNA, 396 bp, Oryza sativa
  Clone ID: PAT_MRT4530_43860C.1
atggctgccccggcgggacctcatgtccaggaggcagaaaccgcccgatgccaccactctcctgtccaactgggcccaacgcgtcgcgcccgcagatctatgggccgcccccacccacaccgtatcgaagaggtgcagcgccagcctgccgccgctggcgcaacaccacacgggcacgcgccgcacagcgaaagccggattctccaccacgacgtcccccacaaccgcgcaccagccttccgggagagtgtagcggaggcgtgcgcgttccactgttcaaggacggacggcttcgttccctctccctttcacaaggtcggctctcttttgatcgaggaagcagatcatttctgcaacgggacagagtgcgcggctactttcacctcaccagcataa

SEQ ID NO: 40417 - DNA, 1107 bp, Oryza sativa
  Clone ID: PAT_MRT4530_43861C.1
atggcggcgacggtggtttccaaatttgaggtggtgaagttcgatggcaccgggaatttcgttctctggcagatgaggctgaaggatctgttggctcaacaggggatatccaagtctcttgaggagacgatgccggaaaagatggatgctggcaagtgggaggagatgaaggcgcaggcagctgcaacaatacgcttgagtctctcggattctgtcatgtatcaggtcatggatgaaaaatcaccgaaggaaatttgggacaagttggcaagcctgtatatgtccaagtcgccgacgagtaagttgtatctcaaacaacagctgtatggtttgcagatgcaagaggagtcagatcttaggaagcacgtggacgtcttcaatcagttggttgtggatctaagtaagttagatgtgaaactggatgatgaagacaaggccataattcttctgtgctcgcttccaccgtcttatgaacatgtggtgactaccctgacgcacggcaaggatactgtcaaaactgaggagataatttcgtcgttgcttgcgcgagacttgagaagatcaaagaaaaacgaggcaatggaggcttctcaggctgagagtttgctggtcaaggcaaagcatgatcatgaagcgggggtgtcgaagagcaaggagaagggggcacagtctagttcctataacgtgacatcgaagcgggagtggttctcttcatataaatctggtgattttggtgttgtttacttgggcgatgacacgagttatcgtgttgttggagtgggcgatgtcaagttcaagatgtatgatggaaacgaggtgctactttcagatgtgagacacgtgccgggactaaggaagagtttgatttcgcttgggagcctacatgagactggttggttgtatcaggtggattctgatagtaagaccatgaatatcatgaaggacggcaagactgttatgactggtgagaaaacaagctcatgtttgtacaagttacaaaggagtgctgttgcaggtggagtcatggaagatgggtatgctggtgttgctgtgcacgatcctgaaggcggcgagcctggtgtagactcgtcgggcggctcggcgtga

SEQ ID NO: 40418 - DNA, 430 bp, Oryza sativa
  Clone ID: PAT_MRT4530_43862C.1
catgcactagtaaaagaccgtttgtccacaaagaaaaacttacacaagaagacaattgtacccaatgacacttgcgacatctgcaatgacgaaattgaaacagtttcctttgcccttttgcaaagagtttctgggaaaagattggtgttcaaccgttgattcaagatgttgaatccagtttcatcagcccaagccaggccttcgaatgccgattctacactatcaggttttctatctcctttgtttctgggcattgtggaatcacagacatgatgttgtctttagaggccaaggtccttccatcacctcatgtctacagcgatgtgtgcgagaagctgctctgtaggctgaaaatctcaagtctgaagctcgctatgtaattcaaatttggaaagaaattttctcttcccccttacaatctattaactct

SEQ ID NO: 40419 - DNA, 1221 bp, Oryza sativa
  Clone ID: PAT_MRT4530_43863C.1
atggcggcaacggtggtttccaaatttgaggtggtgaagttcgatggcaccgggaatttcgttctctggcagatgaggctgaaggatctgttggctcaacagaggatatccaaggctcttgaggagacgatgctggaaaagatggatgctggcaagtgggaggagatgaagacgcaggcagctgcaacaatatgcttgagtctctcggattctgtcatgtaccaggtcatggatgaaaaaacgccgaaggaaatttgggacaagttggcaagcctgtatatgtccaagtcgctgacaagtaagttgtatctcaaacaacagttgtatggtttgcagatgcaagaggagtcagatcttaggaagcatgtggacgtcttcaatcaattggttgtggatctaagtaagttagatgtgaaactggatgatgaagacaaggccataattcttctgtgctcgcttccaccgtcttatgaacatgtggtgactaccctaacgcacggcaaggatactgtcaaaactgagataatttcgtcgttgcttgcacgagacttgagaagatcaaagaaaaacgaggcaatggaggcttctcaggctgagagtttgctggtcaaggcaaagcatgatcatgaagcgggggtgtcgaagagcaaggagaagggggcacggtgctataaatgtcatgagtttggacatataaggaggaattgtccgttactgaagaagaggaaaggtggcattgcaagtttagcagctcatggtgatgattcagatagcagcagtcatgagattctcacagtgtctaacgagaagtctggagaagcgtggatgttggactcagctagttcctatcacgtgacatcgaagcgggagtggttctcttcatacaaatctgtgggcgatgtcaagttcaagatgtatgatggaaacgaggtgctactttcagatgtgagacacgtgccgggactaaggaagagtttgatttcgcttgggagcctacatgagacaggttggttgtatcaggtggattctaataggaagaccatgaatatcatgaaggacggcaagactgttatgactggtgagaggacaagctcatgtttgtacaagttacaaggaactgctgttgtaggtggagtcatggaagatgggcatgctggtgttgctgtgcacgatcctgaaggcggcgagtctagcgtaggctcgtcaggcggcttggcgtga

SEQ ID NO: 40420 - DNA, 1523 bp, Oryza sativa
  unsure (1)..(1523): unsure at all n locations
  Clone ID: PAT_MRT4530_43864C.1
ggcagagaatatcgacactcatgaacaaaactgaaccaagcacttgattgggtcacagtgcccttgaattgtctttgcaggaatgtcgacagatacaaaaggatctcttctgagatcaaattagtccaaaatgcaggaacagcttactcaggacatcttcactagttacatttattgcggaaaaaacacaccatcagatatctgcataatttggccaaaacagaaggtggggggaaaatggcagacgcctctcagattgactatctagtttatgcaagcgctggggtaggggtgcaaccagtggcaggagcaacttcagaggtcttctgtgcagaactgtacttctttgtgatgaacctgaagaaatctctccatagcaattcgaacattaaccaatttgtaccagcatcagatgtgccatcaccattcttgggtgttgatcccgatggaattgctcttgaagcatgcttcttcaactcctcatacatgaagcgcggtgagaggcaacctgtagcaagccatggtgaaattttgcaggagaaattagcaccatatatgctatctcgagtgctgtccttgtcccctttgtttggctgcatacaacattctgaagcaaacttcttcaacctctccagagcttcagcttcaccaccaatgagagtagaaccaacagcagcttttgagccatgtgccatggccggtggcgcggtgaggccgagctcggcaagcgtggggatctcaccgggctcaagcacattcttcatgggaacacacttgacctcctccggcgcgtcgagaaccttcctgacatccaaccccttcacagcctccctgaatccaccgtagttggacggcatgtcctcgaggcggaagggcaggtcatccaggtggtacagcgtgctgccccagaagtacttgacctcgattccctccttctcaacggccttgctcaccttctcctcggcgcggcactcgtcgcgcgacacctcgccgtgcgcgaacacggcctccgcaccggcggcgcgcgcgagctcggggatcaccacctcgggcttgccgaagtcgcgcgggtcgaagacgatgaccgggagcagcgacgacgacccccgacgcgcngtgaaggcttcgtgtcgtgaggcgagttcgcgcgggaaccacacgagcgtgcggcgccgcccgccgnccgcgggcgcgcccgaagggaaggagcgggagaggcccggcgtggaggccgggagcggggcgaggagcgacgacgcggcggcggcggcgttgaggcggcggcgggaggagggtgacgcggaggcggaggcggaggggtggaggcagacggcgagcgtggagatttgggtggggaggtggatggtggaagggacggaggcgagcgccgccggggagggggaggcgggggtgcggagggagagggagagcgagaaggaggcgaatgcggggagggtggggtcgtcgtggtggcgagcggcggcggcggcgggggagtcggagtcggaggcggcggcggccat

SEQ ID NO: 40421 - DNA, 424 bp, Oryza sativa
  unsure (1)..(424): unsure at all n locations
  Clone ID: PAT_MRT4530_43865C.1
atggtttcaacactttcacctgatgacctgacgtgcactgttggaacctcgctctgtgttttttttagccgttgagnaagccaagttcaaggctgtggttcgtctcaggcctgggagctgctgagattcatatgttttagaattttgcgcaggcttaggctccaagtatattctatgatattttcacccagcccagccctcccaccacagtattttgaggctcgaataatatttgtaccacataaaagtttactaaagggnttctgtaatcatgctgtttgttttctactatgtgaaagcattgttcattntcatccttgaaagagtaaatatttgagggatatgtgtaaaaatcatacaantaccatttccttcccactcacttggcagcttttnaaagcaggagttcaacttaaactatctt

SEQ ID NO: 40422 - DNA, 1125 bp, Oryza sativa
  Clone ID: PAT_MRT4530_43866C.1
atggcggcgacggtggtttccaaatttgaggtggtgaagttcgatggcactaggaatttcgttctctcgcagatgaggctgaaggatctgttggctcagcaggggatatccaaggctcttgaggagacgatgccggaaaagatggatgatgacaagtgggatgagatgaaggcgcaggcagctgcaacaatacgtttgaggctctcggattttgtcatgtaccaggtcatggatgaaaaatcaccaaaggaaatttgggacaagttggcaagcttgtatatgtccaagtcgctgacgagtaagttgtatctcaaacaacagctgtatggtactatgtgggttgtggatctaagcaagttagatgtgaaactggatgataaagacaaggccataattcttctgtgctcgcttccaccgtcttatgaacatgtggtgactaccctgacacacggcaagggtactgtcaaaactgaggagataatttcgtcgttgcttgcacgagacttgagaagatcaaagaaaaatgaggcaacggaggcttctcaggctgagagtttgctagtcaaggcaaagcatgatcatgaaacgagggtgccgaagagcaaggagaaggggcacgatagcaacagtcatgagattctcacagtgtctaacgagaagtctggagaagcgtggatgttggactcagctagttcctatcatgtgacatcaaagcgggagtggttctcttcatacaaatctggtgattttggtgttgtttacttgggcaatgacacgagttatcgtgttgttggagtgggtgatgtcaagttcaagatgtatgatggaaacgaagtgctactttcaaatgtgagacacgtgccgggactaaggaagagtttgattacgcttgggagcctacatgagacaggttggttgtatcaggtggattctaataggaagatcatgaatatcatgaaggacgacaagactattatgactggtgagaggacaagctcatgtttgtacaagttacaagagagtgctgttgcaggtggagtcatggaagatgggtatgctggtattgctatgcacaatcctgaaggcggcgagcctagcgtaggctcatcgggcggctcggcgtga

SEQ ID NO: 40423 - DNA, 884 bp, Oryza sativa
  Clone ID: PAT_MRT4530_43867C.1
ttggcatccaaccccttcacagcctccttgaatccaccgtagttggacggcatgtcctcgaggcgaaagggcaggtcatccaggtggtacagcgtgctgccccaaaagtactggacctcgattccctccttctcaacggccttgctcaccttctcctcggcgcggcactcgtcgcgcgacacctcgccgtgcgcgaacacggcctccgcaccggcggcgcgcgcgagctcggggatcaccacctcgggcctccccacgcgcaccaccaggtcgccgccgcgcgcgcggaggccccggcgcaggtcggcgacggagtccagcaggaagcctgcgcggtagggccccgtgcggtcgaagcccgagggggacttgccgaagtcgcgcgggtcgaagacgaagaccgggagcagcgacgacgacgccccgacggcggcgtggaggggctcgtggtcgtggaggcggaggtcggcgcggaaccacacgagcgtgcggcgccgcccggccgccgcgggcgcgcccgaagggaaggagcgggcggacgcccggcgtggaggccgggagcggggcgaggagcgacgacgcggcggcggcggcgttgaggcggcggcgggaggagggtgacgcggaggcggaggcggaggggtggaggcagacggcgagcgtggagatttgggtggggaggtggatggtggaagggacggaggcgagcgccgccggggagggggaggcgggggtgcggagggagagggagagcgagaaggaggcgaatgcgggcagggtggggtcgtcgtggtggcgagcggcggcggcggcggggtagtcgacgccggaggcgtttcaaaccctgcctggcggttggtgggagtgatggtgatgagcaatgg

SEQ ID NO: 40424 - DNA, 378 bp, Oryza sativa
  Clone ID: PAT_MRT4530_43868C.1
aaaaaaaaaagggaaataacgggcaaaaaagccatttttttacattttttttaccccaaaaaaaacaaaaacccgggctggggggcccaaaaatgggtaacaacaaagcccaaacccttatatcccacagggcaaaaaccaaccctcccgccaaaaagggaaaaagaacccccccggaaaagacccccccccccaaggggggttttttggaaggtaggacggggccccaaaacccgggggatgggggcccccaccgggaggaaaaggggggggaaatgggaaacccccccgggggggaacccctgggggcagccttgggggctttaggaccccccaaaaccttccaaaaatttaggggcccatctgggggaccaaaag

SEQ ID NO: 40425 - DNA, 1875 bp, Oryza sativa
  Clone ID: PAT_MRT4530_43869C.1
atggcggcgacggtggtttccaaatttgaggtggtgaagttcgatggcaccgggaatttcgttctctggcagatgaggctgaaggatctgttggctcaacaggggatatccaaggctcttgaggagacgatgccggaaaagatggatgctggcaagtgggaggagatgaaggcgcaggcagctgcaacaatacgcttgagtctctcggattctgtcatgtatcaggtcatggatgaaaaatcactgaaggaaatttgggacaagttggcaagcctgtatatgtccaagtcgctgatgagtaagttgtatctcaaacaacagctatatggtttacagatgcaagaggagtcagatcttaggaagcacgtggacgtcttcaatcagttggttgtggatctaagtaagttagatgtgaaactggatgatgaagacaaggccataattcttctgtgctcgcttccaccgtcttatgaacatgtggtgactaccctgacgcacggcaaggatactgtcaaaactgatgagataatttcgtcgttgcttgcacgagacttgagaagatcaaagaaaaacgaggcaatggaggcttctcaggctgagagtttgctggtcagggcaaagcatgatcatgaagcgggggtgtcaaagagcaaggagaagagggcacggtgctataagtgtcatgagtttggacatataaggaggaattgcctgttactgaagaagaggaaaggtggcattgcaagtttagcagctcgtggtgatgattcagatagcagcagtcatgagattctcacagtgtctaacgagaagtctggagaagcgtggatgttggacttagctagttcctatcatgtgacatcgaagcgggagtggttctcttcatacaaatctggtgattttggtgttgtttacttaggcgatgacacgagttatcgtgttgttggagtgggcgatgtcaagttcaagatgtatgatggaaacgaggtggattctaataggaagaccatgaatatcatgaaggacggcaagactgttatgactggtgagaggacaagttcatgtttgtacaagttacaagggagtgctgttgcaggtggagtcatggaagatgggtatgctggtgttgttgtgcacgatcctgaaggcggcaagcctggcgagcgcgatggtgtagacgtggctggactagctgtcggtgaggaggtgggagccgtgttgcgccatgaccgcgtggggacaggcagcgaccgcgtgggcgcccgcaacaggaggatggagcaggcacccgaattgggcttgcgtggagctagggcgtgcgcccatggtgagcacctcgcacccaaactgaggcacgcggtaccttctctcgcgaggcccggtagcggctgcttttccgcactgtggagctcgtgccctcgcgcctcccgtgcccttgcgccggcaactaatctacacaaatcgcggcaacaaaagcggcaacaaatcgggcggcgcggtcgacggcgaggcgaggcgcacgacggcggcatccccgacgtgccgccgcagcatgggaggcgaggaggtgcgacggcgtgggaggaaccgctggccgcaagcaccatcgtctcagccttctggatccaccgccgcgtccccaacctccttcgccgcgtccccagcctacttcgctgccgccgccgtgaggagaggggagaggagaggccaccggcggggagaagggagaagccgccggcggggagaggggagaggagaggccaccggcggggagaaaggagaagccgccggcggggagaggggaaatgcagtgtcgtcgaggagaggaggggacagccggtggagttggaagagggtgaggggcgtggtgactga

SEQ ID NO: 40426 - DNA, 1170 bp, Oryza sativa
  Clone ID: PAT_MRT4530_4386C.1
ttacagtgacagcttgtacagtagttcagagctgcatcggctgaagagcatacattttcgtgaaaccgtgaatgaatcgagggatgcaggcttagcactccaccggctaaaaaatggagccttcctgagaagctcaagtgtctgctggtattcatgagccatatccttgatttgacggtaggacatttcctcgcgatggaactttttgactaatggatgttcaatcaacacaaaggcttctagcaaccttctcttgcagagcaatgactcagtggatggtgagcatgctgcctttgaagatgtaccctgttttctcccagttgttcctaagacaacttcatgaaaaccggatttgttccagcatatcgagtacccgcatgtcaaaggttgcaaatctccagaagtctgttgaaactcttttggagggataggtgcctcataaaatagtggcttgttcaatttaaaaggcaacagcagtttgctggatagagaggacagtcgagcatcgagaactttcttgatattattttcaacagaaaacccatcagaagcaccagtaggtgattgtccaatagtaatggtggacaggtacaagggctcaagaatgtgagacagtaatgcaccttgaattccaacaacactccagcgagttattttgtcaaaacaactcattgataatgtagtgtcaccacgcccaggcttcctttgaacaaacccaacatcatcgcatccattaacactatccagctgttccctgagcaactctgagggagatggtggaacaggcatgactccaccggaagcaaccaaccaatcggaagcgccgctccggccgatctcggtgtagatgaggcggaggagcgcgcggcgtgcgacgacctcggcatgcgcgtcgtggacgaggtctccgtggtggttgaggcgagcggcgccgagacacttggttccggtggccagcgagagaacagtgagattccgggggtcctgctgcggagtggagaggaggaaggcggcgaggacggtggactcccgcccctgcggcttgcccttctttgggagagagttgtagtgttggagaacagtcgaggaggtggattccgcccaggagacgtcgtcccatggcgacggcggcggcgccggcggcgaggaggcggcggaggaggggagcat

SEQ ID NO: 40427 - DNA, 2780 bp, Oryza sativa
  unsure (1)..(2780): unsure at all n locations
  Clone ID: PAT_MRT4530_43870C.1
ttaatttggattcaaacttccttcttcaaatatcttccaaaattcaaaaataacttctatttgcttttgggccaaaattcccttttcttcttctatcggcccatctccctcttggcccaggacggcccagccaacccttccagctgagccgcccctctcctttctgtgggcaccgatgccaggtgccctaggcgggataagttcactttgggtctctctatttgtcgcccagtccgattttcgtcccttggtcgcaaaaccgggtacaactggtttttgctgacgtggcgtcgacgtggcttctttgactaggtcttcgtcatacatggcattaacgtggcgcttacgtggtaatttgatcccgcccgccgcaccccgctcctctcccgctgtcagccgcccgccgcactccccctcctctcccgccgtcagccacccgccgcaccctgcttctctcccaccggcatcgttgaagcatacagagccacagaggtagatgaggttgaagaagtgggacccgctgacatgtgggtcccttcctctgccgctgccaacgtccttccgtcgccgccttcctctctcccagccaccaccctccccgggtgcgcgttgctcgggaacacgttccgccaccgacgtcgccgtcccccatccactggagcaccggcgtccctctctccctctcctctcgtttactcggctattagccactaaaatgccgccgattggaactttacgtcttccatggggacgtttgcggtctattggccctgacgtcgaaccgttggttgtaaagcctgacaaaacccaaaccaaaggtcgaagtgctgctcctggcaccctacgcctcgccgcgtacaacgtggtttttcttaagtcctcgcgcaggaggcaaatttatgccgcgaagggcaactgtgatatttaccgaggcgcaggaaaagaaaggaaatggagggatcgtacctacattgctgtgaagatgaataatgcgtacgttgtggaggcgtacggtagggatgaaaaccgatcgaatacggacttcgaagccgatgctgactctaagccgatgactacttcgggctttccaaattccactgttaacagtcatatgcaagaggagtcagatcttaggaagcacgtggacgtcttcaatcagttggttgtggatctaagtaagttagatgtgaaactggatgatgaagacaaggccataattcttctgtgctcgcttccaccgtcgtatgaacatgtggtgactaccctgatgcacggcaaggatactatcaaaactgaggagataatttcgtcgttgcttgcacgagacttgagaagatcaaagaaaaacgaggcaatggaggcttctcaggctgagagtttgctggtcaaggcaaagcatgatcatgaagcgggggtgttgaagagcaaggagaagggggcacggtgctataagtgtcatgagtttggacatataaggaggaattgtccgttactgaagaagaggaaagatggcattgcaagtttagcagctcgtggtgatgattcagatagcagtagtcatgagattcttacagtgtctaacgagaagtctggagaagcgtggatgttggactcagctagttcctatcacgtggattctgataggaagaccatgaatatcatgaaggacggcaagactgttatgattggtgagaggacaagctcatgtttgtacaagttacaagggagtgctgttgcaggtggagtcatggaagatgggtatgctggtgttgctgtgcacgatcctgaaggcggcgagcctggccatagcgagagggagcggctgccggcggcgaccggccgtaagtngttgtaantttgatacgctgtaatatgctggatcgggaggagcgcccataatcagtgccccggagatgtaggcttnggctgaactccgttatcaaatatcgtgcctcggtgttgtaatcatgtttggatntcctatggcgttttttccgcgtttggtttccgatgtcgatttcggggctggttttataacaagtggtatcagagcctacgggagatccatggtagaggaagtcgtggaggcgtacatgaagcttggagatggtcagggccgcggcgtagcggatgcggactcggagtccggtcacagcgcgtgcggcacaattgtagaagacgaagccaagtcgaacacgagaagaggcggcgatgcggactctgatttgaagaaatcggaagcaattggcctcatgaagtcagcaaaggagttccatgggattgctttgcaatcgaacaaatcaccaaggcaaaaggagatcggattgggacctcttggcggcggtgatttgggacgacgagcgtcgagtgccgagtcagtgtctgtgatggatgccgaggccgtggaaaagcaacaacacctagacattagcacttcggggagcccttcgatcaattgtggccaagctatcagtgcaaaaggtgcagctcgggaattcagtctacggatgcgaaaaagtgtggatgttggatttattagctcggttcataagatgataaggaagaaagggttttctccatgtctgctaggaagaattcaattcgcttggcaagatgactgtggtgatatgagagaaggtggagcattgttgcgggtggagtcagaaggaagaaattacagggatactggagtatcttgttacgatgagcctggtggaggcttgtcagggcggctcggtgtgagcggcgaaaaaggatcaactcaagtcctggtacactga

SEQ ID NO: 40428 - DNA, 1671 bp, Oryza sativa
  Clone ID: PAT_MRT4530_43871C.1
atggctgctttcaacagggagatgactagacgtggtgctcaggttgatggcggtggaagcgattggcgatccaatcgatgggtcggacacttcgggcgggtggctcggactttccgatgttgtcagagatacgaagaagcccaggaggtcagggtcgcggcggtgtgcgcgtcttgcgtcgaagccgagcagagggcgagattcgtacccgattttcacagaggcggaggtggtttgggcggtgaggtcacgggcggctggaggcgcatccttgcaggcggtgcgtggcggcgtggtactcggcggcgtccgtcggagctcgagcaggagcttgcggcggcggctgcagcggttctcggcgaggaaccggtgcaggtcttcagcggcggcgctccaaggcggtgcggcagcctcttgcggggccagcggctccccaaggtccggcggcgcgacggctcctcgcagatgaggctgaaggatctgttggctcaacaggggatatccaaggctcttgaggagacgatgccggaaaagatggatgctggcaagtgggaggagatgaaggcgcaggcagctgcaacaatacgcttgagtctctcggattctgtcatgtatcaggtcatggatgaaaaatcaccgaaggaaatttgggacaagttggcaagcctgtatatgtccaagtcgctgacgagtaagttgtatctcaaacaacagctgtatggtttgcagatgcaagaggagtcagatcttaggaagcacgtggacgtcttcaatcagttggttgtggatctaagtaagttagatgtgaaactggatgatgaagacaaggccataattcttctgtgctcgcttccaccgtcttatgaacatgtggtgactaccctgacgcacggcaaggatactatcaaaactgaggagataatttcgtcgttgcttgcacgagacttgagaagatcaaagaaaaacgaggcaatggaggcttctcaggctgagagtttgctggtcaaggcaaagcatgatcatgaagcgggggtgtcgaagagcaaggagaagggggcacggtgctataagtgtcatgagtttggacatataaggaggaattgcccgttactgaagaagaggaaaggtggcattgcaagtttagcagctcgtggtgatgattcagatagcagcagtcatgagattctcacagtgtctaacgagaagtctggagaagcgtggatgttggactcagctagttcctatcatgtgacatcgaagcgggagtggttctcttcatacaaatctggtgattttggtgttgtttacttgggcgatgacacgagttatcgtgttgttggagtgggcgatgtcaagttcaagatgtatgatggaaacgaggtgctactttcagatgtgagacacgtgccgggactaaggaagagtttgatttcgcttgggagcctacatgagacgggttggttgtatcaggtggattctgataggaagaccatgaatatcatgaaggacggcaagactgttatgactggtgagaggacaagctcatgtttgtacaagttacaagggagtgctgttgcaggtggagtcatggaagatgggtatgctggtgttgttgtgcacgatcctgaaggcggcaagcctggcgtaggctcgtcgggcggctcggcgtga

SEQ ID NO: 40429 - DNA, 357 bp, Oryza sativa
  Clone ID: PAT_MRT4530_43872C.1
gccgcgcggccccggggggggggggggggggggggcgggggggcggtaatacgcacctcagctatggcgggcgaaattgcgctacctctcggaggcgcggcgcgggcattcttattacaagttcattattattactagaacattgagtatctataatcctaccccagatgaagattattcagcgtagctcgtccccctggtgttgtgtgcatgctacgcttctgctctgatggatgatcttaagcctaggtataaacaatatgaagtacaatcccatgagaatgctaccgcaacaagtgctcaccccatgcgctcacttcgtaagggaacaccatagcgtacaccccatccccttct

SEQ ID NO: 40430 - DNA, 219 bp, Oryza sativa
  Clone ID: PAT_MRT4530_43873C.1
atggatctcgactggagaggggaacggggagacgggacgacagtgagggcgcttcagtcggtgggtggacccaggtggagggtctccgctgtcaccgccacgctcacggcgctcgggccatacaaccggtacccgaactatcaaaactggtgcaaaacaggtccctctgcagttttgaaggctgttttggctgatacggcgcctacgtggctggtttga

SEQ ID NO: 40431 - DNA, 512 bp, Oryza sativa
  Clone ID: PAT_MRT4530_43874C.1
accaggcccctccccatcagtttgtccagcagcctggtggtgtaatgatgggcatggcgtacaatatgagcaccatggctccaccaccgcctccaccgccacagatgatgaacctagcaaggccctcaccttcaacaccccagccaccaatgggtataatgccacagactcagccgccaccgcccgcaccaacgatgcttcagcaacaaatgccgatgaacgtcggaccaccaatgcagttcgcccttcagcagtccggcgcgccgtctttcaggcctttgcagccgcccccggggatgcaattcttccacccccaatctcagtgacatttttggtagtccagctcctgttaaaactgtcgcgttttcggtgttagtattgactggtagacaaaaggttctgactgttgtagggtatactgtttggttgttctttacctggagatgttgtaccaaaaaaaaaaaaaaaaaaaaaaaaaaaaaaggggggggcctcgtgccgaattcctgcag

SEQ ID NO: 40432 - DNA, 1388 bp, Oryza sativa
  Clone ID: PAT_MRT4530_43875C.1
acattcattagcatatataatgttctattcaagctagcacaatccatgtaaacacacacactttatttatttatgtacgatctacttattacgtaactatgcgtgcacacacatgctgcagtatattcctttatttatttaattacacacatttagtatcatttaaactatacatataacgagtaattaaccgactatttgtatgtacagtgcatgggctagcttaatagcagaggcttagtataaagcagcatcagcaataacagaggcggctctggcggcggcagagaaagtgctggtcttggttttggtggggtaaatgccgtacatggcaatgccacacagccccttattgccacccacatcacgcttcatccggatgtaaccactctcgccccaggttgtgttccacgagttcttgacgatccaatacttagtgttgttcagtgtcacaccataccctaccgccaacacggcatggtttattcttgtcccgcacggtccactgtacacacccccctttaggattgccacccagtattcttggcgtcgacggccacagagacgggctgtatgtagaccctctccttgagagcggcctcgttgtcgaggggcaactgcctgatgcagtccaatgtgaccgcctgcctgcctggctccgtcctgcagggcaacttctcggcttcgtagggcgggtagtagggccccggacagctcgcgtccaaggcgatcccgttgttcaccacgtactgcatcgctctttctgccctcccgccattgatgcagtcgtcgttcgggttggtgcagtccagcaactgctgctccgacagcctcagcaggttccctgtcgcgatcgcgttcaccccctccaccgcccccaccgccgagaacgcccagcaactcccgcaacttccttgatccttgactggagtgacagctccgtggtctctccaatcccacaccggtggcgcgtcgccgaccagtactggctgctcgtcaggagcggaagtcacgacggcggcgccagcgtctacctggacaccggtgtacttagcggcgaactcctccaccgtcatgtcggagaacttgttgaggccgagcttgtagctcatgccttccttcttgttgaactcgtggatgtgcctcgcgttcgccttgaacacctcgaacctactcttcttatcctcggcaaggtcacgcgacgagacgccataaacgtggctccacctctcgtacagactccacatgctctcctctgattttaggtcttcgtccgtaattgggacgtcatgagccgacgctgccaccatcaaagccaacaccaagaataaacataactacaatagcccaataaccaattttatcctaggttaaaaagcagagaaaat

SEQ ID NO: 40433 - DNA, 263 bp, Oryza sativa
  unsure (1)..(263): unsure at all n locations
  Clone ID: PAT_MRT4530_43876C.1
gagggggcaggcacgggncanacacaccagattattccattccacatccctcctccatatgcatacagaagacatccgcagtgggtcacacacacccaatcaatcaccattcaccacacccaagtgnttcaatccccacaccatgcacacgcatgcatggtcacagtatcccatccgggcgtggacacacagttgtggtcaccaccattttctaatcctagcgtttcgctgttctatagtgcaccccgcagcattgtcaggcg

SEQ ID NO: 40434 - DNA, 303 bp, Oryza sativa
  unsure (1)..(303): unsure at all n locations
  Clone ID: PAT_MRT4530_43877C.1
ggacnntcncnctangnctcctggcgtncaccntgntgcncttcctcctccncttctccaccggcgggctcgccaccggaaccttcggcctnaccggcgtctccttttggaaggccctggtgctgganatcntaatnaccttnggcctcgtctacaccgtgtacgccaccgccgttaaccccaanaagggcagcctcggcaccatcgcccccatcgccatcggcttcatcatcggcgcgaacatcctcntcggcggcgcgttcaacggcgnctccatnaacccggccgtttccttcggcccgg

SEQ ID NO: 40435 - DNA, 1102 bp, Oryza sativa
  Clone ID: PAT_MRT4530_43878C.1
tgcaggaattcggcacgaggcagtgagctgagcctgagcccccgctacatgcccgtgcttccgcctgtaaaataacgacatatagtatgtgcctgcctgcccctcgccatccccatttcctccaccttcctactacagctgctttccgatggatcacagcggcagcgtcagcgccggcggcaagatgatggtgaaggcggcggcggcggcggagtcggcttctaccaacgaacgcacccagagcttcagcggctgcaattcagagaaattttaccatatcgaaagccctcataagaaaaggaagtctcagtatgagctgagtgatactagggtttcatcactgaagtacaagtttcggaacggattagcttggcaggaagatgaatcttcaagaacagaaagcttaggatgcaacagtattttcgtcaacaggaactatgacatggatatggtgaacagagttgaagaattggagtcctgtgacaacacccaaagccttattggtgggtgcattgaagtggactctataaacggaatcgagagccacaaaatgctgaaggtccaggcattttcatccagcagctcaagcaacaacatttcatctgatgccttcacttcttcccgtagtaatggcaccaaagatactgacagttgggatatgcagcacctggagtatgatcaccctggtctaatgctgctaccatatgatgatgacatagaggaggcatacgatgtactaggacaatatgatgttgtaatgaaaaatgatctagcgagtggtgatgttgatggttctgctgctggtgtcatagatgagaagctttactcgaatggaatagaagatttactcatattgccaagaggccagaatagcattcatgtgagaaccttcggcataggttggggaagaggacctgcttggcgagaggaggacgcggttgctggcgacgagccccgcgcgatgagctcccgcgacgtcgaggacctcgtctacgtcgcgtcgcggccgcgcgagccggtggcgagggatatatcgacgaagagaggaggggcgtcggtggccggagccagggaacagagtgacgtcggtggtcggagctag

SEQ ID NO: 40436 - DNA, 3011 bp, Oryza sativa
  Clone ID: PAT_MRT4530_43879C.1
gcagagtggcacggttgagaaagaacaatagagcagagagcatggagaagaagaaggtgatggagaagaagaaggtggatgcggtggtggccgccgcccggccgttcctccgcggcgacctctctcaggtggaccccgagctgccctccctggtgtccgtgctctgcgatgccggcgccggcgagtgctaccacaagcacggcaccttcctcgcccacctcatcgacgtctaccgcatcctccgcctctggggcgcccccgacgccgtggcgcgctgcggcctctaccactccgcctactccaactcctacgtcaacctcgccatcttccagcccgacgtcgcccgggaccacgtccggggcatcatcggcgccgccgccgagcgcctcgtccacctcttctgcgtcgtgccgcgccaccagctaatgcacgacgacctccacctccgctacaccgacgcagagctgacggcgcacctggccgcgtcgcaggcgtccctggacgccgccaggaagagcggcggcggcggcggcgaccccggcgaggcgtggcgcgcgaagctggcgtcggtggtgcccccggagggcgtggtggcgaggcacatccggacgggggaggcggtggcgctgtcgcggagggtgttgggcgtcttcatcgtgatgaccatcgcggacttcagcgaccagtacacggactaccaggacaagctgttcgacaacgaggacgggcggctggagtaccgcggcgacaactggcgcgcggtgtggccgggcagcggcaagcccgggctgtggatgagcgccatgtccaggctggcggcggtgtaccgcctcatcgccacggacgaggagatccgcgagctgacagctggagagaggagcgtcgtgaagagggaggacgcggagctggagctggtgatcccgccggtgttcgagcggtgcagcaaggtgctggacgcggcggagcagaaggaaggccgggatctgtactgggaggcggtgtgcggggagtgggaggaggggaagacggagaggctgctgcggcggagcatcgagaagaacccgttcgtgggggagccgtggctggtgctggcacaggcgctgctcaactccgggcacgacgaggaggcggaggcggcggcggaggaggggcagtacgatgcctacattcactggttttactactttcatagaggtcctgctcctcttgcatcccttgctgatgctgcctccacgtgtttggagaaggagaacagcatgacgctcttatggagaactgtaaaagcctttagttatattcaaggctccatagtgggtgagtgcattgttgaatggatgcgtaccgtgattaaagaaaaaggtgaaatagaacatccatttggcatcgatgctgctaagtgcattgctaaggaggctgagttgatttctgaatggctgaggcatgggcgccgtatgcttaccgatgatgagtacaccttgtgccatgaaatccgggctgttgcttgtaaactttttgttatccgtggggagtggactgttgatattgcttctgcccttctgggtatcagaaaggaggctgagtggttgattgagaacttgaagcgttttcctgttgaatccattagtacctccatgaagattcgacaatttgccttggattttgtgtgggaaaagattggtgagtatgcatcatataagaataaggagagcagtgaaagtgaaatggcttctgaaagtgatgccgatgtcactgaaagcaatgataacgactatatgtggtggagggtgaactcttgcaaatatccaatattatcacgcatggcacttgatttgcttgctgtccctgcatcctcagttgcatcagagtctgcattttctactggatcaagaatcattagcgactataggagtaggttggctagtggaactgtggaggcattggtttgccttcaagattggatgcgagccgatggttttggtgatccatattcaattctaactgatacggctgagggcgatgatgttaatatgcaactattaggtagtttggacctctctttttctgggggtcagattcacttctattctgttagattgcttttaaattcaatccaagatgttctggcactggcaatgacattaaatcatttgacatctcaggcaaattaccatcagtacaatgcctaccttcactggttttactactttcatacaagtcttgctcctcttgcatctcttgttgatgctgcctccatgtgtttggagaaggagaggagcatggtgctcttgtggaaaaatgcaagagcttgtacttatattcgtgattgcttagtgggtgaatgcattgtgaaatggatgcgtaccgcgattaacggtatcagaaaggaggctgagtggttgattgagaacttgaagcgtaataatgttgaatccattagtacctccatgaagattcggcaatttgccttagattttttgtgtgagaagtatgttgagtatggatcatttaaaaagcaggagagcagtgaaagtgaaatggcctctgagagtgatgaagatgtcgttgaagaacacacctactatgtgggtgacctacatgatgaagactacttgaaacttagaaagaagaagactacttgaggaggcaagtgcccgcaccgcaaggtcaagaagcgccgcctctcgcacaagacggcccgccgaggcaagttcctcgtcaaggccgacgacgccgtctacgacgagctggtcaagctcgccgacgccggcaaggacgccgacgctacccagctccccgtcgacgaggacctccccggtatgggacagttctactgcctccactgcgatcgctactttgcaagtgagagtgtcaaggaggagcactaccgctcaaagcgccacaagaaaaggatcaagcaaatgtcagggccagccccacatactcaacttgatgcagagcttgctgctggaatggggatgcctgacaatggcctgaagctcatgtccatgtga

SEQ ID NO: 40437 - DNA, 1278 bp, Oryza sativa
  Clone ID: PAT_MRT4530_4387C.1
agttatccatatcttaacctaataacgccaaaagttttgtaggtttgttacagtgacagcttgtacagtagttcagagctgcatcggctgaagagcatacattttcgtgaaaccgtgaatgaatcgagggatacaggcttagcgctccactggctaaaaaatggagccttcctaagaagctcaagtgtctgctggtattcatgagccatatccttcatttgacggtaggacatttcctcgcaatggaactttttgattaatggatgttcaattgacacaaaggcttctagcaaccttctcttgcagagcaatgactcagtggatggtgagcatgctgcctttgaagatgtaccctgttttctcccagttgttcctaagacaacttcatgaaaaccagatttgttccagcatatcgagtacccgcatgtcaaaggttgcaaatctccagaagtctgttgaaactcttttggagggataggtgcctcaaaaaatagtggcttgttcaattaaaaagccaacagcagtttgctgaatagagaggacagtcgagcatcgagatctttcttgatatattttcaacagaaaacccatcagaagcaccagtaggtgattgtccaatagtaatggtggacaggtacaagggctcaagaatgtgagacagtaatgcaccttgaattccaacaacactccagcgagttattttgtcaaaacaactcattgataatgtagtgtcaccacgcccaggcttcctttgaacaaacccaacatcatcgcatccattaacactatccagctgttccctgagcaactctgagggagatggtggaacaggcatgactccacatggaatctgggtgatgtagagatgaaggtggtacccatccctcaacttccacttctcaccggaagcaaccaaccaatcggaagcgccgctccggccgatctcggtgtagatgaggcggaggagcgcgcggcgtgcgacgacctcggcatgcgcgtcgtggacgaggtctccgtggtggttgaggcgagcggcgccgagacacttggttccggtggccagcgagagaacagtgagattccgggggtcctgctgcggagtggagaggaggaaggcggcgaggacggtggactcccgcccctgcggcttgcccttctttgggagagagttgtagtgttggagaacagtcgaggaggtggattccgcccaggagacgtcgtcccatggcgacggcggcggcgccggcggcgaggaggcggcggaggaggggagcatcg

SEQ ID NO: 40438 - DNA, 1665 bp, Oryza sativa
  Clone ID: PAT_MRT4530_43880C.1
atggagtccaagggtggcaaaaagaagtctagcagtagtcgttcctccctgatgtacgaagctcccctcggctacagcattgaggacctccgacctgccggcggcatcaagaagttccgctctgctgcttactccaacctgcttcccagtgaccgggaaggtcatcagtcctgcttcctttcttcctcatctctggcatcgtccttcgaaacaatggcagtcctgtcagttgctgactctccaccggtctcggcgatcgggtttgagggatatgagaaacgcctcgagatcactttctccgaggcgcctgtctttgctgaccccaatggcagggggttgcgtgcactgtcacgtgctcagattgactctgttcttgatctggcgaggtgcaccattgtgtctgagctctccaatgaggtcttcgactcgtatgtcctttctgaatcgagcctctttgtgtacccatacaagattgtgatcaagacctgtgggactaccaagctcctgctcgccattccgaggattcttgagcttgctgaagagctatctctgccacttgaagctgtgaagtactctcgtgggacattcatttttcctgaagcacagccctctccacacaagaacttctctgaggaggttgcagtcctgaaccgctacttcggcggtctcaaatctggtggcaacgcatacgtgattggagatcctgcaaagccagggcagaagtggcatgtctactatgccacccagcacccggagcaacctgtggtcactcttgagatgtgcatgactgggctggacaagaagaaagcttctgtcttcttcaagacttctgctgatggacacacaacatatgctaaggaaatgaccaagctctcaggtatctctgacatcatcccagagatggaagtctgcgacttcgatttcgagccctgcggctactccatgaatgccatccacggccctgctttctcaaccattcatgtgactcctgaggatggcttcagctatgccagctacgaggtcatgggcttcaaccctgcttcccttgcctatggtgaccttgtcaagagggtgttgagatgctttggcccgttggagttctctgttgcggttaccatctttggtggccgcaaccatgcagggacctgggccaaggggctggatgtcggggcctattcttgcagcaacatggttgagcaggagctgccttctgggggtttgctcatttaccagagcttcactgctactgctgaaatcgccaccgggtcgccacgatctgttctgcattgctttgctgatgaaaacacggagaaagctggtaaaatggaggctctctactgggaagacgatgctgtcgaggagatagatggcacagagggcaatgaattgagcactttgtacgctgatttgattctgtgtacgaacactacggcaattggcaaatatgacttctgttctgcacctatcactgttctgcacctatcagtgacccaagtggttctgcaacagggactgagacagggagttttggtggtggtggggaggagcaatgcaaaagaatcgtcgttcaaaaatcaatttcatatgagaagcgacttcagctattgccacttcatggcaaagcgggcagggatgcagcagcagcagcagcagcagcttcagtaa

SEQ ID NO: 40439 - DNA, 2047 bp, Oryza sativa
  Clone ID: PAT_MRT4530_43881C.1
gcacgagggtccgcgggagccacgccttcgggttggtttcgttttggtattcccatacactttgtttctcttccccgtctcgtggtcgagagaaaccgagaggagagagagggagaggagcgctgccgattttccggagggggagatctttttcttctccctgaaggttcgagatcgatctgcgacgaggaggagcggggaatcgtaactttatttccgaggaaatttcaacaaattgatgcactaatggagtccaagggtggcaaaaagaagtctagcagtagtcgttcctccctgatgtacgaagctcccctcggctacagcattgaggacctccgacctgccggcggcatcaagaagttccgctctgctgcttactccaactgcgcgaggaagccctcttgatagcccccttggctaccttgacctagtagtttagttactcctctgaattctcgttttgggctttcttacatctctctggctagctgcttcccagtgaccgggaaggtcatcagtcctgcttcctttcttcctcatctctggcatcgtccttcgaaacaatggcagtcctgtcagttgctgactctccaccggtctcggcgatcgggtttgagggatatgagaaacgcctcgagatcactttctccgaggcgcctgtctttgctgaccccaatggcagggggttgcgtgcactgtcacgtgctcagattgactctgttcttgatctggcgaggtgcaccattgtgtctgagctctccaatgaggtcttcgactcgtatgtcctttctgaatcgagcctctttgtgtacccatacaagattgtgatcaagacctgtgggactaccaagctcctgctcgccattccgaggattcttgagcttgctgaagagctatctctgccacttgaagctgtgaagtactctcgtgggacattcatttttcctgaagcacagccctctccacacaagaacttctctgaggaggttgcagtcctgaaccgctacttcggcggtctcaaatctggtggcaacgcatacgtgattggagatcctgcaaagccagggcagaagtggcatgtctactatgccacccagcacccggagcaacctgtggtcactcttgagatgtgcatgactgggctggacaagaagaaagcttctgtcttcttcaagacttctgctgatggacacacaacatatgctaaggaaatgaccaagctctcaggtatctctgacatcatcccagagatggaagtctgcgacttcgatttcgagccctgcggctactccatgaatgccatccacggccctgctttctcaaccattcatgtgactcctgaggatggcttcagctatgccagctacgaggtcatgggcttcaaccctgcttcccttgcctatggtgaccttgtcaagagggtgttgagatgctttggcccgttggagttctctgttgcggttaccatctttggtggccgcaaccatgcagggacctgggccaaggggctggatgtcggggcctattcttgcagcaacatggttgagcaggagctgccttctgggggtttgctcatttaccagagcttcactgctactgctgaaatcgccaccgggtcgccacgatctgttctgcattgctttgctgatgaaaacacggagaaagctggtaaaatggaggctctctactgggaagacgatgctgtcgaggagatagatggcacagagggtaagaagatgaggagctgctgatgagggaagcgcactgaagattaaagaatactcaaaactccagtagcgatcactctgttactttgtgaagcagccagccagactattcatatagtactagtatatgctatgaccaatgttctttattatcttgcatatattctgaataaaagggctctaggtggtctgctttgtctgccacagtgagcaaaatgtatccgaatatcaaactttaatgttgggaatataatacaagtcattttataataaaaaaaaaaaaaaaaaaaaaaaaaaaaaagtacccaccccctccctcc

SEQ ID NO: 40440 - DNA, 970 bp, Oryza sativa
  Clone ID: PAT_MRT4530_43882C.1
atgcggcagcctcacggtccacggtggaccggccgctcagtgcgcccgaaggcgggccacgtcggcgcggccggcgggaggcggcgcgcccgcgctcctatggtcaccggcggcggccatgggcacatcggagcggcggccgagagaggggtgggaaagggggaaacgaggcggcggtccacggctcaccataggtcgacggtgacgacgaaaaggcagccggagcggaggaaggcggcggcgcggctcgggtcgacggggacggcggcgctccggcgctacgccgcggtcgggagcctggccgacaccgccgaaaaaaagcattggccaagttcgatccgggcaagaagaaaggccgttaaaagtcgcaaccgaccgaagcagttccgggaagggatcaaatcaactggcacgctcacgaacctaaaagcaagattttggacctgcactgaagttaagcagattttccaggccagaactaatctaccatcaactagggttgagtccgaggtcaatgaggcaaacattgtcccaggcagtgcagacaagttatcaccagaacaaaagaaagagtttgaattaatgatgaagaatgctcaggagcaattcatgaaatcgttcgtggcaactcgacagggaaaagttgttcaaaaatacaaggtgaaagtggttgttgccgttgaagttggaacaagctcatctcaaggtagtaagagtgctgcagatggctcgggcgacaaaggtgacgggcttcaggacagtgtggtcgaagatctttacgaagatggtgctgaagtgcaagaagaacctgctaggtgcaccaatttccaagaccaagttgattatgctgtacaacatgctttgatcaaccattctggagtgcttgtcaatccattaccaaatatgatcaaatctgtgattgatggcacgatagctgagcatcaaaccacggggccagtctacttgccag

SEQ ID NO: 40441 - DNA, 163 bp, Oryza sativa
  Clone ID: PAT_MRT4530_43883C.1
gagggcctgtattttttttgggttgaacatacaagaacataaaccgtttccaataaaaccaaaattacactgtgttgcatactgaatgcactactgatccaaatgtttcgggactatacccaccaacacacccaggtatgcctatcggatacccattaagacc

SEQ ID NO: 40442 - DNA, 1177 bp, Oryza sativa
  Clone ID: PAT_MRT4530_43884C.1
aaaccctgatgaaacccttgttgacaatcaaaggtagacaaattcttctgcatcaacactttgcatgccatattattaatctaattgttaaaaaagggtttaagttattaaatgtacacattgaggccattcgttaagcaatcacgttctaaccatcgcaccaatggaaaaggtactgtgtggcatcggatgagcgtgcacgtaagtttatcaccagtacaaaacatcggtggaatgccacttatctaatgttaaagtgtattacattataaggatttgcttattatttttcttcaaacacgtgatgttttgacaagtgatgggcaactgctattgatagacatatacttagtatgttgttgagaggttctttcaatttctttttatctgaacttctaaagtatattatccaacagctaatttaaatttgcataagattcttgaaattgccactttgttcaaagagtatgatagtgatgaacttataggaccagcagtctttagtgtgaaacaaaattatcttaaatattggaaaaacctccccatgttgtatgcttttgcatttattcttgatcctagagggaaatacatcgattcctcaatctttgttcacttattggagaaactaaatatgttgattattccaactattattctgatgttaatactaaatcattttaggtgttccaaaagtatgaattaaagttttagggagtcacattgcaaatacccacacccgcccttgcaacaggtaagaaaaatcatagtgtagcagaatttgtggaggctcatcttccagccatggtggcaatggtagttcaaccaagtgttgacgatagagttgtccaactatttggatagcatcgccatcagacatgaatcgtcgcacttcaatgtacacaggttgtggaataatcacaggatgtcatatcctcttcaaaactagcacgagatgtattgatggtacctgtatctacgatatcctccaaatcggccttcaaacctctacggacaaattattgaggaccgaagaacatgtttgagcaacgaggacgaagaaatactactaagcataaaaggataggagctagctgcagaacatacacaatacactggctgacaaccaggaattggccactcagttcaaaaccttcatttagatcaggaaaaaatagag

SEQ ID NO: 40443 - DNA, 153 bp, Oryza sativa
  Clone ID: PAT_MRT4530_43885C.1
atggacaccctcttttctgaggttttatttatcaaccggtggaatttggcacctaacgcggggctgcatcggttcagtttgatcttcggcgaaggggccaacatagaggagagggataagaagagggcaaaggcggagacaagagaggagtag

SEQ ID NO: 40444 - DNA, 237 bp, Oryza sativa
  Clone ID: PAT_MRT4530_43886C.1
atgtggacattgtcactggccccagcgacgtggaatttcaggcatgtggggcctgagcctgacgtggagcacacgcagacgcagtcggagcatgcggagatcgtcgtgggcggagcagaagatccgcgcgacgcgacgcaacgcgatgcaccgccgccgccgcggggggcggtcaagggcgggttcggacgggtcaacgcgggcggactcgactcggcgcgcgagagcgagacgtag

SEQ ID NO: 40445 - DNA, 216 bp, Oryza sativa
  Clone ID: PAT_MRT4530_43887C.1
atgcatcaaatcactacagtgcatggggagattggggacaaggagcgatggggaatggatgggccagagagcattgcgtcgagaccaggaggagaacgcagcggtgaggtggatggaggcgtcactgccaaccaagggttcgatgtgccgattttggaactggcacctatacggttgagaataggtgcccccaattggttctggataggaatctga

SEQ ID NO: 40446 - DNA, 1230 bp, Oryza sativa
  Clone ID: PAT_MRT4530_43888C.1
atggggcggaagagagcggtgctggtgggcatcaactacgccggcacggagggggagctgaagggctgcctcaacgacgtggcccgcatgcggcgctgcctcgtcgaccgcttcggcttcgacgaggccgacatccgcgtcctcgccgacgccgacccgtccacgccgcagcccacgggtgccaacatccggctcgagctcgagcggctcgtcggcgacgcgcggcccggggacaccctcttcttccactacagtggccacggcttgcagctgccgatcgagaccggcggtgacgacgacgacaccggctacgacgagtgcatcgtgccctgcgacatgaacctgatcaaagaccaagatttcacggagctcgtgcagaaagtcccggatggctgcctgttcaccatggtctccgactcgtgccacagcggcgggctcatcgacaagaccaaggagcagatagggagcagcacgaagcagagcaagatccagcaacgggagagagagttgcgccggcagcaagctccctctcccggcacgtgctcgtgcgcctccctcctgcagatcgcgctgcgccatcttcctcgccgcggtggccaacggatcatcggtagccgcagccgcgatggcgtgggagaggatcaaccaccacgctcgcaggcagagctgctggccgccgacgcgacgcgcgccggcatcaagaaccggtcgctgccgctctcgacgttcgtggagatgctcagggagaggaccgggaaggacgacgtcggcgtgggctcgatccggacgacgctgttccaccacttcggcgacgacgcgagccccaagatcaggcggctcgtgaatgccatgctgggtcgcagacacggcagcgccacggcgagcgaggagcacccggataaagctaagccagagcgcgtcgacggcgagggcgaggcggcggcggcgaagcaaggggcgccggagacgaggccgttgccgcgcaacggcgtgctgatcagcgggtgccaaaccgacgagacctcggcggacgccaccacaccggagggcgtgtcgtacggcgcgctcagcgacgccatccagagcgtcctcgccgaggagcgccgcgggaaggtgaccaacatggagctcgtgcggagagcgcgggagctgctcgccaagcaagggtacactcagcagcctggactttactgccgcgacaagcacgccaacgtggctttcatatgctaa

SEQ ID NO: 40447 - DNA, 472 bp, Oryza sativa
  Clone ID: PAT_MRT4530_43889C.1
atggtgaggaccgggattatgttcagggaaaaacagaggtctagtgcggtcgggataccatgtgagaagatgactaaagtcaggattcttggaggtcaacttcggtcaacggtggggatcgggactagactcagggaggagttgagatccagacggtcaaggataccgggtgacgaagttggatacaagatggcatacggtggatgaatactgtatggatgagatcttcgcaatgggaagggttgaggctagaaggatatcgacttttgagagagaaaaattagggtttacttcgagcggttggaccggaggcaagtctgcagtctaaccactggcggtcacacccgcggcagggagacggttcaaccggcgacaaggcggcggttagaccggctgcgtgcgagtggttcgaccggcggcaatagaactacgtcgagatttccatcgatttgagggtaacttttattttcgg

SEQ ID NO: 40448 - DNA, 1442 bp, Oryza sativa
  Clone ID: PAT_MRT4530_4388C.1
atgaagaatgtgagccgagatgcagatgttcgagccgtcaccaagcaaagcataggaactgatctccaggttgccaccatcgaagtcaccggcttcctccaggcaggggacgaagatggagatgggtatctccttgggctggtgagcttggtgctggatgcggcggcggcggaggtggccggggtcggggtcgggaacggcgtggtggtgaacatgggcgacgaggaggagaaggggagtaggtcgaggcggatgctgatagtagtgacgacaacgcggtcggatggcggggtgcggcagcggcgcaacgccgcgctcgcccatgtcgagaagcaccgcctcttcagcgtcgtccacttcgcccacgcaagcggtgtctacgacgcctatttcttcgatgagatccgccagatcgagcgatgtcatggccgttctccaccgccgggtgcatcgctggcttcatgtgtgtgcgtcgtcgtcgtcgaggggaacgacccggccgccgtcggcagccaggagatcgcggtgccctaccgctatacccgctactcaagcacatgcagcaggcgcaagctagggcatggagatgtcgaggaggacgaagctgaaccgtcttcgcccgttgggcgccaccacattagggcacgagactgggtctctgggagacgcgagacaccgccgcagccgagacgggagacggcggcggtgctactctcgtcttcctcgtcgcccatccatcttcctcaacgagacgacgccgcagcagccatccccaacccccacgtgtgttcggtgcgagcctgctacgctacccgtgctgctgcctccaactctctacccatcactggctccatcggcctgggagactgggagcaggtaacttcgagctgccatggaagagggctgcagttccaattggccggccacaccttgtgccgcagcgacgacggccggtcaattgtttttcctccttcaagatttgtttgttccgtcgccgccatcacctgcaagctaaactgggtgctgtgtgtcggctgccgccgacacgtgagcacagcgtcgccagagatgagtagaacttgaggaaataacgtgagtaggttatacactgaggatggccctccactggagtttgaggcagtattgcctccgttggtgttgacgggaacctccttctcattgtctccaatgttgctgtcgtctccggtgttcgacatgttggcaaagacgatgtagaggaagacgaacaggagcaattgcgcatagcgctcccaaaaacttgatcgtccgcctatccgtgcaagtacgcaagcggacggagttctggaggcacctgctcgtcccgtgcaccgttcaggaccatcaaccgcgtgctcgttaatattatcgtccgttacaaaacgagagagaattcccatcattaaaacagaatcaattaccat

SEQ ID NO: 40449 - DNA, 273 bp, Oryza sativa
  Clone ID: PAT_MRT4530_43890C.1
atggcgaagggcgtggcgtgcggcgaaacctcttcgcccgcagccttgacgccgtaccttattggtactgtggcgaagggtgtgggtgtggcgaaaggtgtccagaggctaggttggcttcgcggcctatggacccccgtttttataacaggaatcaagcatggcctgggtgtggcgaaacttattcgcccccagcccttgacgccgtaccttattggtattgtggcgaagggtgtgggtgtggcgaaaggtctcttcggctacagcccttga

SEQ ID NO: 40450 - DNA, 424 bp, Oryza sativa
  Clone ID: PAT_MRT4530_43891C.1
ggacccccccaaccaaaaaaactttttcccagtttaaaaaaagggtttaattgtttcaagtttaacaatacaacctttacaagttcaaatccctcccaatcaaaacaaaaataacttttcattgtcaggagggacaaaattaaaaaaaaaaaaaccaccttaatttaaagtaggaaaaaaaggggaatcccttgctcaacccccaactggaaaaagggggggcctttaacacctggagggtgtggcggctaacggtagaaggaccgcaacggtcgaaaagggacctcggctcaatggaggtaggaggcgggggcaacaaccaaggcggccaacggttggaggacctcaacaaccggaaagttcggcccaaactagggtaggaggcggggggggtcccaatttgcctggggggggcctcgtccca

SEQ ID NO: 40451 - DNA, 1653 bp, Oryza sativa
  Clone ID: PAT_MRT4530_43892C.1
atggcacccaagtctgccgatatcggtattaaatggcaaaaattcatcgatcgagtcacggagattgatatgcccaagaagcttaatgttttatctgttgatgtgttgcctgttattgaagaacatgattcaaatattggagaggaattagttagtagtaatgctggagctaccatgctagagttttgggccagctatatggtgtcaaagtttggtgggcctgtgtgcctgatattttgcatcatggttaaatctggaggttctaaaagtagtggtggttctcaccatggttctgatgaggaagaggttactatgcctgtgtttgatgctaatttgcttgctggagttaaggatggattggaaagtgcttgtgattattttgataaatgcataaatcaaaaattcacgaagcttgagaggagtattgctatgctagtcgatcgtctgccaccgccacgtcaagcacatgacagacagggtcgacgtccaccacctgaacatcatgagtatgatgccgaggatgagagtcccgggttgcgttctgatggaggtcctgctattatggacagagttgttgttgatgatgttcaccgtgacaaccggaatcgctgtgctactcgtgttccgttggatgaagggcttggttgtggagatccagaggattatctggagtgggagatgtattgtgatcagatctttaatagtcacaactattcagaggataaaaaggtacgtcttgcatctattgaattcaccggttatgctttatcttggtggaatcaattgcaacttaaacaaggtgattttagtgttgatgcttattataaggagatggaattgttaatgagccgtacaggggtaacagagaatgatgaaactactatggctagatttcttaatggtctcaacgatgatgtgaagaacgtgttgagatatcatattattatgatatacaaacgagatggtgatggatgtgccgctagtaagtcagtgtctttcaagccgactactccttttagagatgggtctaaacctgctgctagttcggctatagagatattgatgattcatctatggatgatggtgctgaaaaacaagaatggtttatctatgcttgcacgtgcagtacagcgagatggctctaatgttgatgcaaaagggcaacgctgtaatatttttcagttagagtgcaaaattcaagagaagatgaatcaagcgggcacactgaaaattactcataaggtgagagttgcattttctattggaagctatgttgataaagttgactgtgatgtagtgccgatgaatgcttgtcacttgcttttgggaagaccgtggcagtttgatcttcatgcaactcacgaaggccggactaatcactattcttttatacaccgtggtgttaaacacgtcctgaagccaatgcttgatagtgctatcaagtcaatggtattttctgctgtaaagaacaagaaagaaccgtgtcaaattaatccaaagcagaggacggttttgttccaagggagagaggatgatatgcccaagaagcttaatgttttatctgttgatgtgttacctgttattgaagaacatggttcaaatgttggagaggaattagtagtaatgctggtgctagacacaggaagaagatga

SEQ ID NO: 40452 - DNA, 162 bp, Oryza sativa
  Clone ID: PAT_MRT4530_43894C.1
atggcgacaggggagcccggagtttttcaccctgttgcttgcacggagttgctctgtgagctatgcttggacgtcatcttccccggcatgtttactagtcgttctaggaaagagatgacaaaatatggtgttggaaaaatgaccaacgtgcccctacattaa

SEQ ID NO: 40453 - DNA, 393 bp, Oryza sativa
  Clone ID: PAT_MRT4530_43895C.1
atggcccagggtttcaggctttttaaacctggccgaaaggggcccgaccatctgctgccgcacctgcgccgcttggttttaaggtggctgggcagccgaccatgcatgcctacgcccatcgacacggccttccctaaccttcaggagctcggcatctatagcatcggcatggaaaaggagggccgtgagatcgagttgctcgtggcgacatcaacatccaaggaggagatggggaagaggcggagctggcggagacatgaggtggagcggcaacagcacaacctcaaagtggagtgcggccgccatcacgggagccgccactgctatctcgggcgtcgcaggctgcttcgcccttggctacttcctcaccctcagccggtctactcccgctag

SEQ ID NO: 40454 - DNA, 2664 bp, Oryza sativa
  Clone ID: PAT_MRT4530_43896C.1
atgcaaggaaaaaaagaatcaacagttatggaagcagcaaccaccaacattttctaccgtcccgtcatcttcttctccgtgctcctttgtttccaataccgtgccgccggcgttgcatcggacacgctcagcaatggccgcaacctcactgatggcgacacgctcgtgtcagccaatggctccttcactctggggttcttctcacccggcttgccaagcaggagatacctcgcgatatggttctccgagtcggcggacgccgtctgggtggccaaccgcgacagcccactgaacgacaccgccggcgtagtggttatcgatggcacgggcgggctcgtcctgctcgacggcgccgccggccaggccgcctggtcgtcgaacacgactggctcgtctccatcggtggcggtgcagctgctcgagtctgggaacctcgtcgtgcgcgaccagggcagcggcgacgtgctgtggcagtcgttcgacaacccgtcgaacaccctgatcgccggcatgaggctcggcaggaacccacggaccggcgccgagtggtccctcacgtcgtggcgcgcgcccgacgacccggcgacggggggctgccgccgcgtgatggacacgagagggctagcggactgcgtctcgtggtgcggcgccggcaagaagtaccgcacggggccatggaacgggctgtggttcagcggtgtcccggagatggcatcgtactcgtccatgttcgcgaaccaggtggtggtcaagcccgacgagatcgcctacgtcttcaccgccgccaccgccgcggcccccttctcccgcctcgtgctgagtgaggccggcgtgatccagcgcctcgtgtgggatcccagcagcaaggggtggaacacgttcgcgcaggcgccgcgcgacgtatgcgacgactacgccaagtgcggcgcgttcgggctgtgcaacgtgaacaccgcgtcgacgctcttctgcagctgcatggcggggttcagcccgatgttcccctcccagtggtccatgagggagacctccggtggttgccggaggaacgcgccgctggagtgcggcaacgggagcaccacggacgggttcgtgccggtgcgcggcgtgaagctccccgacacggacaacgccacggtggacacgggcgccacgcttgacgagtgcagggcgaggtgcttcgccaactgttcctgcgtcgcctacgccgccgcggacatccgaggcgccggcggcggcagcggatgcgtgatgtggacgggtgacgtcattgacgttcggtatgtcgacaaagggcaggatctctatttgaggctggcaaagcctgaactagttaacaataagaagaggactgtgataaaagttctgctcccagttacagcagcatgtttgcttctgctgatgagcatgttccttgtgtggttacgcaagtgcagaggcaaacgtcagaataaggttgtccagaaaaggatgctaggatacttgagtgcattaaatgaacttggtgatgaaaatttagaactcccgtttgtcagttttggagacattgctgctgcaacaaataatttttctgacgacaacatgctcggacaaggtggcttcggaaaggtttataagggcatgctgggtgataacaaagaagtggcaattaaaaggcttagcaagggttctggacaaggagtagaagagttcagaaatgaagttgttctaattgccaaattgcagcacaggaacctcgttaaacttcttggctgttgcatacatggagatgagaagctgctaatttatgaatacttgccaaacaaaagcttggaagctttcattttcggtactgttcaaaaacataccatgcgatccaataaacttcactccatgcttactgatagagaaattttattgttcttgaaaaagtatctcaagatacctaaattttacactaaaatttttggtaccttgagatatttagtatctgaagatcctgcaagtaagtatgctcttgattggccaacaaggtttaagataatcaaaggagtagctagaggacttctttatctccaccaagactcaaggttgacaataattcatagagatctcaaatcaagcaacatcttgttggatgtggatatgagccctaagatatctgattttggtatggcaagaatcttcggtggcaaccagcaagaagccaatactaaccgagttgttggaacatatggttacatgtctcctgaatatgcaatggatggcgccttttcagtcaagtccgacacatatagctatggtgttatactcttggagattgtaagtggtctgaagattagcttacctcggctgatggactttcccaacctattagcttatgcatggagcttatggaaggatgacaaggccatggatttggtggattcatccattgctgagagttgctcaaaaatggaagttttactatgtatccacatagggctgttgtgcgtgcaagataatccaaataataggccacccatgtcttctgttgttttcatgttagagaatgaagctgcagcgcttccagctccaatacaacctgtgtattttgcacatagggcctctggagccaaacaatcaggaggaaataccagcagctctaataataacatgagcctcacggtattagaaggacggtag

SEQ ID NO: 40455 - DNA, 165 bp, Oryza sativa
  Clone ID: PAT_MRT4530_43897C.1
atggcctcatgcttcgccctacggccttcgccaactatagatcttcgattgtttgatgagcttggaggcaaacccttcggtcttcattacacagcttcgcccaggtcggtcgaaggccctcgtgagctttggtcaagactgtgcaagatgtgtggtatgccatga

SEQ ID NO: 40456 - DNA, 120 bp, Oryza sativa
  Clone ID: PAT_MRT4530_43898C.1
atgtcggtctcgctcttccgttccggccgcgaaggcttctcgggccctcagtcagaggaccgacgaggcgacgaggtgacggccgtgctgggcacccgtggcgacgtcgcgcggtactga

SEQ ID NO: 40457 - DNA, 352 bp, Oryza sativa
  Clone ID: PAT_MRT4530_43899C.1
atggccacgggctcaacgcgaggttctttgccgccgccgcgggaaccggtggccacaacccggcaatggcgtcgtcgccgccgtcgtcgctgcaacttccgcttcccatgccgctgtccatggcttcaacccggcgccggcgggctgcagttttataccgacaccgccgccgccgccgccggcgcccttcttgtggcccatacgccggggtggccgctgtaccaccaccaccagcagcagcacgccgcggcggggcccgttcttgggcgccgggccgctttcgcaccacccgagcttaagcggggcgtgcttactgtgaaccctgccacttttcccgcacctggggccaagg

SEQ ID NO: 40458 - DNA, 282 bp, Oryza sativa
  Clone ID: PAT_MRT4530_4389C.1
atgggcttccaccaccagaaaacagagcaatcaggccgccccgcagacagggatcgccacgctgcacagcgccgcaagtgcctgcacatgagacggcgcgagggggagctgggcgagagcggtgtcttggctgccgaggcctcttcccaaggatggatgtcgccggcggagtcggcctcagacatggcggcggcaactgaagcactgagtggctggccaggctgcaaagctgggccactcgagggtgaagtgcgctcctccagcccagacccagacggctga

SEQ ID NO: 40459 - DNA, 454 bp, Oryza sativa
  Clone ID: PAT_MRT4530_438C.1
cccgcccaaaaccaaggaaggtttttccaccccacaaagggggccgggtccaaattaaaaaaaaaaaagggaagggggggcggaaaacctcaagttggccatcccctaacaaaaagcccatttaacaaccaagttgggccccccctttggcccaaacggggggcaaaacttttccacaagggcccaaatttataaaaattaaaaaaaatccctttagcccccagttcaaaaaaacaaggaaagggccgggcccaaacctttgaaaaccctttttttggggggcccaaaggaggaacccctttccccccacagggaaaccccaacctggagggggggggaaggggaaacccccaggcaaaaccctgaaatttccctgggggttaaccattcccaaaaaaaaaaccttccccatcccccagggaaccctcttcttcacggggaccaaatttttggg

SEQ ID NO: 40460 - DNA, 602 bp, Oryza sativa
  Clone ID: PAT_MRT4530_43900C.1
ggccgcaaattttttttttttttttaatttttttttttttttttttttttttttttttttttttttttttttttttttttttttttgggaaaaattttcatttattcaaacaaacagccaaagacttttccaaattttattacaggacccacccgaggaggggggaccctttatttacccaactataaaaataggaggggcccccctaccaaaaaccgcaaggcccaggagcaactttgcagggggggcggcagtccctaggggaaaccccacacagggggggcaaatgggaagccaccggggccggggcctgagctgggggctcgccaacaaagccagcataaaacgggacttgggggaggaaaaacggccccagggggcaaaaagccgggcaaggaaattggggggccataaacccaattgggggacagaattggggccgaataaccgggcagctgctaaattgaagcccgggggacggcccccaaggggggctcatggggctgcactggggcctcacaaacccattgcacgggttcaggatggggtgcaaaaacggggggggggggcattgcccaaaggggcaagcataaaactgggcc

SEQ ID NO: 40461 - DNA, 2364 bp, Oryza sativa
  unsure (1)..(2364): unsure at all n locations
  Clone ID: PAT_MRT4530_43901C.1
atggcgccgccgggggtgggggtgggtgtggcgtacctgtgggggaaggggaggggtgggcggaaggggacgccggtggtggtgaccatggagagtcccaactactcggtggtggaggtcgacgggcccgacgcggaggcggagctgcgcaccgccgcggtggccatggacaagggcggcgggcgtggcaggaacaagaaccaggcccccccaggcagctcacctggggggttcctggcgctctccctgctcgccctcgccgtggagctcgccgcctactggaacgggtggcgcctccggcggccggagctgcatgtgccggaggcggtggagatcgaggggtgggcgcactcggcgtacatctcgtggatgtcattccgagccgactacatcaggaggccaatcgagttcttgtcgaaagcttgcatcctcctcttcgtcatccaatccatggaccgtctcgtcctttgcttgggttgcttctggatcaagctgaggaagatcaagccgaggattgaaggggacccattcagagaaggttcagggtatcagcaccccatggtgctcgtccagattcctatgtgcaatgaaaaggaggtctatgagcagtcgatttcggcggcttgccagctagattggcccagggagaagtttctgattcaggtgctcgacgattccagcgacgagagcattcagctgctgatcaaggcagaagtttccaagtggagccatcagggtgtgaacattgtgtatcggcatcgggtgctgaggaccggttataaagctgggaacctcaagtctgcaatgagctgtgactatgtcaaagattatgaatttgtcgccattttcgacgcggacttccagccaacaccagattttctcaagaaaacgataccacattttgaggggaatcctgagcttggattggttcaagcacgatggagctttgtgaacaaggatgagaacctcttgacccgtcttcagaatatcaacctgtgcttccactttgaagtagagcaacaggtcaatggagtcttcttgaacttctttggtttcaatggaactgctggagtttggaggatccaagctctagaagaatccgggggttggcttgagaggacgacggtggaggatatggatattgctgttcgagcacacctgaatggatggaaatttatcttcctcaatgatgtaaaggtcctgtgtgaactcccagaatcctatgaagcatataggaaacagcaacaccggtggcattctggtccaatgcaccttttctggctgtgccttccggacatacttactgccaagatctcctcatggaagaaggcgaacttaatactattattctttcttttgaggaaattgattcttccgttctattcattcacattgttttgtgtcattcttccgctgaccatgtttgttcctgaggctgagctgcctgtttgggtcatctgttatgtgccagtttgcatgtccttcctgaacattctgccatcaccaagatcatttcctttcattgtgccatacctccttttcgagaacaccatgtcagtgacaaaattcaacgcaatggtgtctggactgtttaaacttggaagctcctacgaatggattgtcacaaagaagtctggtcgatcatcagaatcagatctttcaacagcagcggagagggatacaaaggatcttacccttcctcggctgcagaagcaaatatctgaaagtgaattgattgagctcaaaatgcagaaagaacgccaagaaaaggcgccgcttggtgcaaaaaaggctaacaaagtctacaagaaggagcttgctctctctcttctcctcctcaccgccgcaactcggagcctcttgtctgctcaaggaattcacttctatttccttctctttcagggggtatcattcctttttgttggcctcgatctaattggtgaacagatagactgatcactctcagtctttttgtcaaaacatagaaagcatgcctctcttcatacacacactggaaatcaagttctgagagttccgaacatgccatggaattttacttcattttggacaagttacttgtccgtacagatatgcaaaggtgaatttgttctgcaatccagattcagggcacaaaaccggagtgatccaacaggaataagctgaaagagtagatagaattcgttcatttgtacccagtccacatagagttccagcaatgttctttggatccaaaaaatactgagatgtgtgctgttcatttgtaaatcgttaatacacaatttgttctgataaaattatcaatctgtatatattcctactttagataatgaaaatgtttcacntcaaaaaaaaaaaaaaaaaaaa

SEQ ID NO: 40462 - DNA, 738 bp, Oryza sativa
  Clone ID: PAT_MRT4530_43902C.1
atggcgccgccgggggtgggggtgggtgtggcgtacctgtgggggaaggggaggggtgggcggaaggggacgccggtggtggtgaccatggagagtcccaactactcggtggtggaggtcgacgggcccgacgcggaggcggagctgcgcaccgccgcggtggccatggacaagggcggcgggcgtggcaggagcaggagcaggaccgccaggcagctcacctgggtgctgctcctccgcgcgcgccgcgccgccggccgcctcgcctccttcgccgccgccgcggcgaggcgcttccggcgctcccccgctgacgccgccgacgagctcggccgcggccggggacggctgatgtacgggttcatcagggggttcctggcgctctccctgctcgccctcgccgtggagctcgccgcctactggaacgggtggcgcctccggcggccggagctgcatgtgccggaggcggtggagatcgaggggtgggcgcactcggcgtacatctcgtggatgtcattccgagccgactacatcaggaggccaatcgagttcttgtcgaaagcttgcatcctcctcttcgtcatccaatccatggaccgtctcgtcctttgcttgggttgcttctggatcaagctgaggaagatcaagccgaggattgaaggggacccgttcagggaaggatcagggtatcagcaccccatggtgctcgtccagattcctatgtgcaatgaaaaggag

SEQ ID NO: 40463 - DNA, 447 bp, Oryza sativa
  Clone ID: PAT_MRT4530_43903C.1
gtttgtgcaggatgcagacaggagaagaaggagtctgccggcgccgccggcgagaagccgccgagcttctgtgacaggctccagagagctttccacgcccgcccggcgttccggcctctccgccgcctcggcgtccgccacggccaggacgacgacggtggtggtggtgcgcctggaagtacagtagacatgcagcctgcgacgacgacgacgcacggcggcggcccaccgaggccggtgctgccaccggcggcaggccacgctccggcgcccgtcgtgctgccgccggcggtagtgaaaccggctgccaagcctgcgggcggcaacgctccggcgcctgtcgtgttgccgtcggcgccggctgcaaggccgccgccaccgtcgcgtcgccatgggcatgcacatgcgtcgacgaccgggagcgcacctgccgccgagaaggtggcg

SEQ ID NO: 40464 - DNA, 2121 bp, Oryza sativa
  unsure (1)..(2121): unsure at all n locations
  Clone ID: PAT_MRT4530_43904C.1
atggttaatttatggaaaaccggcgaaaaccccagcattgatatactgaacctaaaactaagaacaacagtccagcaagggataaaactcctaaaacgaagccttcaagaaggacacgccgacagaacgacgacatcgttcgatcctaacgaatctaaggttttcacccggagaaatcccttgatgtggagtttgaacgagggctccaatagcaacgccttcaaaaaggttccagctcggtggctggagtttaatttttatttgttctccatggcgcttcggttcgaggtattaggaagattcaatcgtgctcgtgcagctcgattaacactaccccactttacttgtcagacaccactgtttatgcctgttggaactcaaggtacaataaaaggcctgactactgaccagttagaggaaataggttgccagattatacttggaaacacctaccaccttgaacttcgtccaggttctcaacttattgacgacttgggtggccttcacaaatttatgaattggaaaagggcgttgctgactgactctggtggtttccaaatggtttctttgctacatttggctgacattactgaggaaggagttacatttcagtcacctgttgatgggaagcccatgctcttgacacctgaggaatctatccatattcagaacaacattggagctgatataataatggctcttgatgatgttgtgaagaccacaattactggcccaaggatagaggaagctatgtatcgtacccttcgttggattgataggtgcattgctgctcataagaaacctgatgtccagaacttatttgggattgtacaaggaggattagatccagttcttagagatatctgcgtgaagggcttggttgagcggaaccttccaggatatgccattggtggtcttgcaggtggtgaagataaagactcgttctggcgtgttgttgcccagtgcactgctggactgcctgaagataaaccacgatatgttatgggtgttggctatccacttgatattgtagtatgtagtgctttgggtgcagacatgtatgactgtgtttatccaactcgtactgctcgctttgggactgcacttgttcctgagggtgttctgaagttgaaacaaaacgcaatggcaactgatgaacgaccgatagatccgacctgtccatgtatggtctgcaaaaactatacacgtgcttacttgcattgtcttgtcacaaaagatgctatgggttcccaactgctgtcgtatcacaatctatcatttatgatgcggttaagtagagacctccacatgtcaattctggaaggacgattcccagagtatgttatcatccagctaaattttgtgtcatttgtcagttttctcactgtgttggtgaataagaaagtttccatgccatattgtagattcgtgcgaggattcttgaggatgcagttcccaaagggcgatgttccgaagtgggttcgcaacgcaatggttgttgctggcattgacatatcggagtgctgcacccccgcgaagtatcctcgtgatgcaatggatgctccgggtactgacatacctgagctcttgcctcctaccaagtgctcctgaggcagagaaccaagaattaagggactaaccttataactgtttaccacgacacgcgcgattggagtgctgtcgcatgaaggtgatcccacttctttaacaaagtcaagttttcacaagaatcttattggtcatcaactcatcataggtgtaggcctcactgcttcatcagcatataattttccaacagtatatgctgaatatagctgattggattttgaacttttgataattacaaaggtttttgtactcctatcttttggaaccatagggttattatgcggattgatgcatgaatatcagaatatgcatcatgtcgtctgtagtgtaagctgttgcaaaatgatttctactggttttaatgtagaagcattatctactcattttgttaacgaagaacattctattccataaaaaaaaaaaaaaaaaaaaaaaaaaaaaaaaaaaaaaatttaannnttaaaaaaggtgatcaattaagaaaaaatcaaatttatatatacgtgcgtgggg

SEQ ID NO: 40465 - DNA, 444 bp, Oryza sativa
  unsure (1)..(444): unsure at all n locations
  Clone ID: PAT_MRT4530_43905C.1
cttggcgatggatcccccaccggctcaggcgatgaacaccgacgacttcacggacaagaccatggatgaatgttgttcttgctgctacgattgctgctccagcatcctggatttcctctgctgttcttgatgctgcccctcgtcaaccttgcagaaacttcatgggtgctgacgatgagtgaatcagaagtctcggtgatatattttgggctgtacaagttattgaattcttagattaattcttcctcccttgcgttgtaactgagatttgtgcgtcactttatggatgattttgggaggaaatttgtgcactatcaagttctgaaacaaaaaaaaaaaaaccagccttttgcggtaaaaaaaaaaaaaaaaaaaaaaaaaaaaaaaaaaaaaaaaaaaaaaaaaaaaaaaaaaaaaaaaaaaaanaaaaaaaaaanaaaaaaa

SEQ ID NO: 40466 - DNA, 1251 bp, Oryza sativa
  Clone ID: PAT_MRT4530_43906C.1
atggagctcgccgacgtcttcctggaccacggctacgccgtcgccgtggcgctcatcgacccgtcggtcatggagaacgaagccaacctcgccgccgccgtcgcccgcgccgtctcctccaagagctccaccatctccttccacacgctcccgggcatcccggaccctccctcgctcgccttcaacgatcagttcttcaagaactacttcgacctcgtgcgacgccacaacgagcacctccacgacttcctccgctccgtgcggggcctccatgccgtggtcatcgacgcatcgtgcgcccatgcccatgaagccgcgaggaagctgggagtccctgtcttgatgttctacccgtccaacgccggccacctcgccgttaacttgcaggctcctctgcttgttgacgggttcaagaagcatctgggaggagatagtactagtcctgtcgagttcttgggtgttcgacccatgtcggcttctcacttggctggcctttttgggccgattagcgaggtgaacaaggatttcgaggccatgatttttgccggtgcgcgcatgaaggcggagttcgacggaatcctgatcaacacgtccgtgtcgctggaggagcgggcgctgcgagctctcgccgacccgcgctgctgccccgacggcgtggtaatcccgccggtcgtcatgttcctctgcttcgggagcatcgccgacgcatgtgaacagtccgaccagcagctgaaggagatcgccgccggcctggacaagtccggccaccgcttcctgtgggtggttcgggcaaccagcacccaacacctcgacgcgctcctaccggaggtgttcttcgcaagaaccagcggccgcggcctcgtcgtcaacagctgggtgccccagccgagcatcctccgccaccgcgccaccgccgcgttcgtgacgcactgcgggtggaactcggtgctagaggggatcaccgcgggggtgccgatgctctgctggccgctgtacgcggagcagaggatgaacaaggtgctcatggtggaggacatgggcgtcggcgtggagatggagggatggctggaagggctggtgaccgccgaggaggtggagacgaaggtgaggctggtcatggagtccgagcatggaaggaaggttagagagcgtgtcgaggcgcacagagatggcgtggccatggcctggaaagatggtggctcgtcgcgtgtcgcgtttgcccgtctcatgtctgaattactcaacgtgtaa

SEQ ID NO: 40467 - DNA, 210 bp, Oryza sativa
  Clone ID: PAT_MRT4530_43907C.1
atgacttggattgatttgggtattaggaggtttggtctaaccatgaggagtcggtttggagtcagggacatcgaggtggagctcaccgggatgctcgatggtcgctcgtggcacagcgaccacgggccatccactagtagtttggtggcgccgagaacaagaggagacaccgggctcatggcggaggacggtgatgatgcagcattgtga

SEQ ID NO: 40468 - DNA, 1345 bp, Oryza sativa
  Clone ID: PAT_MRT4530_43908C.1
gcaaaaaattgtcaatatataccattaagaatgatggctcaactttacatcaccagacatatactacacagcacgccggatccgcaatataaattggacctatcgctataaaactatcactataatacaattacaccgatatacaataagagctatcacaaaaatggttggacaaatcggagccacttgatctacttttggctactattgcttagataacccagcttctgcgctaatgcatcgacatatctaggtcttcttcgctccatccctggaatcccagcatcatctcttgctccttcattcagaagctcctcccagaagtcgtcggttaactcggtttcgttgctagcctgatttcgtggctgatttcgagtcctgttgacatcctgcttgcccttcccaagaccctggatgttcagtgctaaattctccagttcagactttgcaggctcatcattcagttcagcaaatggccttggatcaaacagcaatgtcgactcgagttgatcgccctggctgacctccccggggttgagaaatggcactatgtctatcgacctcgtcctcttcttcgagaatgtgtcctcgagccccttcattttatcctgctggtgaatcaactggtgaaagaagtcagggttctgcattgctcttgccaagaaacccatcatctggacctgcttctgctccgcatgttgcagcctctcttccatggctcgcatattggctttcgtgctttgctgcttgtgccttagtttcacaacctccgcgagtaagatgttcttgtcacgctttagcctgtcgatctcttcatctaatccgaactgaccaacctcaaggcaggtgccaagtgcctgctgagatccagggagataagacaatggtctcctcctcttaatcatctttagaagatgcctctggcctctcaggaaaccatcattcgcgaattcccatctgtcaggatcaatctttctgaaaccctgaaatctcaaactgtagaaatgtgatcgcttgttcaggtaattcgtccggaccaagaagtaggtgttgagctggcggacgaagctggagaaattgttgtgcttgaagaagcgtgggaggaagacggcggcgaagacgtgggggtcccagacgacgaagctgctgcccgcgcggccccacgagacgacgccgtcggtggccgggtcggccaccaggtcgaacgtcttggtcaggaacggcggcggcccgacctcgtgcagcccctccatgggcctcggcgcctccccctcctccggcgagctcggcggccactcctccttcaccatccccggcatcatcttctccattcctgcagcccggg

SEQ ID NO: 40469 - DNA, 2391 bp, Oryza sativa
  Clone ID: PAT_MRT4530_43909C.1
atggcgtccatccttgtcgagaatggtaccctcaccccgggtttcatccaattcatcgtcgccctcaccaccctgctcatggtgatccgcttcggcctggacgccttgcggcaccggtcacggggcaacgtcacgcagatcgtcctcgccaccctggacacggtgacacacacgatgatcacctacagcctcgggatcatgcagcaccgctccgcgaccaccagctactaccagctgtgggcggtgctgctggtcaccctccgctacagcgtcaagatcggccgccccgccggcatcgccatgaagcagaccccgctgttcgatctcatgtcctccttctggaccgcccacatccttcgctcccatagtgtcagcatgcttctcaaggtccccggttggttgctctggtccatcaactccgcgcgcatcatccatggattcatctcctcggcagatgcgagcaatgtccacagggagaatatgaggttgctgacagactacatgcgccatgagcatacaacgaccgtgcaggtgcagaggcctgaccctagctcgatgaagggctacagatacttggtcttgggggaaggtaagaagctgaagaaaagggaattagccgaacaaggcgtcgatggtgtggagacaacagaagcgatcaacaggatattgctggcgctgctgacagatgagaacaatattgaccaggagctcgtcacgcttgagaggatctggagccaccaggggcgatgctcccacgatggctgccaatgcaacctgccgcccggatgctgcgacattcttgaccagaagaccaaggacctctgcctctcctttgccctttacaagctcctccgtaggagattcttcaatttacctatccatgaggcgagactgcaaaagacgaggcggctggttgtttacgggatcctcggcgagggcgatgctgccaactacaagagggcgttccgtgtcagcgaggccgaggtggctttcctcaatgatttcttcaacagcaggtatgctatcatattcgctcaaggttttccctggatccgacttgtgctaaccacccttctgattgggggcatctcaagtgtggcggttgctgtctatagattttctaagtctgctaaagaggatgagctaggcagagtccatatccatcatggagtatattttacatgggtaattctctccctgcttggagcaaaagagatatgggagatgacaacctatgttttctcggactggactaaggtactattgctgtgcaagttcgtagagcagccatggtggatgcgatgctgggtgggcaacttggcacgggctctgatgaggatgctcctctgtagcccccctttgttcagaagatggcatggcaaggtcgggcaattcaaccttctcttctctagacattcctcgatccatctgtcccaacaagtgaaggaggctgtggttgactccctcaggaactcggttaggcaaaacctggtgctgaacaattacctggagcaggcaatcagcaagaactcgcttaggataaggctggtgaggccgtcggacaaccaggagcaggagcaggcgccccagaactcccaggcagatggcggccaccgtgtgagtgtggagtggctacaggattcgcaaaagaagagtgtggagtggcagctacaggacgatgtgcacacgctactagtttggcacatagctacatgctactgcgagcttaagctcgccgaaacaagaaatgttggagcgaattacacttggttgagctggagaggcttcggctgcaggaggaggccgtcagatgctgataatccttggaggcctcactacttggtgtctaggacattgtcgcagtactgtgcttatttgctctggctggttcctcctctcttgccggggaacagcctaatggcgaaggcggtgatcacacaagtttacagggagagaaaccgtcttcttggtagaagagtatatctacccttttcctggtgtacttcaaccaccaaagttcttgacaagctcgaaacatatagatcgggggagatacagttatttgccgatgaagcaggaaacgctaataccaccattctcaggaagggagcagaactaggcatgggcctaattacagcggcgaggagcgctgacagcgaagctctgtggaagttcctgtcggatttctgggcaggattcgtggtgcacttggctgaatcaaccaaggcttcgcagcacaagatgtatctgacagccggcggggagttgtcgacgcatctctgggcgctgctatcccatgccggctacctaggggccacgccgcacggcgaccaaacgtctgatacggtgctccagcaactccaaccttacaacccggatgtgcaactttaa

SEQ ID NO: 40470 - DNA, 824 bp, Oryza sativa
  unsure (1)..(824): unsure at all n locations
  Clone ID: PAT_MRT4530_4390C.1
gttttnttntnnntttttttttttttgtttttaatgtgaaaattttgacttgaactgaacagggttcaatgtacaagaacataaagcatcactgtactagcacaactcaagaagatcttcttctctctcttttttttttctttcatctcacggctacgaggaaaacgagaggcaatttaccgctgatttacaagtgattgctactacaaacaaactccaattcgagttgctctgaaacccttgctacacatactcctcaaaacactaaggtagaagctaagctatgaatctctttggccactcggaagatgatctgagctcaccaagacatgcctaattatcatcattcattcacaacaaataaagcttaatcctcagaattattcatctcctggagtgggtccttgccaattattcaatcctctgcctatatcacacttgccacttacacccatgcaatcttctcagtggcagttgattgcatcacttgtttggttggagttgtatcactcaagaaccaagtgagtgacagtcaccaggatgagcagagcaatttgaccccggatcctccatggcgcaatcacaatgatttgattttttttctctcttttgtttttttgatgaggtgttcttggacgacaaagatggaagtactaccaaactgtcacaattcctttttaccctctaaataatcatcctctctaaggctaagtttaattatgtcatcaaagacaagaacaggagaagaggaggaggaggaggaggtgagaactggaagagcaatgacaaatagcagcctcgtgccgaattcctgcagcccgggg

SEQ ID NO: 40471 - DNA, 318 bp, Oryza sativa
  Clone ID: PAT_MRT4530_43910C.1
atgaccatcatcaactccttcatcaacgatatcttcaagaagtttatcaaagctaacaagacttcacatcaagtagcctgggaaatgcttgatgctcgggctcgacttgggaacttcgtcagcaacgctcactgccccgggcttagtccaggatctcctccaggcggtcgagattacaactcaattacattcaagaaggaggtggcgagaggtaatcaagctggtcgtgtcacccgaaggaacagcgacagggacatgtggcgcaagaagacttctctagctatgccgggcctcctactcagtccttctgaggcataa

SEQ ID NO: 40472 - DNA, 462 bp, Oryza sativa
  Clone ID: PAT_MRT4530_43911C.1
atgaagatggaggaggacgccacgtacgggaagatgcaggagtccctgatggaggaggcgagggagctctccatcctctgcggcgtcgacgtcgctctcctctgtgccggcggccccggcaccggagacggagacggcggcggtgcggtgtcgacggcggaggtggcggtgtgggagtcggaggagggcgtcctcgcctcgtaccgcgccatcctgcctaggccggaggcgcacacgctccgagagtgcctcgagttgaagctcgccagggagagggccaagctcgccatggtgcggcagtgccgcgatctctgcgtgcacctgtgggatgacacggtcagctacatcagtacggcggaggaggcgcgggcgctgctcgagtccatggacgcggcgatggtggccgcgaccgcgaggcgggaggcgctgcgctgggtctactggacgacggcaacgccgtga

SEQ ID NO: 40473 - DNA, 354 bp, Oryza sativa
  Clone ID: PAT_MRT4530_43912C.1
atggagacagggagcagcgctggtgcggcagctcggagtggccgacggcgactcgatctggattggagtttggagatagatgagaggaaggggaagcgatactattctgttcgatatggtgttcagagcattgagtgggtcatcttcaccgtcatgacgaccgtcgtgctcatcggtacacttgtcatcattctccttcctgttacacagaagggaatgatggaggaggtgcccctgccccccagtatgaagagatcagaggatatgatacgagaaagcctgcaccttctatttccatttgtacaaatgaagagatcagaggatgatacgagaacgcctgcatcttctatttga

SEQ ID NO: 40474 - DNA, 308 bp, Oryza sativa
  Clone ID: PAT_MRT4530_43913C.1
atatgggccgtccgacacagcatggtctaggcccgcctgggccgaggttaattgggctagcacggcccaaccgacatgccgggccatgctgtgccagcccacgtgctgcacacatggcccagtcacggcccaatacgactccagccgtgctaggccggcccgaaggcacgacagtatatcgccggcccaccatgctgagggtgtagcctaggcacgccccgactgtcgggccgggtcagcacgggcgcgaccccagtcaggccgtgtcatgcttgggccgggccaaaatggcgtgccttgggataggc

SEQ ID NO: 40475 - DNA, 1617 bp, Oryza sativa
  Clone ID: PAT_MRT4530_43914C.1
atgatctcgtcggcgggaccgcatcctcgccggattcggcccctcgccgccgcctccctcgtgctgttcctcttcctgctctacagccgctccggcgggagcttggtgcggtctccacgggtattgagcttcgattcgcatacggggcaccgtagattcctctccgatgccgatcctatcagccccgcgtccaacctgtcggagatcggggagctaaacggcgagcagccgccggtggatccctccgtggcgtgcgccggggtagcgcggcacgaggggttcgggtcccagtgcgagttcctccgggcgcacccgcagtgtagctccggcgggttcgtcgactacttgggcttcttctactgccggtgcgagaggttcagggtgctcggctatgcggtgctcggtgtgtgcctagcggctctgttctacatgcttgggaacacggccgcggattacttctgctgcagccttgagaagatgtccgcgctgctacggctcccgccgaccgtcgccggagtgacattgtcccctttggcaatggcgcgcctgatgtgtttcgagtattgccgcgtttatggggaccggcgctgttcacttcttgaggaggaatcagatggtgacgtggctcaaataaacacatccttgcctcagtggatgtgggcttctcatgtggccatttactcaaatcatgggatcagaggtggttcacctgacagttccaggccgctatggggttggagtgatgaagaagtggataattccacagttagcttctccaagctgttcttgtttttggagctccccttgacgataccaagaaggttgacaattccaatagttgaggaagaccggtggtcgaaagaatatgctgttgctagtgctggcttggcgcctgttctgctggcatttctttggagcagtcaagatggggtatccactaaggctcacatagcagcatatgtgatagctggtatttctgggatggcacttgcttctctcgctttcatgttcactgaccatgaacgacctccacggagatttttattcccatgggtgttgggagggtttgtgatgagcattatctggttctacatcattgccaatgaactggttgcacttttagttgcttttggagtgatattggggatcaatccttcaattcttgggttaactgtgttagcatggggtaattcgatgggtgacttaatgtcaaatgttgccttggcaatgaatggaggagatggtgtgcagatcgccatgtctggatgctacgcaggacctatgttcaatacacttgctggattgggaatatcgatgctgcttggagcttggtcaacagcaccaaactcttatgttcttcctcaagacagctctctcatttacacaatgagcttcctcgttggtggattgatctgggctcttgttatgctgccacggggtggcatgcagcctaacaagatacttggagttggtctcattgccctttactcagtttttctttttattagggtcccggagttcggaggcccccagtcaccgaactccggcgagggctgcggcactggagcggtggagaagcggagggtttggtttcgtttgggtacggatactgattaa

SEQ ID NO: 40476 - DNA, 825 bp, Oryza sativa
  Clone ID: PAT_MRT4530_43915C.1
atgacagtcacctctgatgggctagaactctacggcccgtcagaggggaggagggaagaagggggagaggggtgtacctctgcgttgggccatcctcctctcctccacatccgccttgccgccgcgcaccgctgcccctctttacctcgccgccgcaccgtgccactgtcgctgcaagaatcatcggatctagaaattagagaagggggaggagaggagaaagaagggggaggaggatggggatggatgcggcgccgccagatccggtggttggggctgggatccgcccatgagctccagatcccgccggcgcatgcaatctcccggcgaaggctggccctcgagaagaacggctcgcggtggagaagccagcctccaccttgcctccttcgacccttccctcgcgccgcgccactgccgggctgccgcccctatgcctcccctccagcccctgccggatgtggaggaggggagggcgccaccgccaccgggccgccgcgcctcccctcccgccactgccgggccgccgcgcctcccctcccgccactgccggaccgctgcccctgcgcctccctcctgctcctgccggatctggaggaggggagggtgtcgccgcccctgtcggaccggcgccgccaccgcgcctcccctcccgcccagctgcagaacaatcgagagggagagggagagggagagggagagcgagtggagagggagagaagaatcgagagaagtggagaaccggtcttatctcctctaggtgtctgccccgttgggagaaaatcgagagaagtagtggagaagccggccttacctcacctttga

SEQ ID NO: 40477 - DNA, 204 bp, Oryza sativa
  Clone ID: PAT_MRT4530_43916C.1
atcaatcgctttatggttttttttattatttttccgtttattaattacagtcttacactttaccttatataggagtagttctaatttgaaaactgaagaaacaaccaatggcgctgaggggcaagcaatcaaaatgtctcatcgggaagctaaattacttaccataagaatagccagcattataaaacaattgactcagctttt

SEQ ID NO: 40478 - DNA, 345 bp, Oryza sativa
  Clone ID: PAT_MRT4530_43917C.1
atggagaaagtatgggtacaaagttcaagtccgcattttattagcttgagtctcaaacatcttcaatcagtactgaagaaggatgagccattggaaagtgaatgcttcaacatggctatatgtaagttcatgtatgaaaaaatccagacgattcacaaaactaaagaagcaatatcgaatcattgtctggacttgcaattttggaatgctactggctttggtaaagacccggtccaccatgacaacgtagatcttgcaaagaccatcagtagctggtcgaaaattcattacaaactttcacaatgcaaatcgtacgccatgcttgaagctttatcatggtcatag

SEQ ID NO: 40479 - DNA, 651 bp, Oryza sativa
  Clone ID: PAT_MRT4530_43918C.1
atggacgggcggtgggcggcgacacgtggggacgcgcggtggacggcggcgcacgaggaggacgcgacatcggcgggtggtgccctctcgggatccgtgtcaacggtgacgagacctatacagggggcggtggcaaagcgcgggaggacacggcgacagcgggcggcgccctctcaagctcgtgccaatggcgacgaggcctgtgcaggggcggtggcaaagcgcgaggaggactctgcggcggcgtgcggcaccgaggaggggattggaggacgagggcggcgggggtggacgcagcatggggtggcagggtggcggcgggcggtggcggaggccgctcgaggcgtcatggacaacctgcaggctcatgtcgtcggagccaagcacagggttggtggcggactcgcgtgcggcggtgctggcgcggtcctgcgcgtgcgaggcggcctcctagtggcgccacgcctcgttgcgggcggtgtgctcctgctccctacgctccatggcgtcaaggaactagcggtggaggctctcctggtgctccatgagccattgtaccaggcactcgaagaaggaggccgacacgctgagctactcctaccgccgccgcttgcgattgcgtcgcgccgcgtccacccccgaaggttgtga

SEQ ID NO: 40480 - DNA, 213 bp, Oryza sativa
  Clone ID: PAT_MRT4530_43919C.1
atggggcacacgagcagggcggtgatgggaggcctccaccgccatggcgcactcacaaagcatgtcatgcctgcccaagatggcaagatcgacaccgtggcgacgctgaacgacctaagcatgctggacatgcaggtgatggcggaggagaagagcgggcactggtggttcgtgggaggtggtccactggaactcttggttaagatatattag

SEQ ID NO: 40481 - DNA, 1332 bp, Oryza sativa
  Clone ID: PAT_MRT4530_4391C.1
atagagacaggaggcagagcggagcatttcagagacaagacaagactcaggaacagcggttctggccgtctgtgtcaattacaggatgataagatactacgaggctaaggggatgctgggaagctagccctaggagatgatactacgaatgctacagctggcgaggaacgtctacgtgctggagctggagctaatcgcctatgtggtcgtatatggtatcttcactgaggtgggagaaaaacctgcatctgagatcaaatattccctatacgtagatatatacgacgttgtaaatgcggggtggaaatttgcttgatcaagagattgttattataataagatataatcttataagtagctgaagagtcaaattttaaggataaataatatctgaattaagtaaaaccgtgaatcagagtttgtcgttggaggtaggttgtagtgttggtagaggctctcaagaccgtgtctcttttttcaactggtaatggagggtgcaatcctccaggtcgtttctgagaaaaacaattccaaatcagtacagcattacgactggattaccagttggacattgaagctgagctgcaactagtggacaagatcaagtcagaactcggaataaacagtgacagcaagttagaaaaaataaccatgaggaaacttgggcttgaaaggacaattgatgtcatatttgttgcatacaatgaccaaacccttccatgttttatatttgatggtagtgttatatttgacctgatacctggggatatggtgatcaacgcaatgatggcagccataaacagtcagtggaataaacaagctcaagtgatataccatgtgacttcctctcaccaaaatcccgtaccgttatctcttattgaagaatcattgtacaaatactttcacaaaaatccacgtacaagtaaagatgggaaggcaatacaaaatgaaaaaattttaacgttcaataggttagtatacttccaggcatacatgattctacggtacaaggtaccattggagatgatgcgtgcagcaaatgtactgttgggagggatatacaccaagaactactatgagcttaaccgaggctacaacattttaatgactgtggcaaagctgtatgccccatatgtattcttcaaaggatggtttgatgacaccaacctgaggaaactgtggaaggcgacggctatggaccaaaatgatgatgcatccatatttaattttgatcctaagtgcattaactggagctcatacctcgtgaacacccacattccagctgctataaagtatgccaataaccagaagacgaaagcacgcagtgcataa

SEQ ID NO: 40482 - DNA, 453 bp, Oryza sativa
  Clone ID: PAT_MRT4530_43920C.1
atggaggcggaggcggcgccaacgcaggtcgctggaggcggagggcggaggtggcggcgcggcgccgaggcgaaggtggcgccggcgctggaggcggagggcggaggcgacacgaggcgggggtcggaggaaacgcgaggtggaggcgtgacggagcagcaaccgcgcaactacccagcaaccaaccacaacccacacggaagcaatcccggccgggccccacccggcagccaccccccgacacgcgtcaccacgcggcaacgcaccgagaccgagacctcgacccccgcccccccgccggtgggcccacctcgtcagcgactccacgcccccgcgcgcgccgacgaatattcccccttcccccgggcgtgcgagcagggccagttccgtcttccgtccgcctcactcacggcgtcgcgcccacctcgcctccacccaggggcatcccggtaa

SEQ ID NO: 40483 - DNA, 162 bp, Oryza sativa
  Clone ID: PAT_MRT4530_43921C.1
gatgctgggatcttatattgctgcaccagatttacaagtgtagcatggtacattaacttactaaaaacactactaaaggtactcatctgggtgtgatcccaagcaacaactttaacactgaatgcaaatgaaatatactcactaaaattctgtcactttaca

SEQ ID NO: 40484 - DNA, 2880 bp, Oryza sativa
  Clone ID: PAT_MRT4530_43922C.1
atggcagaaggtgcttttctttctagcctcgttgaccgtctaagcaccacagccttgtcggggatcacctcgttgtggggcgtgaaggagcaggtggattcactgattcacgagctccaggcagtggaatgcttcctcaaggatgccgacctgagggagatccgtcggcaagccacatccaacaacaactggttctggttacactccctcagagatgccgcctacgacgccgaggacctcatcgagagcgtggagctccatgaggggaggtatcacactctgaaccctctcctccagcccttgaactcttacagatttgccaagcaaatcaacgagatcaaatccagattccaatcgatcatagatggttgggccaagaatgcttccatgttacgtgagctaagggatatgagcagcagcagcagtagtgtcacgtctgctgccgattccttgtggaggcgttcttcttgccacctcggcgacgacgtcgttgttggtcgggaggaggaggccggcatgatcatcgatagattgctgcgctgcacagcacaccgtgaagtggttgggatagtggggatgggaggggtcggaaaaaccacacttgcatctctggtttacaataaggtttctgcaatccaaacagggggcacctcattgcgtcctgattcaccgaaaggaacgagctctcgaagtagtgtggagatgtattttgatgcttgtgcttgggttccagttgggcagaacgcagatgctttaggcctcttgaagatcacatcagctcaaattggggttgagttgaactcgacacaggtagctgcagccaaaaatgccatgttcaggtttctgcagcataagaaatacttgattgtactagatgacatatggacgacagaaacttggcttgaattaagcgaagctttccccaaatctacgaatggaagcaaaatcttgctgaccactcgctccaaggaaattgcggtttctgctgacccatcttcccttccctatgagctagatccactgagtgaagaattgagctttcagctattcattaccaaagtttttgggttgaatcatgttgacacaacaagttgtccaccacagctcaaggatgtagggcaccaactttcgaagaaatgcggagggttgcctcttgctcttgtggtattgggaggactattatctgggaaggaaaagcaattcgaagtttggaggaatatattgaagagcatgaagtggagcaactacgaagctgggaatcagtgcttggagatactggccttaagctacagctgcttgccttatcatatgaagctgtgtttcatgtatctaggtgctttcaaagaagaaactgaaatcagtgtctctaaactgataaaactatggatcggagatgactttatacctcagcaagatggaaaaacaagagaggaaacagcaaatgactatttacgcgaactcatacaaaggtgcctagttcaacctttgttgcctgcgcataagcagggtttcaaaagggtccgcattcatggcctattatgtgagctagcaagatcagaagcaagagagagtcgattcttttattgtgaaaatggtgatgcagtctcaagagcagaaggaaaatactatcgtcgtctcgctctccataccaaacttattgcatttcatgaactaagtaacagtgagaagctaagatctctgctaatatttccaggagtaattgaatcttgtgtgattactgttggtcatcaagcattaaggccttttagcagggcattttgtcacgctttctttttgtttcctctgtggggtttccagcacaacatcttggaacagttaacaagcatgcaatacataagagttcttgaacttgaaggacacgagagattggcatgtgatcttaaaagtgtccaaagtaatctgaaccatttgagatacatgagcctgagaaatactaatcttggtgaatttccatttccggaaagcaattttccgttgctacaaacacttgatataagggggacgtttattagaaagcttccaggtatattggagagccttgatactcttcggcacatctacctgaattggagggtatctcttgacataagacgccttaccaatttacaaacattacatggagtcataattctccccaattcacaagctgaaaggaacttaatggcattaacaaatctgaggaaactacgttttaggacctggcggggagttgaatacagaccagagtccccaaatgggtttgatattgatcggtacaatgcacaatcgagtatggggaatgaaaaccacgcactagccgaatctctgaggcagctagggaatctccattcaatatttataatgatgccgtttgcctcatttcaaccaattacttcagatatagttcaagcagtgacgagccatgagcaacttcataagctaaaactacaaggaagagtacatcgcaatctcctgctagaagatccacatttcagttgcatcaaaagcatcacattatctggctcgtggattgttttgagcccgatggaatcactaggctcactcacaactctttatgaactcaagctaaaggatgacgcgctccggtgctcagaggtctcatgtttacaaaacagtttccctgagctgcggtacctgaaaatcagtggactaaagaagcttagggtgttccatgtggggaatggctcatttccgaatctcacccgcttctccatccacgactgtacagaattccttagcacggttgaggttatggagcatgctacaagactgcaagttctgaaaattaaggaaatgccgtcagtcctgcctgatgttacagatttttgccacagcagaaacatcaaccttatcagctga

SEQ ID NO: 40485 - DNA, 377 bp, Oryza sativa
  unsure (1)..(377): unsure at all n locations
  Clone ID: PAT_MRT4530_43923C.1
ngaggcgtcttcgtactcgcctctctccgcgccctcctccgccgccgctcgccgccgttcgtctccgccgccaccgccgccgccatgagggagtgcatctcgatccacatcgggcaggccggtatccaggtcgggaacgcgtgctgggagctctattggctcgagcatggcattcaacctgatggacagatgcccggggaccagaacggtgggggagggggagaagcttttaacaccctctttaatgggactggggctgggaaacatggcccccgtgctggcttcgtccgtctttggccttcccgggttgttggggggggggctgggggcttccggccggtttttcccctggggcggttattgggggtctggggggt

SEQ ID NO: 40486 - DNA, 627 bp, Oryza sativa
  Clone ID: PAT_MRT4530_43924C.1
atatgcatatgtagatctgaaaaaattagcgagagccatggtagcattcgatggaacctcacagcaaatgggcagcactcggcaaatcggcctatcgacttcaattctttggggctgccaaatccgtcttctatcagtcaatctagaaggcctaggcgctgccgaagtgcaaattcttctcttggctggtcacgcaaaacagagtatggatgacagaaaggctggagaaaagaggatggcaaaaccaaaagatttgcccactttgctacactgttgacgaatcggcattacacctcctggccaaatgcagactcacaaagaggatatgggcagaaattcagagatggaccaggactgaccttcagatggacaattgggaaaactgtcactcagtcgatcaatgttggaccctcgtagcggagtccccaagcaccccgcgcaggcccctcaggaccttggtgattttaatcccgtggaaaatctggtgcgaacgaaacgcaagaatattccgcaacaatgcatcggcgccgtcctcaattttgacaaagatcaaggaggaaggaagagcatgggtcaaagcagggggcttcaatcctgcaggagtttgtaattttgggagatatcact

SEQ ID NO: 40487 - DNA, 1459 bp, Oryza sativa
  Clone ID: PAT_MRT4530_43925C.1
gcacgagggagagagggagcgatccaatcgcgtcgctaaaaccctagcggctggctgatttgggggattgctcgtcggagagatgaagatccagtgcaacgcgtgcggcgcggcggaggcgcgggtgctgtgctgcgccgacgaggcagcgctctgcacggcgtgcgacgaggaggtgcacgccgccaacaagctcgccgggaagcaccagcgggtgccgctgctctccgacgacggcggcgccgcgcccgccgccgccgccccggccgtgcccaagtgcgacatctgccaggaggcttctggatacttcttctgcctggaggaccgtgcacttctttgcagagattgtgatgtttctatacacacagtaaactcctttgtttcagtacaccaaagattcctactaacaggtgttcaagttggccttgatcctgctgatccagttccacctgttgctgacaagcatgttaagagtgctggtggttcagtggattcagcaactaaacatttgcaaaggaatcctacagacttatctggtgaaaacagtgcatctttgcccagccaaaatgtaatcaatggtaattattctaggcagagttctgttacaatggccaagacaggacaggtcaattggactatgagcaacaacacaattagatcaatagaccctccacccaagtattcatcagaggaaagtccagcacttctgctagctagccacactagcaccatggcagcgtactccagtcaaatcagtaaggatagtgatcggatctacaacttaccattcacaggtggtaatgggtcagatagtctacatgattggcatgttgatgagttctttagtaactcagaatttggctttgctgagcatggttcttctaagggtgacaacgctaagccagggagtgctggtggatctccgcagtgccgtctggctgaaggcctgtttgtcgaaggacttctaggtcaagtgcctgacaatccatggacagtgcctgaggtcccctcgccaccgacagcctctggtctctattggcaaaataatttgctttgcccttcgtacgacagcaccatgttcgtccctgagatttcctccttggagaactctcagaacaacttcactgtatctgctggtttgaagcgccgaaggaggcagttttgatctgccgatagcatcagacaccattcggtttagttggcaggtcacgttgagaggagggcttcttgcctgcctgaccaaagccacaaaacacagggatggatgatcatccagtggtcagtctaaaaatatgttgtaatgtttgtgtttcgactatacgtttgttgctgaagtttaaaggcgagggaattgttgtgagatctgggatgacagatttgttgttaccaattttgtgaatagtgaaaataaaaagagcatggataagatcatgaattcatgaaaaaaaaaaaaaaaaaa

SEQ ID NO: 40488 - DNA, 5553 bp, Oryza sativa
  Clone ID: PAT_MRT4530_43926C.1
atggcaatgacgatgctcttcagtctgctgttttgcacagctaaggctactgatgattcaggagcagaaactgaagcagaagcactcctccgatggaagtccactttgatcgacgccaccaactcgttgtcgtcatggtcgattgccaactccacctgctcttggttcggtgtcacctgtgacgccgccggccatgtcactgagctcgaccttcttggtgccgacatcaatggtacgcttgacgctctctactctgctgcattcgaaaacctcaccaccatcgacctcagccacaataatcttgatggtgccattccagcaaatatttgtatgttgcgcaccctcaccattctggatttgagcagcaactatcttgttggtgttatcccgataaatatttccatgttgattgctctcaccgttctagatttgagcggcaataatcttgctggtgccatcccggcaaatatttccatgttgcacaccctcaccattctggatttgagcagcaactatcttgttggtgttatcccgataaatatttccatgttgattgctctcaccgttctagatttgagcggcaataatcttgctggtgccatcccggcaaatatttccatgttgcacaccctcacctttctggatttgagcagcaacaatcttactggtgcaattccctaccaactcagcaagctccctaggctcgcccacttagattcactaccaaatttgagggttctagaactgtcgaacaatggattccatgggaccataccacattcactctcaagactacaaaagctccaagacctatatctgtacagaaacaacctcaccggaggaatcccagaggagcttgggaacctaaccaatcttgaggccctgtacctgtccagaaaccggttagttggaagtttgcctccctcttttgccaggatgcaacaattatcattttttgcgatagacagtaactacatcaatggtagtatcccgttggagatattttcaaattgtacttggctcaactggtttgatgtttccaacaacatgttaactggaagcatcccaccactaatcagcaactggacaaatctacactacttggccctctttaacaacacatttaccggtgcaatcccatgggagataggaaacttagcacaagtatatttagaggtggacatgtcacaaaatctatttactggaaagataccattaaatatctgcaatgcaactttggaataccttgcgatcagtgacaaccatctagaaggcgagctccctggatgcctgtggggtttgaaaggtctcgtttacatggatttgtcaagaaacactttttctgggaaaattgcaccctcagacactcctaacaatgattccgacctactcgccctggacctgtcaaacaataacttttcgggttatttcccagtcgtactgaggaatctcagcagactagaatttttgaatcttggatataataggatttctggtgagattccttcgtggataggggaaagtttttctcatctgatgattctacagctaaggtcaaacatgttccatggaagtattccttggcagctatcacaactccccaaactacaattgcttgatctagctgaaaataattttacaggctccataccagatagtagacactacattgatattgattggaagggaagggagcatccatttaaagacataagtctacttgcaacaggccatattcctcatagcatatcaaacttaatgagtctcgaatggcttaatctctcgaacaaccttctatcgggagagatacctacagcttttagtacttcatttgacgctaatttcgttacgcgcgataccgccacctttaacctgccgtttatttcgctggggcaagtcggtgagggcaaactgatggttatcggtaacccacactacaacagcattttgcgttgcccgaacggttacagctggaacgggggcgttaataaagatgggcagtgtacgctcaacagcgacccggatgacatgaagaacttcatggagaacgtgctgcgctatctgtccgacgataaatggaagccggacgcgaaagccagcatgaccgtaggcaccaacctggatactgtctattttaaacgtcatggtcaggttacaggaaacagcgctgcgttcgacttccatccggattttgcgggcatctctgttgagcatttaagtagctatggcgatctcgatccgcaggaaatgccgctgctgatccttaacggctttgaatatgtgactcaggtgggtaacgatccttatgcaatcccgctgcgtgcagataccagcaaaccgaagctgactcagcaggatgtgaccgatctgatcgcctatctgaacaaaggtggatcggtgctgatcatggaaaacgtgatgagcaatcttaaggaagagagcgcgtctggttttgtgcgtctgttggatgccgcaggtctgtcgatggcactgaacaagtcggtagtaaataacgatccgcaagggtatccgaaccgcgttcgtcagcagcgcgcaacgggcatttgggtctatgaacgttatcctgccgtagatggtgcgctgccgtacaccatcgatagtaagacaggggaagttaagtggaaatatcaggtagaaaacaaacctgatgacaaaccgaagctggaagttgccagctggctggaagatgtagatggcaaacaggaaacgcgttatgcctttattgatgaggccgatcataaaacagaggattctctgaaggctgcgaaggagaaaattttcgccgcgttcccggggctgaaagagtgtactaatccggcatatcactatgaggtcaactgcctggaatatcgtcctggcacgggggttccggttactggtggcatgtatgttccacagtatacgcaactaagccttaacgccgacactgcaaaagcgatggtgcaggctgcggatttaggcaccaacattcagcgtctgtatcagcatgagctctacttccggaccaatggtcgcaaaggtgagcgtctgagcagcgtcgatctggaacgtctgtaccagaacatgtcggtctggctgtggaacgatacgagctatcgttatgaagaaggcaaaaatgacgagctgggctttaaaacgttcaccgagttcctgaactgctacgccaatgatgcctatgcaggcggcaccaagtgttctgcagatctgaaaaaatcgctggtcgataacaacatgatctacggtgacggtagcagcaaagcgggcatgatgaacccgagctacccgctcaactatatggaaaaaccgctgacacgcctgatgctgggccgttcctggtgggatctgaacatcaaagttgatgtcgagaagtatccgggagcagtatcggaagagggacagaacgttactgaaaccatcagcctgtactcgaatccgaccaaatggtttgcaggtaacatgcagtcaactggcctgtgggcaccggctcagaaagaggtcaccattaagtccaatgcgaacgttcctgtgaccgtcaccgtggcgctggctgacgacctgaccggacgtgagaagcatgaagttgcgctgaaccgtccgccaagagtgactaaaacgtactctctggacgctagcggtacggtgaagttcaaggtgccttacggtggcctgatttatatcaagggcaatagctctaccaatgaatctgccagcttcacctttactggcgtggtaaaagcaccgttctataaagacggcgcatggaaaaacgatctgaactcaccggctccgctgggtgagctggaatcagacgctttcgtctataccacaccgaagaagaacctgaatgccagcaatttcactggcggactggagcaattcgctaacgatctggatacctttgccagctcgatgaatgacttctacggccgtgatagcgaagacggtaagcaccggatgtttacctataaaaacttgccgggccacaaacatcgtttcaccaacgatgtgcagatctccatcggtgatgcgcattcgggttatccggtaatgaacagcagcttctcgccgaacagcaccacgctgccgacgacgccgctgaacgactggctgatctggcatgaagtcggtcataacgccgcagaaacgccgttgactgtaccgggtgcaactgaagtcgctaacaacgtgctggcgctgtacatgcaggatcgttatctcggcaagatgaaccgtgtcgctgacgatattaccgtcgcaccggaatatctggaggagagcaacaaccaggcatgggcacgcggcggtgcgggtgaccgtctgctgatgtacgcacagctgaaggaatgggcagagaaaaactttgatatcaagaaatggtatccagatggcactcctctgccagagttttacagcgagcgtgaagggatgaaaggctggaacctgttccagttgatgcatcgtaaagcacgcggcgatgaggtcagcaatgacaagtttggcggcaagaattactgtgctgaatccaacggtaacgcagcggacacgctgatgctgtgtgcctcctgggtcgcccagacggatctttcggagttctttaagaaatggaatccgggcgcgaatgcttaccagctgccgggggcgagcgagatgagcttcgagggcggtgtgagccagtcggcttacaacacgctcgcgtcactcgatctgccgaaaccggaacagggaccggaaaccattaatcagcaataccccacggcgatgcccgtcctggcaaccgtcggaggattgatcatcggcagttttttgaatgtggtgatttggcgttacccaatcatgctgcgccaacaaatggcggagtttcacggtgaaatgtcgagtgcgcagtcaaaaataagccttgcgctaccgcgttcgcactgcccacattgtcagcagaccatccggatacgtgacaatattccgctgttctcctggctgatgctcaaagggcgctgccgcgactgtcaggcgaaaatcagcaagcgttatccgctggtggagttattgacagcacttgcttttttgctggcgagtctggtctggccagaaagtggatgggggctggcggtgatgatattatccgcctggctgattgccgcgagtgtcatcgacctcgatcaccaatggctgcccgatgtttttactcagggcgtattgtggacaggactgattgcggcatgggcgcagcagagtccgctcacgctacaagatgcagtcaccggcgtcctggtgggatttatcactttttactctctgcgttggatagccggaatagttctgcgtaaagaagcattaggcatgggcgatgtattacttttcgccgcgttaggtggctgggtgggggcattgtcgctgcccaatgttgctttaatcgcctcatgctgcggcctgatatatgccgttattacaaaaagaggatcaaccacactgccttttggaccgtgtttaagtctgggcggtatagcaacactttatctacaggcattgttttaa

SEQ ID NO: 40489 - DNA, 357 bp, Oryza sativa
  Clone ID: PAT_MRT4530_43927C.1
atgaggaacaggaaggtggcccaccagtcagcggccagcattgccacgacggtacaaaacaggccaaccagagcgcgaaacgtcgacgactctaccgcgggctgggaaacgccagcaaagcaatccacacttagggcccaggaaaggagctattggcggaccgcacagacagcccacgacccgaacaacacaccaggcaggggcgggaggaggagagcaatagagggtcgacgtggatatacagcggagcgagcacgtcgcctagaaatccctcgaggcgcccgcggggggctatggggcgagcacatcgccctctcctttaatttatccaatgtggacaatgctagaaagtcttag

SEQ ID NO: 40490 - DNA, 1304 bp, Oryza sativa
  Clone ID: PAT_MRT4530_43928C.1
cttccagtttgagaaaatggtgatctcatccaagggcaaagtgtgtgtaactggtgcttcaggcttcgtcgcctcttggctcatcaagaggcttcttgaggcgggctatcatgtgataggaactgtgagagacccaagcaatcgcgagaaagtgtcacacctttggagattaccaagtgcaaaggagaggctgcaacttgtgagagctgatctgatggaagaagggagctttgacgatgctgtgatggcttgcgaaggcgtcttccacactgcatctcctgtccttgccaaatctgattccaattgcaaggaagaaatgcttgttcctgcgataaatggtactctgaatgtgctgaaatcttgcaagaagaatccatttctgaaaagggttgttcttacatcctcatcatccacggtaagaatcatggatgagagtaaacatccagaaatctcactggatgaaacaatatggagctctgtggcactctgtgaaaagctacagctatggtatgccctggcaaagatatctgcagagaaagcggcatgggagtttgccaaggagaacaacattgaccttgtaactgttcttccatcatttgtgattgggcccagtttatcacatgaactgtctgtcactgcttcagacatccttggcttacttcaaggtgacacagatagattcatctcgtatgggagaatgggatatgttcacatcgacgatgtggcgagctgccacattctggtgtacgaagcacctcaggctactgggagatatctctgcaactccgttgttcttgacaacaacgaattagtcgccttgcttgcgaagcaatttccaatttttcccatcccaaggagcttgaggaacccatatgagaaacagtcatatgagctaaacacatccaagatccagcagctgggtttcaagttcaaaggggtgcaagagatgtttggtgattgtgtcgagtcgctgaaagatcagggacacttgctggagtgcccgttgtaacgaaaaaaagggatctttggcacggtaccaacaagctcatggccaagcacacacttgaattgttctgactttgattcgacacttcgcaagccactgcgtttctcttgtaataattcgcatgtcaattccctcaacaaaactacaaataaattgtcaatttgttgcctcaaaaaaaaaaaaaaaaaaattaaatgtaatgctctgcttgctttcactttggatgatgctaatttcaagcggtattaagtgccgctgatcagggtttactatttcagaataaaaaaaaaaaaaaaaa

SEQ ID NO: 40491 - DNA, 727 bp, Oryza sativa
  unsure (1)..(727): unsure at all n locations
  Clone ID: PAT_MRT4530_43929C.1
tnangggtgtccnccanccctccatcgcaaagccctttgccaagnaagacatgtcttcctntcctacttcnccgnccgtgccgaggccctcgggtatgcccgagtccttctctctcaagaagatgcncgacctgnccgagcaggtttgcgggggcaagnagtcctggggcgtcttctcgggcgtcaagggcgccctggaagagcttgaggnccgtccggagtactgcctcgacctcaactttatgctcgccctcgtccacacnggatacgagatgcccatcgaccgcgaggtcaaggtcgccaagaagatcaagggcaacgagcttggttggtgcttgggagctagtcttccattgctcgccaagggatctggatggacctgcaagatcgccgaggtccactgagcggttagcacgacattctgaacgatcacctcaaacctccacttatatcggcatgggctcgattgtccgccaaaatcacgaactatagggaccccaagcgggccatgatttgaatgtggcattgggaattgacatatttgtagaataaacatgccacagaccagacaccattcaacttgttactattattacaggggcacaggtagaacgcccggaacgatggcgaaaaggaagttctagattattttaaatatcaagacatgggaatgtggaatgtctcattattaatctaagcagttgctttcaaaaaaaaaaaaaaaaaa

SEQ ID NO: 40492 - DNA, 261 bp, Oryza sativa
  Clone ID: PAT_MRT4530_4392C.1
atgcccatgcaaaccagccagaaccttgaagcgaagggccgctggggatggcagaggtggagcaccacaccgttcctagcagtcgaggtgcagtgtcgggtggcgctcggcagcagaggcagtggcacaggcagagtagccagtgaaatggaacaccacgtgtcacctggcggcgtaggtacaaaaggcagagcgctcgggaatgcggacgacaacatgctgccgctgggggcccacaaagacagcagccatgatgcctga

SEQ ID NO: 40493 - DNA, 470 bp, Oryza sativa
  Clone ID: PAT_MRT4530_43930C.1
cgcggggattcgccgtgaacgcctacctcctcccgccgctgccaccgccggcgaccgacccgcgtctgcgaatggaagacgtcgcgctcgcctcctccgccgcaccccgccgctgctcgcctcctccgcagcacctgcgccgccctgcctcaccgccgccgcctagcctcctccacccccgcctctcgcctcgccgccacgctcgccactctgctgccctcgcctcctccggcgcccccaccgcgcccgccttgcctcgccgccgccgcctcgccttctccgcccctgccacgctcgcctctccggcgcccccaccgcgctcacctctcctccgcccccgccgctctccaccgccgctgctgactccgcgcgcgcttgctgcctcggtcgtcgctgtccaaaggagaagagggagagacagtgagagtaatgaaaggtgggccctatattttcttttttttttttgctaa

SEQ ID NO: 40494 - DNA, 286 bp, Oryza sativa
  Clone ID: PAT_MRT4530_43931C.1
atggcaggcagcggagcggtctcctctttccacctagactttgatgatcagcgcttcctattccacgacgagaaaggcagcaagaaaatgatatcaacgaccggaaaggggtgggacgagaagatgatgcgacctcctgcctccacgccttcctccccgcaaatccctcccctctccacgccgctcccctcacgccctccctgccttcctccccgcacatccctcctgctcaacgcggcggcggtggtcggcgggggaggcgacgagcggacgccggtgttcaagc

SEQ ID NO: 40495 - DNA, 231 bp, Oryza sativa
  unsure (1)..(231): unsure at all n locations
  Clone ID: PAT_MRT4530_43932C.1
tgttgtccccggagcccaccctcgtaatatataatccacccactctttggttcacggagtacacgcacctagtgctttctgtaggattaagtgcccattgaggcacaatgatcccccncgtaattttgtagaaaatgagaaaccccttgtgaactgtaccagaattttgctgggccacgcttggggtatatgaaagangggntttttttttaaaaaaaaaaaaaaaaaaaa

SEQ ID NO: 40496 - DNA, 256 bp, Oryza sativa
  unsure (1)..(256): unsure at all n locations
  Clone ID: PAT_MRT4530_43933C.1
ctccgtttctcttctcttcctctgcttcttgtgtgcgtctcccccttctccactcctctcggtgatcccgcatctccgtctgggatctccagagctccaccctatcccgccgctacccgcgtcggcacaccttctggcgagttccacctcagaccccagcaccgcgccactcgncgncgccgagccttcctcctcctcgntatccccttactcgacgtcggnctcctccctcacgntagggtccagccccgtccat

SEQ ID NO: 40497 - DNA, 208 bp, Oryza sativa
  Clone ID: PAT_MRT4530_43934C.1
cctatccttaaggaggctagcagagtttaagagccagcttaaggagctccaaactgaaaagaatctcaggctgcaaaagattgatgtacagatcaattgtatccatgaaatctgcaacatgatgtctcttgatctccagaaagaactttatgattgttcatcccagcttcgttgagttgggaaggaccacatcgatgagtataagcga

SEQ ID NO: 40498 - DNA, 765 bp, Oryza sativa
  Clone ID: PAT_MRT4530_43935C.1
gattagcctcgtcagctacaagtgatcgatcgatcgatgtcgtggtggatgcggcaaagaggagtgagaagccaacccaagatgatgatggcggtgagaggttgctgctgccgggaggtggtcgtggcgcgagccgtgtgattgcctgctcctcctccgatcctgtgtgtgcatgcgtctccgtgcacggcgggcatgtgcgccggcctccgttccctcgcttccgtcggagtctcgtcgtgagagaagcaaaagatcgaacacgttgtgtgcgtgtgtgcgcgcgcctagctgaagctcagtttctttggttggagttgaagccggccggctagctagctggccatctggagcgtggcgtcgctcgtccggcaggggctgcggtggcggcggcggcggcggaggaggacggcgcgggtggtggacgagagcgcgctcgcggcggcggatggtggcgacgccgccgcgcctgcaggtggcggcggcgacgcggcgggggttggggtggtgccgatggcgagcgtgggcggcgcgcttgccagggcgctgctggcgctggcgtgcaccatccacttcgacggcgaggacggcggcgccggcgcgacggaggaggcgtgggcggccagcgggtggcggccgcgcgccgacgaggtgttttcagttttgggatttatgattgacccaaacaccggtgcaaatcttggtcggattaaggaaacaatcatcttccggaagcaccagagatgtaacacatcagaaatctag

SEQ ID NO: 40499 - DNA, 1183 bp, Oryza sativa
  Clone ID: PAT_MRT4530_43936C.1
cgttttaaccgccttcgccgccgccgccgcgatatcgatcccctccctctcgccgtcgacgccgtcggcatccatggcgccagggctctacaccgacatcggcaagaagaccagagatctgctttacagggactacgggacgcaccacaagttcaccctcaccacctgcacccccgagggcgtcactatcacagctgcaggaacaaggaaaaatgagtctgtctttggtgagctccaaacccagcttaagaacaagaaattgactgttgatgtcaaagcaaactcagagtccgatcttttaacaacagtcacggttgatgagtttggaactccagggttgaaatcaattcttagtttggtagttccagaccagaggtcagggaagcttgaactccagtaccttcatgaatatgctggcatcaatgcaagtgttggcctgaattccaatcctatggttaacctttctggtgtctttggaagcaaagagctctcagttggtgttgatgttgcattcgacactgcgactagcaatttcaccaagtacaatgctgcattgagtctaaccaattcagaccttattgcttctctgcatctgaacaatcatggtgataccttgattgcatcctactaccacctggtaaagcaccattcgaacactgccgtaggagctgagctgtcccacagcttctcaaggaatgagagcacactgatctttgggtcccagcactcattggaccctcacacgacagtgaaggctcgcttcaacaactatggcatggccagcgcgctcgtccagcatgaatggcgtcccaaatcgctaatcaccatctctggtgaggttgacaccaaggcaattgagaagagcacgaaagttggcttgtccttggtgctcaagcattgagtatgttttgcatcctaggaatttttcttcagttcttgtggattggaataacatggaaaaaacatggccacagctaccattgtggcttcattttgatcttgagttctttccccaccattaccctaggcaaacattagcattggctatatatttttatcctcggcgcctgttgttaataattttgggtgatttgagacctattgctgaatactgtcaaatatgatggagataaaaaaaaaaaaaaaaaaaaaaaaaaaaaaaaaaaaaaaaaaaaaaaaaaaa

SEQ ID NO: 40500 - DNA, 380 bp, Oryza sativa
  Clone ID: PAT_MRT4530_43937C.1
tttatttaaaaaaaaaaaaaaaaaaaaaaaaaaaaaaaggaaaaaaagatataaggaaaaaaaaattaaaaaagggggggtcgatttagaggattctggtattgcgtcacatagcatgcaatggggggggtcttttttgggggcccctagtttgggtccacgggggggggacttaaatttttttttttggggaacccttggtttattccaggggggggggttttccacgaggtccccttgggaaaacctggggttcccccaatttaggctgtttgggaaaggtcttcttttcggtgggggggctttaagggaggggggcaggccgattgccctttcccataaagggcgccttgtgagggggttagggcccgcgcctttgg

SEQ ID NO: 40501 - DNA, 682 bp, Oryza sativa
  Clone ID: PAT_MRT4530_43938C.1
ggaggacgacggacactactacagccagccagcctcgggggaataagctagggagcatcgcgcgtgacgatttgattaattaacctgtataaattcgagtgctaatttgtcacgcgcgattaattaacctcgagtcgatgggttaatgatgctgctggtgagaaaattactagcggatcccaagatctgcacgccatatggtacttacccgctgtgtgttcttgctgctagctagctgctagctgctagctgcttcttttttacaacctctcttaagaaagcttcaagcttgtgtgtttttgtgctatcatctcatgtgtgctgctgcaaagggggagaaaggacggccatggcagcggctagctagctgtgattattggagaaggttgatgtacactgcagatctggcaacctgcgcacctgccccagaagagaggagagcgtcagtatagcggctggcccagatctggaaactgcgctgtaaacgtatgtatattggttcgtacttgttggcttcgagttggagatcgatcgatctgatcttatatgttgctctcatcgattgatttctgttgatagaagtttcttgaggttttctatttgcctatttgttgtgtactgattgttcgagtctgaaagtggttgcttgattctaactaaaaaaaaaaaaaaaaaaaaaaaa

SEQ ID NO: 40502 - DNA, 339 bp, Oryza sativa
  Clone ID: PAT_MRT4530_43939C.1
atggtgtcagtggcgagcacactcgggcagcgcatcaccgtcgccgataaggacgctgcgtcatccgtgcatgcgcgctctctagctgtaaaatatcagtgcaccggtgtatcctgttgcgcattcgacttcacccaaggagctgagcgagtgagagtggccgtaactattacctgcacacaggtggttgcattctcaactgaacagtcgcaaagctatggcactcaccggactgcccgttctggtagagtcccagatgaaccggcaaaatacggcgagcacgcaagcacaatcagcagcgcgtcgtatcgtatgcgtgcttgcttcgtgcgcgcgtag

SEQ ID NO: 40503 - DNA, 1131 bp, Oryza sativa
  Clone ID: PAT_MRT4530_4393C.1
atggagcaacccacaattcaaaacctttatgctcctcgggctaatctttgtgagccatcctattcttcaaaatcaatcctatccgatggctacgaaattggtcctggctttatagccatgattcgagagcaaaccttctctggtggtattggtgaaaatccatacctccatcttcgggactttgagctaaatgagaaggaatatctcggtgtagcttgggccaggttctcattgttaactcagtctggcccagacttgtctttacccgaccatgtgttgttacaacaatttcgatacgggttagacaaggagtctgccgcaaatctcgatatctccgccgaaggatcattcgcacacaagacaaccgccgaaggaagagagctcttagatttgatcttagagaacgattctttcggccgaagcgaagccgtcccggaggtcaagattatttatgaagatcctctgcacgaggagttggaacccaactcaactgccgaatcctcattccggttgctggagccagaggaagaggaaattcatcctccagaaattccattccaattcaaggatgatctttatgaagattatggaaacaccctgaattattccagcaaaacgaaggctcatcccaagcatgagccgttcgaggaggtgatgtttgtatcttcgttcgttccttatgaacctattgcccatcttcatgaaaccgaacgaccctcatcaccctcgatcaagcctaagccttgtccgcctggtcttcagaacgttgttcttgtttatcatcaagaaagaaccatgttcttgcacgatgcatctcttgagatggagaaccttcaggcctcggacaagcttgagacatcgactctagagggcgagagaaaacatttcacatatgagcatgaaagtttttatttcgaaattcccctgaattcatgctcgcttaaggaatcccagagtcctgttcgattagtgtcgcgtctctgtgcgaggaccacaaccacctttcagtcctcatttctagcatgtttagaaggatggttgtggatgcttacatttatcataaatactagaaatctcgtatttttttgtggcactaatcttgcagagcgatgtcccgttggtcaagcttga

SEQ ID NO: 40504 - DNA, 1463 bp, Oryza sativa
  Clone ID: PAT_MRT4530_43940C.1
ttgaaaaaaatactttgcatttttgaacaactttcaggactgaaaatcaattttaataaaagtgaggttatttgtttgggagaagcaaaaaaacaaagaggagtacagtaagatcttcacttccaatataggtaatttgcctataaagtatttgggtataccgattaataaaaaatgaatcatgaataaagactggaaacagactgaggagaaaatggaaaaaagggtaggatgttggcaggggaatttgcaatatataggaggaagagtaactttgataaactcttgtttgagcagtacacctctatacatgttgtctttttacagaatttccaaaggagtgaaagaaaaaattgattttataagaagaaggtttctttggcaagaagaccaaaggattaggaaataccatttggtacaatggccagtagtttgctctccaaaagagcaagggggtttgagaattagagacttagacattatgaacaaagctttgttgggtaaatggctttggaacctggagaaaattgattgaatgtggcaaaagcttttaaaaagaaaatacctatcaaagaaaatcttggcagcccagaaaatcaaaaagggggcttcacatttctagcaagggattatggaaattaaagatgttttctttagttattgctggaaaaaaccaggaaatgggacaaatactctgttttgggaggataactggatggggggagcctctggcacaaaaattcccttacctatacagagtcacacatacacattatataactctggcagaggttaaacaaaaaggttggggtagcataattttagaaggaacctattgggagacaatttgagggattggaattacattaaaagttgctgtgatcaagtaagactccaaagatgaaactgtttggggactaaccaaaaatgggatcttcagtgtaaaatccttttatactgctatgaaaatgcaagaggctgcttctatgatgggggtgatacacaagaagatttggcagataaaagttcctatgaagatcaggatcttcctttggcttttgttgaaagatagtgttctaaccaaagacaatttaaagaaaaggggttggaaaaaaggaaatgaaacatgtcagttctgtgataaaaaatagtcaattcaacacttatttttttattgccccatgacaaggcttacttggaatgtggtggcatgtacttttggtttgcaacctgtgaaaaacattcaatatgctttgggttggggtcatagtgtttcacgaaacctcatcgagtctaaatttcaattcaccaggaatcaactggcacatccaaacgagctacgtatttgaaatgattatcaatttggtattattaattctgattgtagaattatttttttacgagaaactacaggagaggctcctacgactgtgattgtagaattattgaatgatgaaaatatt

SEQ ID NO: 40505 - DNA, 464 bp, Oryza sativa
  Clone ID: PAT_MRT4530_43941C.1
aaacaaaacagggggggaagccgagaaaaaattttttacagaaacccccccacagagacccagaattacgaggaaccaccatcccctaaggggatgggaaaaaaaccacccgccattggattgggtaaccaaaaaaaaaaccagggggtccatccatgggtccatcctaaccggggaaaaaaacgaagggcaccggccggggcactccggggggtggacggggaaacggtcggggtccacccaatattcgaaaaaaagggggggggcgcgcccccacacaaactgggggttttggggcacggggaactcctccatgggcttttccttccaccaagacctcccctttttggcccacaaggtccccgggccccgggcccccttgcggggggcccgaatccgggggggttcccccccccgcccaacccttggggggggagtgggggacggggcccctaacggggggg

SEQ ID NO: 40506 - DNA, 1338 bp, Oryza sativa
  Clone ID: PAT_MRT4530_43942C.1
ccgggctgcaggcaggcctgcagccatgatcaactcactatacttggtgaacaggtcggtgtaccagtttactcagaaagaacagaagccaaacctgcacaaataaccaagaatgccgtggaagaagccaaaagaaagaatattgatgccattgtaatggatactgctggaagactgcagattgacaaatcaatgatggttgaattgaaagaagtgaagaaggcagctaatcctacggaagctctgcttgttgttgatgctatgactggacaggaagctgcagcattggtcaccaccttcaatattgagattggtatcactggtgctatattgactaaactggatggtgattcgaggggtggagcagcactaagtgttaaagaggtgtctggaaagcccatcaagtttgtcgggcgtggagaacgaatggaggaccttgagcttttttatcctgaccgtatggcacaacgtgttttgggaatgggcgatgtactttcatttgttgaaaaagcacaagaagtcatgcgtcaagaagatgctgtagaattacagaagaagatcatgagtgcaaaattcgacttcaatgactgtctaaagcaatcacagaatgttgcaaaaatgggttccatgagccgtgtagttggaatgattccaggcatgaacaaggttactcctgcacaaattcgagaagccgagaaaagacttgcatttgtggagtctatgatcaatgcaatgactgccgaggaaagggaaaagccagaattactggctgaatcacgtgacaggaggataagagtggctgaagagtccggaaagagtgaacaagaggtgagccagttggttgcccagcttttccaaatgcgtgctcagatgcagaagctgatgggtgtgatgaccggacaagaagcacttccaggcatggggaatctcatggaatctcttaacgccgatgagaaggcacctcctggcactgcaccgacggaagaggaggcacagcaagacgaggcagagggagctggatgcagtccctagttcttgagctggtgagcgttgtagttcagagttactgctcttttgcttcagagacccggatctgagaaaaaagagatgaaaaaaaaatgttgtcttgctaccttttttagtttgtacgtaggagatctgcaggaagttcataggaaacagtaatttcctaccaaattgtaatgttacttagccagtcctactcagcaatgcaatcggttcactcgaatgctcggactttttacattacattaatcatgaatgtatatgttgtagaaggatcaggttcatttcaaacttcaaaaaaaaaaaaaaaaa

SEQ ID NO: 40507 - DNA, 876 bp, Oryza sativa
  Clone ID: PAT_MRT4530_43943C.1
atggtgctcctcccccaaatcctcccctccccgcgcctcgccgccgcggccgcctcccccaacagcgcattccgcccggcgccccgcctccactcctccgccccggcccgacgcgggcgaggggcccgcctcgccaccgcggcgagcgcgtcggggtcggggtcggggtcgtcgccgtcgtcgccggagccgtaccagccggcggagtcggacgacgggctggtggagctgccgctgttcccgctgccgctcgtgctgttcccggacgcgacccacgcgctgcacatcttcgagttccgctaccgcatcatgatgcacaccgtgctccagaccgacctccgcttcggggtggtgttcgccgggtccggcgccgggggcgccgccgacgtcgggtgcgtcggggaggtcgtcaagcacgagcgcctcgccgacgaccgcttcttcctcatctgcaaggggcaggagcggttccgcgtcgcgcgggtcgtgcgcaccaagccctacctcgtcgccgccgtgcagtggctcgaggaccgcccgcccgccgagacccccgcgccgggggacgacgccgaggcgctcgccaccgacgtcgaggccctcatgcgggacgtcatacgcatcgccaaccgcctcaacggcaagcccgagaaggacgtcggggacctgcggcggggcctcttccccacccctttctccttctacgtcggcaacaccttcgagggcgcgccgcgggagcagcaggcgctcctcgagcttgaggacaccgccgccaggctgcgccgcgagcgggacacgctccgcaacacgctcaactacctcaccgccgcctccgccgtcaaggacgccttcccctcgtcgccgtcgtcgggatga

SEQ ID NO: 40508 - DNA, 861 bp, Oryza sativa
  Clone ID: PAT_MRT4530_43944C.1
actttaatgcgcagtcagaaaatggccccctcctaaaaaagaatgttgggatttcaagcttaaattcagcgtcaccaccattttatccctctgggtgcctccaaacccagatttctctggtgccagctcaaagaagggacaatatgcaagcagggggttccaataaagtctttccatcttctatgaagatggatgacaatgcaaaggtacaatctggcccagcagttagaagggattatggtgcacgtgacaggtttcaacatgctgatggtcctgttagacaatctccaaggagtggaggaacatcgttgaattcatcaggatttgcagcatcgacaagtaatcatgggcaaatcttctgttggtagaactcaaggaggaaatgggattccttcaaacaatcagtccacttcgtctcttcaccaaaatcctagggctcctacacaccagcaaagtcacacatgagtcgcgcaccagaagtcagggcaagtgcaaactcaatctgcaatgagaataccaactcagcagttgaaccatcgcactggcaacccgtcaaccactcagcatctacctgttagatcaactgaaagtgctgagaatggactgtctcctagctcgaacaaatcaaatgcatcatctggggcaggaaactccaacagtcaggaagcaggaaggcgttcctttatgtatggaggagcccaggttattgaggctgctggcgctattggtcttgcccagggcgaacataattttcctggcactccagctctgcttccagacatgcatcgtgccagtcagcatcctggtggtgttggagatactactgttgaatggccctcctggctatgaggctaacagcag

SEQ ID NO: 40509 - DNA, 341 bp, Oryza sativa
  Clone ID: PAT_MRT4530_43945C.1
ttcttatgcaaacactcgaatcctacttatttttgactttgctggttcattttatattttttttttctagggctcaaagacttgcaatacggagtttggaacacaaatcctttgtggcgtgtaaagcgaaattgccgagatggagcctgaaggactattgtggagttaaagtatacgatcctattttgtcgctgtcaaaaactccaaaaccctcaactatatatctgaactttctgaatccatttcgggattacgctacgatggagaaatctttaaattggagctcaggcagtgtttggcaaatatctaagggaaatgatttcccacccctctttaaatct

SEQ ID NO: 40510 - DNA, 1522 bp, Oryza sativa
  Clone ID: PAT_MRT4530_43946C.1
atggtgggcggcgagatgtcaaagcagtggacaagatcggtggcgagggcaagagaagcctcgtgggcggaaaacggcatctacgtaggcaaatctatcggcgtgttcgaccgaatacgggggaggagatgcgacatggaggagtcactggacttggagacaacagatctaggaaggaggagttgggaggtgtcgagaagggcgtgcagagtaagagtagtggccgtgcagtgcagtgaagcccgcgccgcgccgtttcacgggtccacgacgccgcctggtggaaccggtccaccgttcacggccaccgccaccgcgggcgcagacgccgaggcgcgcgcggcctcgccggagaagaggaggaggatggcggagaaggcggtggggcacgggcccaggacgaggatccgcggcggcggcctcgccgccgcccccaccgcgccctccgccgccgcgaggaggctgtctgcggtgtcgtacacggcggcgccgaatctgaccaagaaggttcctgacccgaaggttgtgaagccagccaggaaaacgacgccggtcaagaagcggccgcaggtagatcaggcgcagaagcagagagaagagcttgccgctttgcaggagcagctgagtggcctgcaaaagaagttgcttgagaaagatgaggccctgaggtcggctgagcacttgattagccgaatcagcgcggcgaatgcagcggtcgatgaactgagagggcagcttactgagaaggaatcgcagattgaatccaccggatcagaattgcatggtgcaaagattcaattggcagagaaacaagctgcactggagaagttagagtgggaggcaaaggtttcaagtacaaaagtcgaagagctccaagtagatgtggcgtctatggatgttgaaatctctgcgttaatgaagctatttagaaaaataacagaaaacgaccgagccccttactcgagggagagagccgatgattcatctttggaatgtgaaccggttcaacttgacgatatggttggtgacatcgacatggagaagatggagcaggaaatgtctgcatacgctacagctctcgctgccgcgaaagacaatcctactgacgagttcttgaaggcagtaacagaggcaagactaagactccaagccttcgtactctaatttggattgaagcactgacatgccctgtactacctgaaggagtagctctattttgatgggccatcatgtgttatgcgggtgtcataatgcatctaaactgacagctcttgcttcctggatctcacatttcaaaaagatccatgtttgcgttctgtcggtctgggtctgtctgatgatgccactgagcttgttattgttgtaactttgtaagctaagaaccgtatgacactatgaccgaacatctgaacatcttagtagatgtcacaccgtgtaccattttagtgaagggtgaacagaaggtgagttcagtttacctgaacgacctaaagattgacgttcaaaaaaaaaaaaaaaaaaa

SEQ ID NO: 40511 - DNA, 1492 bp, Oryza sativa
  Clone ID: PAT_MRT4530_43947C.1
cacacacaaccgctctgcacaaggggccatggacaacaagccggcgcaagaacgccgcgagacgtgggtcccgggcgccgtcatcgtcggcgcgggcccgtcggggctcgccgcggcggcgtgcctcgcggcgcggggcgttccggcgacggtgcttgagcggtccgactcgctggcgtccacgtggcgccaccgcatgtacgaccgcctcgctctccacctgcccaagcgcttctgcgagctgccgctcctcccgttcccggaggagtacccgacgtacccgtccaaggaccagttcgtggcgtacatggaggcgtacgccgcggcggcgggcgtcgcgccgcgcttcggcgccaccgtcgaggaggccgcgttcgacgcggccgtcggcgcatggagggtgcgtctcgacggcggggaggtgctcatggcgcggtggctcgtcgtcgcgacgggggagaacgccgagccgcgggtgccggactttcccggcatgcagaagttcgccgggtgtgccatgcatacttccgagtacaagtccggcgagcagtttgccggtaagaaggtgttggtcgtgggatgcgggaattctggcatggaagtgagcttggatttgtgccggcatggcgcgaagccctccatggtggtgcgcaacacggtgcatgtcctaccaagggaaatgttcggtctatccacgttcggcatcgccatggcgctgctgcgatggctaccggttcagctcgtcgaccggttccttctcacggcggctcacctcatcctcggtaacacggggcagttcggcctaaggcggcccaaaacagggcccatcgagctcaagaacctcaccggcaggacacccgtactggacgttgggacgctagaccacatcaaatccggcaaaattaaggtagtgggagcagtgaaggagatgacgaggcaaggggtcaggttcacggatggcaaggaggagcaattcgacacaataatcctcgccacaggctacaggagcaacgtgccatcttggctcaaggatgccggtgacttgttcacgagggagggcatttccaaggtccccttccctaacagctggagagggcggaatggtctctacaccgtcggattcactcagcgggggctcctcggcacgtcatcggacgccctcaacgtcgccaaagacatacattgccaatggagagaaagggaccgatctgctattaatgtacttgaaataagcaactcttccttttgatttgactggaaatgtacagtgttttgattaggaatattgtattgtgtgcatataacaccatgttctatctcccttttcaaccaagactgatgatcttgctctgccttatgtcgattacttgcctattgagcatcttttgggccaactgttattatgacacgaatttagaatctatatatcatactcctttaaaaaaaaaaaaaaaaaatcgagccctcgtgccgaattcctgcgcccggggga

SEQ ID NO: 40512 - DNA, 418 bp, Oryza sativa
  Clone ID: PAT_MRT4530_43948C.1
cagccgccgccgcatccgccccatccgcctccgctccttcctcctcctccgccgccgcctcctccgacaacgcctataccagcttccagggcctcctcgcgctcgcccgcatcaccggctccaactccgacgagacccgcggcgcctgcaggaagtgcggccgcgtcggccacctcaccttccagtgccgcaacttcctctccgtcaaggaggacctcgacatggaggacgatattgatgccgggattcgggccgcctcgcaggccaacgcccaggccaagttggacgagttcaggaagaagacctccggaggcaaggacgccgacgagggctccgatgacgaggatgaggacgacgaggaagacagcgatgattcctctgattcggacatcgatcctgagctggaaaggataatcgc

SEQ ID NO: 40513 - DNA, 432 bp, Oryza sativa
  Clone ID: PAT_MRT4530_43949C.1
atggcgatcgggcgtccatctccatcttcgggcggcgacactctatccatgggagccgaggatgggaagggaacggcggcgtgggtgttgaacagtatggtctcgtcgcctccggaaccatcggaacagtatccaactccaacgatcaaggagcccagcgacccggtggaaagagtagcggcggcgtggtcgtcgtcgttgtcgagggatggggggatccaccttgtacagtatagggtgaagggggatgctgtcggagtagtggtgcacggggaagtagaagcacaggttcgagctgtcctcctcgtcgccgccgtcggaagcatcgtcacccagatggaagatcctcttgtttcgccttggctcgccgcatctctcttcctcacttccacgtggtcgccgtgcggatactgggccgtgcgaccgatctag

SEQ ID NO: 40514 - DNA, 259 bp, Oryza sativa
  Clone ID: PAT_MRT4530_4394C.1
cccccaaggccttttaaccaccttttagtgccttccggcctctgtatgtttcgtggttggaatttgtggagccggataaacaatttcagcaccacggagatactagctatgaccactcgagttactcccagctctgaataccgactgcacttgatgaggggaaagctgggtaccctgcagggtgaaccggtgccggaattgcccggggtggcagaacccaacgcgtgccgtgggatgtgttggcaactggaatgctaaa

SEQ ID NO: 40515 - DNA, 1430 bp, Oryza sativa
  Clone ID: PAT_MRT4530_43950C.1
tcttgttctttctacccgtctccattggagtgtacttctctaacccggagtggggttcaagaacggacatgctgctagagaggtcctctcggacgcggatggcgagctcgagcaccgccgcggcggcgctggtagtggcggcgcttctgctctcgtcgtctccctcaccggcggcggcggccgcgggacgaggaggagaactcaggatgaagcattctgatggtggctattcttataaccgcactctcgcccatatttttgtgcaatatgcatctgctgtgtatacgtctgacttaacctcacttttcgcgtggacatgcccaaggtgtcaaagtgacacaaagggttttgagatgatagagataattgtagatgtggagaactgcttacaggcttttgttggagtcgcccctgatccacaatccatactcattgcttttagaggcacacaagaacacagtgtctcgaattggattgaagatctcttctggaagcagcttgatgtaggttatccaggcatgccagatgcaatggttcatcatgggttttatactgcatattataatacaacagtgcggcatgagatcttggaatctgttcggtgggcaaggaagacatatggaaggctacctataaatgttgtaggtcactcgatgggaggggctttagcatcgttctgtgcccttgacctctctgttaagtatggatcgcaggaagttcaactcatgacttttggacagcctcgggtaggcaatccttcttttgctgcgtacttcagtgaccaagtcccgagaacaatccgtgtgacccatcagaatgacattgtcccacacttgccaccatatttttgctaccttggcgaatggacatatcaccacttctcgagagaggtttggcttcatgagaccatagtaggaaatgtagttactaggaatgagaccatctgtgatggatcaggcgaggacccaacatgcagcagatcggtctacggcagaagtgttgcagatcatcttgaatactacggtgtctcactacacgctgattcaaggggaacctgtcaatttgtgattggctcaaccaacatggcatatggtaccattcttgaagttgatagaaccatcatcatgacaagatatccgcaagagtggcacgccgtggaatctatttaaccctttgcccgagggtaaattgtatataattattttccttttgtgcatatagctcatgtaatgtaggtgtactgggttctccaggagctctcctgaggataaggagaggtttcatttttaatatgtgcccccctttactcaagtgagaattgtacatggaagctccatatgaacattgtagacacgcctttattgatgtacatagcaatatcaatggaataaataatagaaggatttgatggtattatatgctttttcacc

SEQ ID NO: 40516 - DNA, 534 bp, Oryza sativa
  Clone ID: PAT_MRT4530_43951C.1
ccacgcgtccggaaacacacacacaaggcacacaggattgagggagaagaagataaggagagagagagagagagggggagggagggaggggtagcacatgagctttactagctttgcccggcgtggcgaggagctctccttgccttgcctgtcgctgcgctctttcttggagtgctgtgcgccgcgattgggagctgtagatctgaacggggcgcttgttcggagaccctatgatgaacggcccctactttcaggcggccaagggcggcttcaacaggaaggtgaagggctccgacatggttaaccccgagccaggctcctacgtaaggagagtcatactcttcggcggagcgctcttctgacgggccggcgagccgtgctgatacggcggggatatgacggcaccgagggctgcagcatgagcgaccccggagatcattctccttaagaaagaaaaaattttgggggaagaaaaataaacatttggagcgcctacaaggtcacaaatgggagggagcgcagggtaaattcctg

SEQ ID NO: 40517 - DNA, 3792 bp, Oryza sativa
  Clone ID: PAT_MRT4530_43952C.1
atggcgtcgcggcagcacaatgcgcagttccacaagaacaagacgctcgacaacaaatatatgctcggagatgaaatagggaagggagcatatgggcgagtgtacaaggggcttgacctggaaaatggagacttcgtggccatcaagcaagtatcgttggagaacatcccgcaggaggatctcaacatcatcatgtctaccttcatgtggtggacagagagaagaattttcagtgggcagcaagaaattgatctcttgaaaaatctgaatcacaaaaatattgtgaagtatcttggatcattgaagacaaggagtcacctccatatcattctagagtatgtggagaatggatcacttgccaatattatcaagccaaacaaatttgggccattccctgaatcattggtggccgtctacattgctcaggtgctggaaggacttgtttatcttcacgagcaaggtgtcatacatagagatatcaagggcgcaaatatattgactaccaaagagggccttgtcaaacttgctgattttggagttgctactaaattaactgaagctgatatcaacacacattcagtggttggaactccatactggatggcccctgaggtcatcgaaatgtcaggtgtttgtgctgcatcagatatctggagtgttggttgtactgttattgagctactcacctgtgccccaccatattatgaccttcagcccatgcctgcgctgtttcgcattgttcagctaagtagcattttgccacttgcatcttttaactttttaagtagtgttattttatttgacataggcggcatatctcgctggcaccaaaattattttgaaccgtctttcgaaagtgaccttgataagccattgctaagttcctggtttgttagtactgtcagggatattgatgaggacgatgaaggatcaagtggtgacaatcactctggattttctggcccaccacgagatacacaaacacctactgcttctggccttgaacaggaggatggaagaaaagatttggtttctgaatctgccaggcaagatatacctgatgagtttcatgatggaatgttaaaaactactgggagtagtagttcgaatgatgtggaacttatgaaagataacgtggttcttaataaagatcctacattagttttccatgagaagctatcattggaatcttcactaggcgcaactgatttaaatggtaaactaactcatgaggtatcacaagatggtccaccaaacaagttaactagcagcggccaagaatcaagaaagagtgatggtaaatatgtagaagatgaaagtaaagatggttcaagtcttgaggatggtgatgctttcagcttccaggctggaggacaaaatatcaacttccaaaaggaagctaaaacttcagttgagatggctaacgagctaagtagattcagtgacacacctggagatgcctcctttgatgatttattcccacctaagaagcgaggagatcatggggctgaagcttcaacatccactactggtgaagagcttcaatacaatggtgcacaaaatgatctcgcgaaggaactcaagactaggatggctcagaagcagaaggaaaatgatactgagcacatgaatggtggaaaacttcttgaatatgtcatgcgtttgagggaagaagatattgatggaacggcatttgatgagactattcctggagagagtctttttcctttgcagtctgtggaatacagcaaaatagtagcacagctgaaacctggggaaaattccggtggttatgaattttgccgtgccagatcgtgcaaaggaagttcgggtgcaagcactctagaggatcccccagctttgtcaagccaggtcttcaaactccagcattcgactccaagaaatgacttctgtcgcatagcggcaaaaaacgggatacttcttaggctggtcaatactcttcatagcttgaatgaagcaacaaggtttgcttccatctccgggtctggtgcttcagtaacacagaatggctccacccccaggcgaaggtctggtcaattagatccgccaatgctagaaatttccaaaacgaggctggatcatcaccattcatctggttcactgcaatctttacaagcagatgcagataggcatcatatcataatggatccttcagcatcgcctagattcaccgatatggcggctgctggtcacatggagagaaatgataatgatcccattaggccacaacggcttagtgtttctgcaggaaggacatcaacagatagatcaccaaagcatatagagctagtatcaaatgggcatagtagtggtcaaaatgatcaaattcgtcccctactgagcctgttggagaaagaaccaccctctcggcatgtatctggacaacttgattatgttcgccacttatctggtctagaaaggcatgaaagtattttgccattactgcatgcttcaacagagaggaaaactaacggcgaacttgacttgttaatggcagaatttgctgaggtctctagacagggaagagaaaatggtaaccttgattccaacataaaaacttcaaatagggttccaagcatgaaatatgcaccatcatcaggtccaacaacttctaatgagggagcatcaacatctggagctgcatcacagacagcatctggtgtgttatctggatcaggggtgttaaatgcaagaccgggaagtacaacatcatctggcctattagctcagatggtatctatgagtgctgacgtggcacgtgagtaccttgagaaagttgctgatcttcttttggagtttgcacaagcagacactgtcgtaaaatctctcatgtctagccaaagccttcttgcacggcttttccagatgtttaacaagatagaaccgcctattcttcttaagattcttaggtgcattaatcatttgtcgggtgatcctaattgtctcgagacactccagcgcacagatgcaatcaagcatctgataccgattcttgaacttcatgatggccctctagtttatcaaatacatagtgaggtcctcaatgctctgttcaatctttgcaagatcaataaaagaagacaggaacaagcagctgaaaatgggatcatccctcacttaatgaattttgtcatgtcagactcacctctcaggcaatatgctttacctctgctgtgtgatatggctcacgcttctcgcaactctagagagcagttgagggctcatggaggattggatgtgtacttgaacttattggaggatgatgcatgggcgtgtactgcgttagattcaattgctgtttgcttgtcccatgacaatgatcacagaaaagtggaacaagccttgttgaagaaagatgccattcagaaattagtgaagttttttcaagactgccctgaacaatattttgttcatatattggatgcttttttgaagataatcacgaaatcttctcggataaatacagcaatggctaccaatggtttaacgacactgcttattgcaaggcttgaccaccgagaagctattgcccgtttgacactgctaaaattaataaaggttgtctatgagcatcatcctcgaccaaagcagctcatagttgagaatgatcttcctcaaaagctacaaaacctgatcgaagaacgaagggatgggcaacgtggcggtcaacaggaaaagaattcattcatcccaaacgggacaagtaaaattatttcaggcgcagccatgggcgcatttcatatgaaaaaagtcattcccacgaacgtgtga

SEQ ID NO: 40518 - DNA, 4127 bp, Oryza sativa
  Clone ID: PAT_MRT4530_43953C.1
atggcgtcgcggcagcacaatgcgcagttccacaagaacaagacgctcgacaacaaatatatgctcggagatgaaatagggaagggagcatatgggcgagtgtacaaggggcttgacctggaaaatggagacttcgtggccatcaagcaagtatcgttggagaacacatcatcctcgacccaagcagctcatagttgagaatgatcttcctcaaaagctacaaaacctgatcgaagaacgaagggatgggcaacgtggcggtcaacaggtattggtcaaacaaatggccacctcgttgttgaaagcactgcacatcaatacagtactgtgatttgtctctcggccattgtgtatttttcctctcaagttgtatatgttcgccccggaggaaaagttttgtttcttctttcgctgcctcttttgtacctgtggtttccctggcgtgagagccagtctgttgcacgcctgatccctcttttatcgggagaaaggttcaacgttcgggtgctagatacaaaatgggttcctagagcccttcttggtcgtttatatttagtgtactattagtgataattggtgtaaattagttttccccagtttcctttttagaactcatgtagactttcttgcatctgatgttagtaaaattttgctctaggtgtgctggctattagctactcacctgtgccccaccatattatgaccttcagcccatgcctgcgctgtttcgcattgttcagctaagtagcattttgccacttgcatcttttaactttttaagtagtgttattttatttgacataggcggcatatctcgctggcaccaaaattattttgaaccgtctttcgaaagtgaccttgataagccattgctaagttcctggtttgttagtactgtcagggatattgatgaggacgatgaaggatcaagtggtgacaatcactctggattttctggcccaccacgagatacacaaacacctactgcttctggccttgaacaggaggatggaagaaaagatttggtttctgaatctgccaggcaagatatacctgatgagtttcatgatggaatgttaaaaactactgggagtagtagttcgaatgatgtggaacttatgaaagataacgtggttcttaataaagatcctacattagttttccatgagaagctatcattggaatcttcactaggcgcaactgatttaaatggtaaactaactcatgaggtatcacaagatggtccaccaaacaagttaactagcagcggccaagaatcaagaaagagtgatggtaaatatgtagaagatgaaagtaaagatggttcaagtcttgaggatggtgatgctttcagcttccaggctggaggacaaaatatcaacttccaaaaggaagctaaaacttcagttgagatggctaacgagctaagtagattcagtgacacacctggagatgcctcctttgatgatttattcccacctaagaagcgaggagatcatggggctgaagcttcaacatccactactggtgaagagcttcaatacaatggtgcacaaaatgatctcgcgaaggaactcaagactaggatggctcagaagcagaaggaaaatgatactgagcacatgaatggtggaaaacttcttgaatatgtcatgcgtttgagggaagaagatattgatggaacggcatttgatgagactattcctggagagagtctttttcctttgcagtctgtggaatacagcaaaatagtagcacagctgaaacctggggaaagtgaggacgtgatattatcagcttgccaaaagcttgtgtcaatcttcaatcaacggcctgagcaaaaacagatttatgtgtcacaaaatggtttccttccgctgatggagcttcttgaacttcccaaaaaccgtattattacttctgttctgcaactcatcaaccaaatagtaaaagataatacgaccttcctagaaaatgcttgccttgttggccttattccggtggttatgaattttgccgtgccagatcgtgcaaaggaagttcgggtgcaagcatctaggttccttcagcagctttgtcaagccagcaccttgacattgcaaatgttcattgcatgccaagggatccctgtattggtgagttttctggagcctgattatgcaaaatacagggaaatggttcatcttgcaatcgatggcatatggcaggtcttcaaactccagcattcgactccaagaaatgacttctgtcgcatagcggcaaaaaacgggatacttcttaggctggtcaatactcttcatagcttgaatgaagcaacaaggtttgcttccatctccgggtctggtgcttcagtaacacagaatggctccacccccaggcgaaggtctggtcaattagatccgccaatgctagaaatttccaaaacgaggctggatcatcaccattcatctggttcactgcaatctttacaagcagatgcagataggcatcatatcataatggatccttcagcatcgcctagattcaccgatatggcggctgctggtcacatggagagaaatgataatgatcccattaggccacaacggcttagtgtttctgcaggaaggacatcaacagatagatcaccaaagcatatagagctagtatcaaatgggcatagtagtggtcaaaatgatcaaattcgtcccctactgagcctgttggagaaagaaccaccctctcggcatgtatctggacaacttgattatgttcgccacttatctggtctagaaaggcatgaaagtattttgccattactgcatgcttcaacagagaggaaaactaacggcgaacttgacttgttaatggcagaatttgctgaggtctctagacagggaagagaaaatggtaaccttgattccaacataaaaacttcaaatagggttccaagcatgaaatatgcaccatcatcaggtccaacaacttctaatgagggagcatcaacatctggagctgcatcacagacagcatctggtgtgttatctggatcaggggtgttaaatgcaagaccgggaagtacaacatcatctggcctattagctcagatggtatctatgagtgctgacgtggcacgtgagtaccttgagaaagttgctgatcttcttttggagtttgcacaagcagacactgtcgtaaaatctctcatgtctagccaaagccttcttgcacggcttttccagatgtttaacaagatagaaccgcctattcttcttaagattcttaggtgcattaatcatttgtcgggtgatcctaattgtctcgagacactccagcgcacagatgcaatcaagcatctgataccgattcttgaacttcatgatggccctctagtttatcaaatacatagtgaggtcctcaatgctctgttcaatctttgcaagatcaataaaagaagacaggaacaagcagctgaaaatgggatcatccctcacttaatgaattttgtcatgtcagactcacctctcaggcaatatgctttacctctgctgtgtgatatggctcacgcttctcgcaactctagagagcagttgagggctcatggaggattggatgtgtacttgaacttattggaggatgatgcatgggcgtgtactgcgttagattcaattgctgtttgcttgtcccatgacaatgatcacagaaaagtggaacaagccttgttgaagaaagatgccattcagaaattagtgaagttttttcaagactgccctgaacaatattttgttcatatattggatgcttttttgaagataatcacgaaatcttctcggataaatacagcaatggctaccaatggtttactgacactgcttattgcaaggcttgaccaccgagaagctattgcccgtttgacactgctaaaattaataaaggttgtctatgagcatcatcctcgaccaaagcagctcatagttgagaatgatcttcctcaaaagctacaaaacctgatcgaagaacgaagggatgggcaacgtggcggtcaacaggaaaagaattcattcatcccaaacgggacaagtaaaattatttcaggcgcagccatgggcgcatttcatatgaaaaaagtcattcccacgaacgtgtga

SEQ ID NO: 40519 - DNA, 508 bp, Oryza sativa
  Clone ID: PAT_MRT4530_43954C.1
ccccgcgatatatcctccgccaactccccgctactcgcgtgttctccttggagagccccgtgtttgcgagttcgcactgggaggaggcgaatacgatcgacgactgggacttgcctactgctgacatcactgcagttctttgcgcgcgaacttgattgcggccagagcgctgctggcaatagcgtcgctgggagagaagcatttgtatcagatgactctcatgctactgtgaccaggacttgtgaatcggccagcaccgagctaaaggatggccgtaccctcaatgttaacgatacgcctggattatatgaaacgaccattacatctgaggatgacggtgaagaaattgctaagtgtatgatcatggccaatgatgggatacatgcagtgctgatggttatttctgacacatctggttctaatgctaaagatagcagtaccattgcgacaattaaagaggttgtcggagagaatattgttgatcacatgacactagtctatacttatg

SEQ ID NO: 40520 - DNA, 621 bp, Oryza sativa
  Clone ID: PAT_MRT4530_43955C.1
tcatgtggtgaagaggaaggcgaggacatgggaggcggagagcgcgcagaggacgacgagggcgtcggtgaagtcgagcgtcaggaccacgaccaccagccagagcgcgtagagcacggagtaggtcgacgcccagtgccgccaccgaagcaggtccacgccctccaccaacttaccgcccacctcaaatcgcgccatgccggtgccgtagatcggggcgggagagcggcgaggtcgtcggggggagggggcgagctcagatcgggattctctccccgtcctcctcctctgccgccgccccggcgatggtccctcccggtccctcgttcgcctcgcgaaaagcccgtgcgcggccgccgtcgcagccgatgtcatcttcctcatggtcggcttcccctctgacgtctgctccacctccctcacccctccacgggcgccctcgtcggcctcgccccaggcggcgcgctcgtcgacatgaccacctccgaccccaccctcgccacggagattgccgaggtcacggccgataaaggccggtctccggcggcgaccgtggggcccgcaaggcgacgctctccatcttcgaggaagagcatgtgaggatgacagcgactgtgccat

SEQ ID NO: 40521 - DNA, 667 bp, Oryza sativa
  Clone ID: PAT_MRT4530_43956C.1
atgggaggcggagagcgcgcagaggacgacgagggcgtcggtgaagtcgagcgtcaggaccacgaccaccagccagagcgcgtagagcacggagtaggtccacgccctccaccaacttaccgcccacctcaaatcgcgccatgccggtgccgtagatcggggcgggagagcggcgaggtcgtcggggggagggggcgagctcagatcgggattctctccccgtcctcctcctctgccgccgccccggcgatggtccctcccggtccctcgttcgctgtcgccaaccccttccacttgctaccgtcgtccaccaccggcacgaacgtcatgggccagtccatggccaaaagcccgtgcgcggccgccgtcgcagccgatgtcatcttcctcatggtcggcttcccctctgacgtctgctccacctccctcacccctccacgggcgccctcgtcggcctcgccccaggcggcgcgctcgtcgacatgaccacctccgaccccaccctcgccacggagattgccgaggtcacggccgataaaggccggtctccggcggcgaccgtggggcccgcaaggcgacgctctccatcttcgctggcggcgacacagccgtggtcgcccgcctcacgcccctgttcaagctaatggggaacgcactgtacatgggc

SEQ ID NO: 40522 - DNA, 1054 bp, Oryza sativa
  Clone ID: PAT_MRT4530_43957C.1
cacttctggatagagcttatgggaagagcaggtacataccaaaagccatatcctgatgagtttgatttaggtccctatgtgccttgttttgttaaatttactggaaaagattgtaggactgcaatagaacacatgggacagtttctcgtgcattgtggtgaagccaactctaatgatattttgaagttaagattatttcccctatcattgtctggtgctgctcttatttggtttgtcacgcttatgccaaattctattcatacatggtctcagttagagcattaattttattgtcgttttttcattactcattcttcattgccgaaatcaaatgtaaatagttttcaacagaatgggtcatatgtacaaccaacaatgcataaagccaaacataggcttcaaaatgatgacattaaattagcaagttcggctatggaccaatttcgtgaggaatttagtttcaagagaaagaaccttgaagaagaaatatatagagacatgatgaagaggttgaatgtttgtgttttaaataaaaggtctgaaccaacttttgtactagaacaaaagccgaataatgtagaattatcgactaagaaaaaaatggtacatgtgtttgagttttctgaaattgaagaaccttttgttctaccagatgaaataaacaattgtgtagccgaatggatagatagtaaatccaaaccattcgtttgttagctttaaaaccatctccacaaaagtgtcggctagaggagaataagtatacttttgacttgaccatgtgtgatcatatttttgatgcattgttgaaaatagttatattaaattacttgatcaccatgtcatgccattacttcaggatttaaaagaacgaatttattgtaaggggcacaattcgttcgatcattgtaccagagtttgtaatatttttcgtcagaaaatacaataggctattaatgaaggccgattgcattttgcaactccaagaaagtcatatgccaaggatgacccaggaccgataccgtgtgtggagtatgattctgagaggatgattgtg

SEQ ID NO: 40523 - DNA, 237 bp, Oryza sativa
  Clone ID: PAT_MRT4530_43958C.1
atggggaccccgccactgcccagggagcgttgtctcatcctcggatccacgccatctctcttgaccagccgagcgcaccgtcatcaggctacatctccatccctcaagctccgcgccgttctccatcccaacgaccgctcgccgttttcgtcgtggggtcccctcccctcccaccgtctagggagaaccatctcctcggatccatgcccgggcctccaccctcgtcagctctgttga

SEQ ID NO: 40524 - DNA, 228 bp, Oryza sativa
  Clone ID: PAT_MRT4530_43959C.1
ctccaaggtggtcgactcctaggccgcgtctccgccaacgatcgcacgcgatgcggctgggaaggagagcccgcttcgcgacaggcgcctcgcccaccgacgcaacggagcaccccccagggtgatgggacttcgacagcctcggcctgtgcggccgccgacctccggcgaggaggctgagtctcactatagccgctcacacagaccgagaacgatccgaggacacac

SEQ ID NO: 40525 - DNA, 322 bp, Oryza sativa
  Clone ID: PAT_MRT4530_4395C.1
ctttctttaggtggaaatgcaagaacagccatcatctgtaccatgagtccagcgcaaacacatgtagaacaatctagatatactctattctttgcacctgtgccaaggagggtacgataatgcaaaaggtaataggtggtatagataagcattgtgaagactcaatgaagttctagctgaagtgactagaccctgacggcctctctcctgagtcatatatgaaaggacaggaggttagcagatgaaagaatgaggctaagagaaggcatccagtgactgagttcgaggagtggtatacaggtgcctttgctccagacgatct

SEQ ID NO: 40526 - DNA, 4221 bp, Oryza sativa
  Clone ID: PAT_MRT4530_43960C.1
atggaggcaaatcacaacatgctgctgaaggttggatactctggtggacagatcagggatatacctctgcagcctctcaaaaaagcactgcaaaaggtatggggaagttgttttttggacatctctcaagtggattccaatttgtttatggctcattttcgtacttgggaagatctttcttgggtttggaataaacaaccttggtcttttgggagtgacactttcttgatggaatgggctacagctaatgaaaaactcaaacctctttctgcttacacctttaaatccatcatggtcacagttagattttatggaatcccaatggctcttaggacagaagatactgctaggaaagtggttaaggaaattggtgaaccctctgctgctaaccccattgtggaagagaatctcaagaaagatcctaggttcatgagtgttagagttaagatggatgtctctaagccagttcaagctatagtgaatcttgatattgacatcagagaacctctcaagcattttgcaagtcctggtgctagaacttgttcttcacaagaaggaggctccaaagtcaatatgataggacaggtgaatagtgctttgcaagatggcagatttgctcttgtgggcccgagcctttttagtcaaaaaagcatccaacccaatactatgcagaaggatgtagaacaagccaagggcaagagtgcagtagtacagcagcaaaatatacctcagcacctggatggattgcctttagcagaaaatgccaatattcagccttccagggttcagctggctcaactggcaagggttcactccccaaatctgggccaaccaataactgctgcatctgcccctaaggtctgtaccactcggattgatcctggcaatgcgcttagatttcttgttagggttgctaagtatgttgcgaatctagagtatggaatgctaccaatgtcagagcaagactatgattggtgggttgatattagcagtgggtataatttggataaatttcatgatgaaatggctagcaagataatctgggggccaagccaagaaattagagtttggggtttggacactgaaattggcactgaatgtaagttgacaaccaatgaagaatttggccagtggatgaattctatgttggatgataagctggtagagtttggtgttgaagttatttataaaaagggatatgaacctattgaaggcattgcaaatccagttgattcagctattcaaggtgtctctggtgtggtaactgcagatccaattgatcagtcaagtgctcaagttctctctgctatgattagtgctgaagtttcttctcctggtcatgaagaagggacgggtgatacctctagccatccacaaaatgcagaagaggctaatgctgttgtagattggagtaagttggctatacttgttgaacctgagcaagattgtgatgttaatttattgttggatgaggatcaagtttttgaggccatgggcttcaaagcagcagatcagagagcagcagctgctgcagcagctatggaagaaactgcaattcctattattccaaccgagattcagcaagacatgttagatgcagccattgtagtggacgatgaagtacccattgatgtgttggattgggacagggatgacccagatatgtcagtggggacattttacccttctatggatgagttcagaatggcagtgaagcaatatgccattgttcatgagtttgaactagagactgaaaagtctgacaaagaaaggtttagagggaaatgccatgcaattggttgcccatggataattagagcaaagacccaacctaataagagtgtcagggtcctattctacaaatatgatcacaagtgtgcttcaagaagcagagttcgtggaaggatggcatctcaagcttgggttgctgagagggcaattccatttctcaacaagaagaatgggatgggtccaaaggaacttcagaaggagctgcaggacacctacaagataaccataccttatcatacagtttatcatggtaggaagagggcaacagacaagttatttggtaagtggtctgattcatttgattggttgtataggttcaaggcagaggtggaaatgaggtccccagaacagagggagtgtatgaggcatttgatggagaacatgaagaaattatttcatgggtctatctatgcgaggaagatgtggcctgcagctaagacttacatgcttgagaagcatgacaagtggatggatgaagtgacaacagctagtccagaggtgaaacaatggcttaaagaatatcacaacctactgtgggccagaagcaagtttgattgtgctataaagtgtgactacatcaacaataacctggcagagtcatggaacagttggatcaaagacttgaaggatttgcctgttgatgctcttgcagatgccattagggagaaaactttgatcttgtttgagaagaggaggaggatctctacagctctcaatggagtgattcttcctgttgtcatccatcagttgaatgaagcctcaagaggtttaggccatctgaaggttactaaaggaaatcctgaccaagcagaagttacagagacatacaaggatgaggaagtgactaggcatgtggtgtaccttgataagtggacatgtacatgcagggaatggcaggtcactgggaagccctgcccacatgcattggcactgatcacaacaattaggcagccaaatatggagaaatatgttgacacagcttactctgtgcacagatttcaggcagcatatgcaagtgttatccctaacatcacagacaagaagcagtggccaaaagttgataaaggtttcaagctcctgccacccgttcccaagaagagaggagtgggtaggcagagaaagaataggatcccatctgctcttgaaaagggcaaaggaaaggccacaaggcaagttcaatgtccagactgccaacggtttggacataggaagggtagtgtaagatgtgaactgactggaactaggaagaggagatcagaagttagccctagaactcaggaagggtttgtttggaggcgcaatgtttctcaccctgtcgttccccatggatcacactctatggaatctgaaaaaactgctttgtctcatgcttgttctggggatctgctggtgggtttggagttctcagctcagaaagcagattacaatgctttggagaaagatctcagagataaggaggcagcagatgtctttacaaagtccttctcgtcgggctcaaggtcaattactgctgctcatttttcaagtgctggctttggaggacctggtccctttgggcctgctgtttctgctgggatggttcagtggggtggaatgccagctgacgattgcactagggctaatgatgttggttcttttgtagcccaaagctctcatggggcttctatctgtatgggtgatcttaatgacattatgagcccggaggagaagtttggttatgaggaagaaatttggagtatcatcaagggcatgaggaaaaatgcttcccctgggccagatggtcttaatgctgctttttacagatctgcatggagttggataaaggatgatctaatgactctggttcaggacttctatcaaacagacgacctaatcattacaggtacagcaactgttgaggaggccaatcaaataaaaagcatcattgacaaattttgcaggaaatcaggacaaactcctaattgggataaatctgggatccttttcagtggtcttgaaattagagacattcaagctgtcaacaaaagtctaattcttaattctgcttggaggctcatcaccaatcctcatgaacaaatggctcaaattcttaaagcctgggaaaatggagtaactggcatagggatattttttcattttccccaggatcataatgctatgtttatcaaagcaatctctgataaagctcagagtccattacaagctgaacttctggccctccaacttgctttagaaatctccaaatttctgaatcttgcagatgttatatacttgatggataacgctaccattgtggacgcagtaaagaggaacaacttcctgcaggaacccggacactggagccctaggccgttttggctgcagataacttcttccaccccagctgatctcatgcaagttagatggatcccaaattcccaagggagatga

SEQ ID NO: 40527 - DNA, 1113 bp, Oryza sativa
  Clone ID: PAT_MRT4530_43961C.1
atgcaatcgcagagtccgatgcagcagatgcaacaattgtgtctccaacaacaggtacaagcccagatgcaagccggaatcaggatcagagccaaagccagtttgttttccaagagcaagcacccgcaacctcgaacagtacaccaccaagccctcagcagaccagcacagctaagccgccatcgatccctgaagcaacaagtgctacctatagtggttatggtttttaagggcagtttttgcaaagtgtccaaccattcatggaagatgtacgacaagtcacttctcagaaggttattcatcggcaaggcgtcagcgtcatcaggtcgacaactttatttgcagcaccccagctcctcaaattgcatcagttccaatgcagagtcggtcagcattaagagtgatgaggacatcaacaccaacgatacatctacgcctccacaagtacaacttcatggtcctattgcccgtgctcgtgcacgtcaactcaactatcagttgcttgttcatcttgttcttgctggttctcgattgcttgcaggaacaaataccctcgtggttgggctgatcgtgcatccgtcgagattcacgaccgcctctggagttggtgtaacgattgctaaggcgcaacatcccccacctgtcatccccgacctctagccaggccggcaactgctgccattgccaccccactccgccgccgaatccaccaccaccccacccgcgcctctcaatcaaaccgcgtgggaacgaccccctccacgtcgtccaccatttcccccactctccccgcaaggaacggcgctggtttgagctccaattcgcccacgtcggagccccactttgctggccattgctgccccgcttggctacggttcttcctccccgagcgcgccaccgttcgccggcgatctccagccgcgcgccaccgccgctcccaccgtcaacgcactgtgtagacgccaccaatagcttcgccgtcgcgcgctgcacctcggcctccacctctcctccccaaaccaccgccgaaaccccgccgccacctccaacccgaccgccacctgtcatccccaaccttcggcctcccaggccggcaactgcgcatgccgccat

SEQ ID NO: 40528 - DNA, 3951 bp, Oryza sativa
  Clone ID: PAT_MRT4530_43962C.1
atgaagccctcagtttgtccttcttggattgatcctggcaatgcgcttagatttcttgttagggttgctaagtatgttgcgaatctagagtatggaatgctaccaatgtcagagcaagactatgattggtgggttgatattagcagtgggtataatttggataaatttcatgatgaaatggctagcaagataatctgggggccaagccaagaaattagagtttggggtttggacactgaaattggcactgaatgtaagttgacaaccaatgaagaatttggccagtggatgaattctatgttggatgataagctggtagagtttggtgttgaagttatttataaaaagggatatgaacctattgaaggcattgcaaatccagttgattcagctattcaaggtgtctctggtgtggtaactgcagatccaattgatcagtcaagtgctcaagttctctctgctatgattagtgctgaagtttcttctcctggtcatgaagaagggacgggtgatacctctagccatccacaaaatgcagaagaggctaatgctgttgtagattggagtaagttggctatacttgttgaacctgagcaagattgtgatgttaatttattgttggatgaggatcaagtttttgaggccatgggcttcaaagcagcagatcagagagcagcagctgctgcagcagctatggaagaaactgcaattcctattattccaaccgagattcagcaagacatgttagatgcagccattgtagtggacgatgaagtacccattgatgtgttggattgggacagggatgacccagatatgtcagtggggacattttacccttctatggatgagttcagaatggcaatgaagcaatatgccattgttcatgagtttgaactagagactgaaaattctgacaaagaaaggtttagagggaaatgccatgcaattggttgcccatggataattagagcaaagacccaacctaataagagtgtcagggtccaaataaacaaatatgatcacaagtgtgcttcaagaagcagagttcgtggaaggatggcatctcaagcttgggttgctgagagggcaattccatttctcaacaagaagaatgggatgggtccaaaggaacttcagaaggagctgcaggacacctacaagataaccataccttatcatacagtttatcatggtaggaagagggcaacagacaaattatttggtaagtggtctgattcatttgattggttgtataggttcaaggcagaggtggaaatgaggtccccaggtagtgtagttgagatagacacagttaaaattggagataaggggggctgtagaccctacattagcatagattctactgcccttaatggatattggaatggacacatgcctgcagccaatgcattagatggacacaattggatgtttcctttggcatttggtttttttgattcagagaccaaagagaactgggtttggtttatggagcagctagccaatgcaattggtccagttccaaaattagctatccacactgatgcatgtaaagggttggaaactgcagttcacaaggtatttccatgggcagaacagagggagtgtatgaggcatttgatggagaacatgaagaaattatttcatgggtctatctatgcgaggaagatgtggcctgcagctaagacttacatgcttgagaagcatgacaagtggatggatgaagtgacaacagctagtccagaggtgaaacaatggcttaaagaatatcacaacctactgtgggccagaagcaagtttgattgtgctataaagtgtgactacatcaacaataacctggcagagtcatggaacagttggatcaaagacttgaaggatttgcctgttgatgctcttgcagatgccattagggagaaaactttgatcttgtttgagaagaggaggaggatctctacagctctcaatggagtgattcttcctgttgtcatccatcagttgaatgaagcctcaaaaggtttaggccatctgaaggttactaaaggaaatcctgaccaagcagaagttacagagacatacaaggatgaggaagtgactaggcatgtggtgtaccttgataagtggacatgtacatgcagggaatggcaggtcactgggaagccctgcccacatgcattggcactgatcacaacaattaggcagccaaatatggagaaatatgttgacacagcttactctgtgcacagatttcaggtagcatatgcaagtgttatccctaacatcacagacaagaagcagtggccaaaagttgataaaggtttcaagctcctgccacccgttcccaagaagagaggagtgggtaggcagagaaagaataggatcccatctgctcttgaaaagggcaaaggaaaggccacaaggcaagttcaatgtccagactaccaacggtttggacataggaagggtagtataagatgtgaactgactggaactaggaagaggaagaaaaacaacaagacaaaaacaaatgtgggaaggaagaaagcaaagggtgccattgatgcccaagctgctgcagttgatgttcaagcgaatacgccaagaacaagagctgctgcagttgatgttcaagcgaatacaccaagaacaagagcagctgtagcaaaagaagcagctgcagaatcacaagtgcatgcaacacaaacaagcagtcctggaccaatcactaggaggttgctgtcctggtgttacatgaatctcggtaatcatattatcttgttatttcaaacacaaaggccaatcaagcattttctgtcgcatctgccaggtcaacacagttcaccagagaaggactattacaagattcttggtgttcctaaagatgcttcgcaggaagaaatcaagagggcttttcattcacttgcaaaaaggtaccatccagacacaaacagggggaatactgctgcaaaaaggacatttcaggaaataagagatgcatacgaggcaagattccacaagcagggtcataatccctttgcagaattctacagacaaaacaatggtcctttttccagtaaattttacaaaatattctccgaggtttttgagcatgatgtagatgcacatgccaacgatattgaggtagaggtgaatctttcctttagagatgctgttaaaggatgcatgaagcaagtctccttcagtgcaaaaaatctttgcgactcatgtgatgggagagggtacttggccaatgcaaagatgtatgtttgcccttcatgtagaggtgcaggaagagtttccattaacccattcacatccatttgtacttcttgcagaggctttgggaaagtaattaaggattactgcctgacatgcaaaggttcaggggtggtagatggcatgaaatatgtaaatgtgaccattccagcaggggttgattctggcgatacaattcatgtaccagaggctggacatagtggtggacgtggaaccctacctggaagtttgtacattaagcttcaagtagcaagtgatccagtgtttgttcgtgatggtgctgatatccatgtagacaaaaagattagcttcacacaggcaatgcttggtggaaaagttgaagtgccgactttagatggcacagcagaagttaagatacccaaaggagttcaaccagggcaggttatagttttaaggggtaaaggattgcccaaccaggctgggtatcttggggaccaacatgtccgatttcgaatacattttccctcaatggttaatgaacgtcaacgtgccctgttagaagaatttgcagtagaggaagccacgaaggaacagagttccttttcagctggaaactggtgggagctagttgaaaatatgaaggggcaaactttcttgcttgggcttggcttcctcgtactggttcacctgctactgaccaagactgtgaactag

SEQ ID NO: 40529 - DNA, 174 bp, Oryza sativa
  Clone ID: PAT_MRT4530_43963C.1
gaaaatcggaggttatcatctggaaagaaaatgcatccattttttgcttctcggaaaatacacaaaggtgctggccaagatattcttaatgttgaggatgaggatatggattcactttgtgcttttgaaagagacccacctttatgtcctgttcatgttttgtacgaactggag

SEQ ID NO: 40530 - DNA, 1095 bp, Oryza sativa
  Clone ID: PAT_MRT4530_43964C.1
atgtttgctcgtgtgtacgctgttgaatggcggctgcagaaaacagtagtagcgctggccttcagcgaagtagcgaacagattcagccgaccggcgggcgaggcgggagaggaggaggtcgggtggccggcgaccaacgacgggcgacgcggcggcggcaatgacgtgagagcaggagggacgccccccacgccgccgccactgctgccgccaacggcgcgggcgccagatcgcggcctggatgacgacggcagcttcctcgctctccccatcgcgttccccgtcggcgccgtccgcctccgcctcatcctcccgcgccagtcctcccacgtcgctggcctccgtcagctctcgcgacccgcggacatcaccccggagctccgccgtttccttgactcccgcttctgctcgcaagccgacctcgccgtggccgccaacgtcgaggccgagatccgcgggcgttacgcggagctcgaggtctcggtatctgaccactccgtccgcctagcggccgccgccgcagcttactcctccagttgcagcgccgccggcaccgctctgagtaatgtccgcggctgcctcgctgccctgaatgcctccacctctgaaccaagggttacagaagaggtggaggttgggagcgaggagatgttgtttgagcaacttacttctctggcgaaagaggtggcgatagtggagttggtcagggattacgccactgagtgtgacattagtttcctcggacaacggcgacggggagagcaaggaggccgccgtcgttatccatggcagctggtggagaggcgacggaggccgacggcgtggggggcaaccctcctgctcccacgttgtcgccgtcgacgctgctgccgccgccgcgtcgcccgtcgccggtcgcccgacctcctcccgccttgccccgttggccggcttgcccagacgggggagaaaaatgagagaaaggaagtgagagaagaggggaaagagaaagagtgaggctggcctccatcactttctggaacaaatttttctagtattaattctgggaaaccatcagagattgtgaaccccttattttcaatgaagggtgacctg

SEQ ID NO: 40531 - DNA, 487 bp, Oryza sativa
  Clone ID: PAT_MRT4530_43965C.1
aggctagtcaaaaagcgagcgcaaacttcattcacattggctactgcctcaagagtacaaaagaagaatgcacgcgcgttacccgtcaatgtctgggggatcacatcatgacaagctgcacgtggaaacttacttatgtgcaagccatacctacattgacttgccttgcgggaagcttatcattttacttgatccggaaagagttaaaccggaaacgtgccaagaaaaccgaacattgctatggccatatggacctacttttccagcacaagattgctttgacttttgtccccagaggagaatcaagcactccaccggattaacttcacactgtagcattccaagggcctggagataatccttctttgagttcccacttgtcacattcatcaaaacattgtgtagagatggctagcattaatcatgacacatctgctggtataagcaacctggactactattctccggtcagagaattactgcgtgt

SEQ ID NO: 40532 - DNA, 655 bp, Oryza sativa
  Clone ID: PAT_MRT4530_43966C.1
taccgaaaaccgggtgatatagattatgttaggtttggacctaccactctgtaatcctccatgcatagctcttgtttgtgctgtttgtcggcaatgaagttgtatgttgtagcagaatactttctttctgtgaaagtaaacatggaactgcttatgtcaaaaaaaaaaaaaaaaagggcggccgccctttttttttttttttcgagaggttcaactgactgatatttcagatgtcaagttttcaagcaccgtaacaaataaaatcagatcagtacatcatattataggagagatggcacaatccaggcaaaagttcttaaattctagtttcatagctgctttgacagcaaaacaggatctagttggctgcggcagctctcttccttggggtagcctcagtaccttctctgaagttgctcttgaacctcctaggcacatgtcgcatgtacctcatccttccagttcctgtggtcttgcgcctaatggccttcacgctccagttgtacttgcggatgcgggcggcggggtagccgcaggaggagcaggtgctcttctggaggtggaagcctgcgagccacaacaagatcaccacgttagagctatggagaagccatgaggaggccgcggcggcggcggcggctgcgaggtttaccat

SEQ ID NO: 40533 - DNA, 657 bp, Oryza sativa
  Clone ID: PAT_MRT4530_43967C.1
atggcgatgtcgccgcacgaccagcacgagcacgagccggaccacgcccaccgctcgccgtccaacggcacggcagcgaccagcaccatcgccaccaacagatggggtccctactccggcgccggcgacttcgccagcaacatggccgtcatcctcgccgccctgctcgccgcgctcgccctcgccctcgcgctcaacgccgccgtcaggtacctgctccgccgccaccgccgggccaggcaacaaccagccgccgccgccgccgccgccgaggacccggagaagccgcctgtgcaggaggccgacccgccgccgccgcccccggctctggtgtactccgcggcgggcaccaagctggccggcgccgcggagtgcgccatctgcctcgccgagttcgtcgacggggacaccgtgcgcgtcatgccgtgttggtgccaagaaattcctctggaatctgggctcagatttgcacagataaaggtttatcagacagggcctttcaatgtagaggctgcaaatttgcttccaactccgggaatttgcacaacctgcagatttgtttacaggggagtggtgaaacatcttcattttttatatggagactggagagacatcctagcttgttttgtgaagggaaagaaaaacacaaacagttag

SEQ ID NO: 40534 - DNA, 4500 bp, Oryza sativa
  Clone ID: PAT_MRT4530_43968C.1
atggaggacaagaagcagcagcagcagcagcaacgagaagaagcagaagcagaagaagaagcaccagtagtgccttcatcgttgcgagctgcggcaacctgcaggagcctgtcgtccttgtcgtcgtcgttgcggtgggatcatcgtggggacgacgacgaagaggaagctgagctgagatgggcggccatcgagaggctgcccaccttggacaggatgcgcacgtcggtgctgtcgtcggaggcggtggacgtgcggcggctgggggcggcgcagcggcgggtgctggtggagaggctggtggccgacatccagcgcgacaacctgaggctgctccgcaagcagcggcggaggatggagagggtgggcgtccggcagccgacggtggaggtgcggtggcgcaacgtgcgcgtggaggcggactgccaggtggtttccggcaagccgctgcccacgctcctcaacaccgtgctcgccaccgcgcgggggttgagccgccggccgcacgcgaggatccccattctcaacgacgtcaccggaatcctcaagccttccaggctgaccctcctccttggacctcccggctgcggcaaaaccaccctcttgctcgcccttgcaggaaagctcgacaaaaatctcaaggtgaccggtgaagttgagtataatggtgccaatctgaatacctttgttccagagaagacatcagcttatatttctcagtatgatcttcatgtccctgagatgactgtcagagagacacttgacttctctgcaaggtttcagggcgttggcactagagcagagatcatgaaggaagtcattaggagggagaaggaggccgggattacccctgaccctgacatagatacatatatgaaggcaatatctgtggaaggcttagaaaggagcatgcagacagattacattatgaagattatgggacttgacatttgcgctgacataatagtcggagatataatgagaagaggtatttcaggtggtgaaaagaagagactaaccacaggggagatgatagttggaccttcaagagcactattcatggatgaaatatcaactgggttggacagctctaccaccttccaaattgtttcttgcctccaacaagtggctcatatctcagagtctaccatactggtctctctccttcaaccagcaccagagacttatgatctttttgatgatattatcttgatggctgaaggaaaaattgtataccatgggtctaagagttgcattatgaatttttttgaatcatgcgggttcaagtgcccggaaagaaaaggagcagctgattttctacaggaggttttatctaagaaagaccaacaacaatactggagtcgtactgaggaaacatacaactttgttactattgatcacttctgtgagaaatttaaagcatctcaagttggtcaaaatcttgttgaagagcttgcgaatccctttgataaatcagaagtatacaataatgctttgtccttaaatatctactctctaaccaagtgggatctcctcaaggcatgttttgcaagggaaattcttctcatgagaagaaatgccttcatctacataacaaaagttgttcagcttggattacttgctgttattactgggacagtgtttctacggacacatatgggggtcgatagggcccatgctgactattatatgggttccctcttctatgcgctcattcttcttttagttaatggtttccctgagttggctattgcagttagcagacttcccgtcttttacaaacaaagagactactatttctatccggcgtgggcttatgcaataccttcttttatactaaagattccactttctttagttgagtcaataacttggacatcaatatcttactacctcattggctatactccagaagcatccaggtttttttgccagctcctcattctattcctcgtccacactggagcattatcgttgtttcgatgtgtcgcctcatactgtcaaacaatggtggctagttcagttggtggtaccatgtcatttctagtcatccttctatttgggggctttatcattcctcggctatctatgcctaattggctaaaatggggattttggatctctccattgtcatatgctgagatagggttgactggaaatgagtttttggcaccacgatggctaaagttccattctctcaagcgttattctgataccatatggacctcagctacaggaacttcccgagcaattatatctcgtgataagttttccacatttgatagaagaggcaaagacatgtccaaggacatggacaataggatgcctaagttacaagtaggaaatgctttggcacctaacaagactgggacgatggtgttacctttctcaccacttacaatatcatttcaagatgtgaactactatgtagacacccccgtggaaatgagggagcaaggttacaaggagcgaaagctacaactattgcacaacatcacaggagctttccaaccaggggttctctcagcactcatgggagttactggagcaggaaaaacaactctacttgatgttcttgctggaaggaaaactggtggtgttattgaaggagatatacgagtaggaggttatcctaaaattcaacaaacttttgcaaggatatcaggctactgtgaacaaaccgatgtccattccccacaaatcacagtggaggagtctgttgcatattcagcttggttgcggctaccaacagaagtcgattcaaaaacaagaagagaatttgttgatgaagttattcaaacaattgagttggatgatattagagatgctttagtaggactaccaggggtaagtgggctatctacagagcaaaggaaacgtctcactattgcagtggagcttgtgtccaatccttcagtcatattcatggatgagccaacatcaggcttggatgcacgagcagctgctattgtcatgcgtgcggtgaagaatgtcgcagacacaggtcgaacagttgtgtgcaccattcaccaaccaagtattgaaatatttgaggcctttgatgagcttatgctaatgaaaaggggtggagagttgatatatgctgggcctcttggactccattcatgtaacgtcatccactatttcgagacaattcccggggtacccaagatcaaggataattacaacccatcaacatggatgctcgaagttacttgtgcatctatggaagctcaattgggggtagattttgcccaaatttacagggaatcaaccatgtgcaaggacaaggatgctctagtgaagagtttgagcaaaccagctctaggcacgagtgatctccatttcccaacacggtttccacagaagtttagggagcaactaaaggcttgcatctggaagcagtgtttgtcatattggagaagtccttcctacaacctagtgcgaattttattcataacaatctcctgcattgtcttcggtgtattgttctggcagcaaggtgacatcaaccacataaatgaccaacaaggcctattcaccatactagggtgcatgtacggcaccactctttttactggcatcaataactgccaatcggtgataccgttcatatccattgagcgctctgtcgtctatagggagaggtttgcaggaatgtactctccttgggcctactccttggcacaggttgcaatggagatcccttatgtgttggtgcaaatattgttgatcatgttcatagcttatcccatgatagggtatgcatggactgcagctaagttcttttggttcatgtacaccatagcgtgcacgctgctgtacttcctctactttggaatgatgatagtgtcactcaccccaaatatccaagtggcatctatattggcatccatgttctacaccctgcagaacctcatgtctggcttcatcgtgcctgcaccacaaattccaagatggtggatatggttgtactacacttccccattgtcgtggacactcaacgttttctttaccacacaatttggggatgagcatcagaaggagatttctgtatttggagagactaaatctgtggccgccttcattaaggattacttcggtttccgccatgacctactgccactagcagccataattttggccatgtttcccatcctgtttgccatcctttttggtctcagcatctccaagctcaacttccaaaggcgatagatagcatacaagtggcatatgacatgcttcattcctttggcacatatacataaatatacaattgggcacaccaagattctattacggaccggatatctgttgaatgtggatacggatacagattcagattagatattggtctgtttcaatcagattcggttatccactaattgcaatgatgaccaaaatttaatagtccacagagacttatatactattgtattaaatttaagtgagaagaaatgtaatggcagtcttctcagtcaaaaaaaaaaaaaaaaaaaa

SEQ ID NO: 40535 - DNA, 494 bp, Oryza sativa
  unsure (1)..(494): unsure at all n locations
  Clone ID: PAT_MRT4530_43969C.1
aaaagccaaccaagaaagagttcgacgagggaatcgaagctcgaagccatggtggtgcaatccggcgagggaagcgtccatgtcgtcctcgtgccatacccgtcccagggccacatcaacccggtgctccagttcggcaagcgcctcgccggccatgacggcgtccggtgcaccgtcgccgtgacgcggttcgtcgtcggctcgaccaccaagccctgcagcctcggctcgtcgccggtgcgcgtcggcgtgttctccgacggctgcgacgagggcggcccggcggagctcggcggccaccgcggcccgtacttccagcggctggaggaggccgggtcggtgtccctggacgagctgctccgcggggaggcggagcgggggacgccggcgacggtggtggtgtacgacacgttcatgccgtgggtgccccggctggcgcggcgccacggcgcggcgtgcgcggacgtttcctgacgcagangtgcgccgttgac

SEQ ID NO: 40536 - DNA, 1308 bp, Oryza sativa
  Clone ID: PAT_MRT4530_4396C.1
atgggtgctgggcggtcggtgcctgcgcgcgggagggattcggagtcgtcgtccaggaagaccaaggccgccgcctcatcctcatccactgcaggttgctggggacgcctcccgctactcatcagctccggcggcatcatgacgtcatcgccgcccgaccgctccccgccgtacctgcagaccaccgctgaacccaccctctacgccggcaccaccaacaactcctacaagccttttctgccagaagaagcattctctgggagtatttcaccatctttagtagctgcggactttcaactaagacaatttacttatgctgatcttcaacgtgccaccggatactttcggcccgagacttttcttggtgtgggaggttttgggcgtgtctacaaaggatggattcaggtgaatgaaactgctcatggaaaacctaggactggaatacctattgctgttaagacactcaactatgatgggctacaaggacatgatgaatgggtggctgaaatccattatctgagaaacctaaagcacccacatctggtgaaattgattggtttctgtatggaaggtgatcagagacagctagtttatgagtttatgtcccgtggaagcctggagaaccatctctttattaggagtcgcacgccacttccatggtttctcagggtgaaaattgtgctaggtgcagcaaagggacttgcttttctccatgaacaagagatgcctgttatctttcgggatttcaaaacatccaacattctacttgatgaggatttcaacgcaaaactatctgactttgggtttgctagagatggtcctgttggtgatatggcccatgtgtccacccgagtgttaggaacatatggatatgcagctcctgagtacgtgttgacaggcaagaaggcaatggagcggaacctggttgaatgggctcacaacaacgccaacgataggagcatccacaggctgatagaccccgggctcgggtccaacttctccatggcgggagcccaaatcctggcccgcacggcccgttcttgcaccaggcagaatcccagggacaggcccctgatgagcgaggtggtgcacacactggagacgctgcacacggatcagcgtgccaatgccaccaccagctactcctactcccagtcccagccgccgagccccagcgcaaacccaagcccaagccggagcccgatgaggagcagcgcgtcgtcgccgtacggggccccgtatccctatggcgggatcggcgggcatgcgtctccgctccgccacggcactcgcagggccatggcctga

SEQ ID NO: 40537 - DNA, 4269 bp, Oryza sativa
  Clone ID: PAT_MRT4530_43970C.1
atggaggacaagaagcagcagcagcagcagcaacgagaagaagcagaagcagaagaagaagcaccagtagtgccttcatcgttgcgagctgcggcaacctgcaggagcctgtcgtccttgtcgtcgtcgttgcggtgggatcatcgtggggacgacgacgaagaggaagctgagctgagatgggcggccatcgagaggctgcccaccttggacaggatgcgcacgtcggtgctgtcgtcggaggcggtggacgtgcggcggctgggggcggcgcaacggcgggtgctggtggagaggctggtggccgacatccagcgcgacaacctgaggctgctccgcaagcagcggcggaggatggagagggtgggcgtccggcagccgacggtggaggtgcggtggctcaacgtgcgcgtgaaggcggactgccaggtggtttccggcaagccgctgcccacgctccttaacaccgtgctcgccaccgcgcgggggttgagccgccggccgcacgcgaggatccccattctcaacgacgtcaccggaatcctcaagccttccaggctgaccctcctccttggacctcccggctgcggcaaaaccaccctcttgctcgcccttgcaggaaagctcgacaaaaatctcaaggttatttacttcttcattcccagccaattgcatgtgatccttccaccaattaaggtgaccggtgaagttgagtataatggtgccaatctgaatacctttgttccagagaagacatcagcttatatttctcagtatgatcttcatgtccctgagatgactgtcagagagacacttgacttctctgcaaggtttcagggcgttggcactagagcagagatcatgaaggaagtcattaggagggagaaggaggccgggattacccctgaccctgacatagatacatatatgaaggcaatatctgtggaaggcttagaaaggagcatgcagacagattacattatgaagattatgggacttgacatttgcgctgacataatagtcggagatataatgagaagaggtatttcaggtggtgaaaagaagagactaaccacaggggagatgatagttggaccttcaagagcactattcatggatgaaatatcaactgggttggacagctctaccaccttccaaattgtttcttgcctccaacaagtggctcatatctcagagtctaccatactggtctctctccttcaaccagcaccagagacttatgatctttttgatgatattatcttgatggctgaaggaaaaattgtataccatgggtctaagagttgcattatgaatttttttgaatcatgcgggttcaagtgcccggaaagaaaaggagcagctgattttctacaggaggttttatctaagaaagaccaacaacaatactggagtcgtactgaggaaacatacaactttgttactattgatcacttctgtgagaaatttaaagcatctcaagttggtcaaaatcttgttgaagagcttgcgaatccctttgataaatcagaagtatacaataatgctttgtccttaaatatctactctctaaccaagtgggatctcctcaaggcatgttttgcaagggaaattcttctcatgagaagaaatgccttcatctacataacaaaagttgttcagcttggattacttgctgttattactgggacagtgtttctacggacacatatgggggtcgatagggcccatgctgactattatatgggttccctcttctatgcgctcattcttcttttagttaatggtttccctgagttggctattgcagttagcagacttcccgtcttttacaaacaaagagactactatttctatccggcgtgggcttatgcaataccttcttttatactaaagattccactttctttagttgagtcaataacttggacatcaatatcttactacctcattggctatactccagaagcatccaggtttttttgccagctcctcattctattcctcgtccacactggagcattatcgttgtttcgatgtgtcgcctcatactgtcaaacaatggtggctagttcagttggtggtaccatgtcatttctagtcatccttctatttgggggctttatcattcctcggctatctatgcctaattggctaaaatggggattttggatctctccattgtcatatgctgagatagggttgactggaaatgagtttttggcaccacgatggctaaagttccattctctcaagcgttattctgataccatatggacctcagctacaggaacttcccgagcaattatatctcgtgataagttttccacatttgatagaagaggcaaagacatgtccaaggacatggacaataggatgcctaagttacaagtaggaaatgctttggcacctaacaagactgggacgatggtgttacctttctcaccacttacaatatcatttcaagatgtgaactactatgtagacacccccgtggaaatgagggagcaaggttacaaggagcgaaagctacaactattgcacaacatcacaggagctttccaaccaggggttctctcagcactcatgggagttactggagcaggaaaaacaactctacttgatgttcttgctggaaggaaaactggtggtgttattgaaggagatatacgagtaggaggttatcctaaaattcaacaaacttttgcaaggatatcaggctactgtgaacaaaccgatgtccattccccacaaatcacagtggaggagtctgttgcatattcagcttggttgcggctaccaacagaagtcgattcaaaaacaagaagagaatttgttgatgaagttattcaaacaattgagttggatgatattagagatgctttagtaggactaccaggggtaagtgggctatctacagagcaaaggaaacgtctcactattgcagtggagcttgtgtccaatccttcagtcatattcatggatgagccaacatcaggcttggatgcacgagcagctgctattgtcatgcgtgcggtgaagaatgtcgcagacacaggtcgaacagttgtgtgcaccattcaccaaccaagtattgaaatatttgaggcctttgatgagcttatgctaatgaaaaggggtggagagttgatatatgctgggcctcttggactccattcatgtaacgtcatccactatttcgagacaattcccggggtacccaagatcaaggataattacaacccatcaacatggatgctcgaagttacttgtgcatctatggaagctcaattgggggtagattttgcccaaatttacagggaatcaaccatgtgcaaggacaaggatgctctagtgaagagtttgagcaaaccagctctaggcacgagtgatctccatttcccaacacggtttccacagaagtttagggagcaactaaaggcttgcatctggaagcagtgtttgtcatattggagaagtccttcctacaacctagtgcgaattttattcataacaatctcctgcattgtcttcggtgtattgttctggcagcaaggtgacatcaaccacataaatgaccaacaaggcctattcaccatactagggtgcatgtacggcaccactctttttactggcatcaataactgccaatcggtgataccgttcatatccattgagcgctctgtcgtttatagggagaggtttgcaggaatgtactctccttgggcctactccttggcacaggttgcaatggagatcccttatgtgttggtgcaaatattgttgatcatgttcatagcttatcccatgatagggtatgcatggactgcagctaagttcttttggttcatgtacaccatagcgtgcacgctgctgtacttcctctactttggaatgatgatagtgtcactcaccccaaatatccaagtggcatctatattggcatccatgttctacaccctgcagaacctcatgtctggcttcatcgtgcctgcaccacaaattccaagatggtggatatggttgtactacacttccccattgtcgtggacactcaacgttttctttaccacacaatttggggatgagcatcagaaggagatttctgtatttggagagactaaatctgtggccgccttcattaaggattacttcggtttccgccatgacctactgccactagcagccataattttggccatgtttcccatcctgtttgccatcctttttggtctcagcatctccaagctcaacttccaaaggcgataa

SEQ ID NO: 40538 - DNA, 427 bp, Oryza sativa
  Clone ID: PAT_MRT4530_43971C.1
gggccccggtctagggctcttaaacggaacccggcgccccaaacatttataattaattatcccccctgggcccccccaaaacggaacatatatattggggggggcacacatcctaccaatcacaccctgactctaccccaacttagactttatacaccaccccccccactacactcctactaaccccatcaccccactcctcctatccgccgcaaggcacacgtcaaattttttttttttcatcgcccacacggcccccccacgctccgacagagaaaacgtcaactcgcacggcggtcctaaggtggtgccacatggcgacggacctccgtacgagccgtccgcactacaaaaccgcagacgcgcgtccgaccgaggccgggccccgaccgcacccggcgtaccaccgccccccgtcccgcccacc

SEQ ID NO: 40539 - DNA, 340 bp, Oryza sativa
  Clone ID: PAT_MRT4530_43972C.1
cccacgcgtccggacacgcgtacgatgcactactattgtctacgtatacttatcaaagactgcgcgacaggtgttccaagtctagcttctagttgaacgatgggttggaccagatcagttcgactatagagagggacgcactctgcatgacgatcaagccggaccgagtgcagagaggcctgaaagaacacatcagcacatggtgcgagaagaaaggatcctacctgagggggacgaatggcaggaatgctgaaaggaactttgcacagcatcactatgccgaccagtacgacaagccattctgtgctgggctggtggagtacatcatctctggccccgt

SEQ ID NO: 40540 - DNA, 294 bp, Oryza sativa
  Clone ID: PAT_MRT4530_43973C.1
ctccaacctcaacctcgttggagagctgggcaagaaagactatcgtgacccaacgcaggaggctgtgcgcaagtccctcatcttcctcaagaacggcaaacccgacgacgtggcgctgctgccgttgcccaaaaagactcgctccatcctcatcgctacctaccacgctgacgacctcggcagctgctctgcagccagtgcggcgactggaccatcacctgacagggcctcaccgggaacaacctcaccgccggcatcaccaccctcgattgtattaagctggtgcgcgacgga

SEQ ID NO: 40541 - DNA, 590 bp, Oryza sativa
  Clone ID: PAT_MRT4530_43974C.1
gaaaaaaatgcatatgtagttgcatgagaatatcatcacgagtttttctgtaagaaacgggaaactgcactaaggccaccaacttcatatagaaaccacacagcagagaaggtgcacatcaacagggagctgcggcaatgccgcaacgaatgcaaccttgggcctccttcggcgtgcacaacgcttgacaaaccggaatccccatccggttgcctccacgatgacggcacaaatggagtcaacgcgcaccacgagctgcgcgcgccgagcaacagcaaacctggccgacgggagccacaaggagccgccgcaaccgtcgcaaggagcaggacagtgacctcctagacgaagaaggcatcacagctggcaccgccacgaggagccacctccctccgttggcctaagacggcaacgcaaccggcaccaccgcaaggagccatcttcatccgtcgaatcgaccacagagcttcggatctcgcacttccaccgccgccaaccgtcgccgtcgccgaccacatcagcacaggggactcaccggtaaaagcaaccaacaagggacaaaccctaactacaggagacatctgaccaca

SEQ ID NO: 40542 - DNA, 455 bp, Oryza sativa
  Clone ID: PAT_MRT4530_43975C.1
gctgcaggaattcggcacgagggctgattgctatctgttgctgtcttgctgatgagtaactgaaagaaatgtgccaatgctgttttgctcgataactttgaggaaaattagttaccggggatatcattattctttattttctgggatttttttaagagtgattaggctgtgttcggatagtagggatgggaacccaatctccccgcacggaaaacggagcggtccattagcgcgtgattaattaattattagttaattttttttttaaaaatggattaatttgattttttttaaataactttcatatataaactttttacaaaaaatgcaccgtttagcagtttgaaaaacatgcgcgcggaacacgagggagaggggttgggaacttggagctccaaacacagccttaatcatgctattagcagaattattttgtagtacacttggcctgatgt

SEQ ID NO: 40543 - DNA, 134 bp, Oryza sativa
  Clone ID: PAT_MRT4530_43976C.1
gttgttttttagctcgggcagaccgtcggagaggagagagtccactagagagacatagaggggtccagacttccagagggttctttatgaaccgtatcggagtggaggtcttaggccaaactcacacccaacgg

SEQ ID NO: 40544 - DNA, 243 bp, Oryza sativa
  Clone ID: PAT_MRT4530_43977C.1
atggttgatctcgatcattgtttcaaatcgattgcctacaactctttgaaatataagctaccaagtgaaaggatagttactgccctggtgtccatgttgagtatgaccaacatcggcatcctttacatagttgtcaaggagaagaaggtggtggagttgtctcggaggcactccctcaaggctgttgagaccacccccttcaaggggctgaatgtgaatatactcttgagaaatttgcagtaa

SEQ ID NO: 40545 - DNA, 753 bp, Oryza sativa
  Clone ID: PAT_MRT4530_43978C.1
atgtcgctgattgcttctgcgagaccgaacggtctcgctcttccattccgtgagaccgcacggtctcgcgccgttgccgtgcgatatcacccgcgacgtcatccccacgtcattttcgcgcaacggaagtgcgacactgatgtaattagcttgtgcaccttaccttctgatgcagctcgatcgcacgcacctgcaggtgcagcgaagctagctgccactaaagagcccgcgacgccttaccttaacttgcattcggcaacttccatctctttgcaatggtgctttggccaagcaagccggccagttatatatggcagagataatgatgtatcccctggttgcgtcgttggaatacattttttgtttcgggggctggactgcatcatgcgtggtgttcttccacttgatcgtgtcattttacggcacagaaatgacggaaaacctgatgcccgcggcggcggcggccatggcactgccgacggcgacggcgacgtgggggcggcggtcacggcgcgcgcgcgccgtccgccgcgcgtcggcgtcggtggcactggcggtggccggcctcaccctgtggctgtggtgcgtctacctccggttcctgccggggctccggtgcttccgctgttcggggtgctcaagaaggttgccgtccccccaaaagccctgggattcgccacgccggtgttcgccttcgtcgcgctgggctcgcacgccgtcgtccgcggagacgaagccgagtgggacgagtga

SEQ ID NO: 40546 - DNA, 726 bp, Oryza sativa
  Clone ID: PAT_MRT4530_43979C.1
atgaccatcctggcatatgagtatgtgcagcaacacgttgtgctggcagccgtttcatttcatttcacatgtgcctatatcactatccccttgaagcccagaaatccattgcgtgccaactcaaatcctaggcagtctcatcctcccatgaagaagcaagctgcagctgcacgatgcaacgccctttttgttgacagatttgagaagataatgatgtatcccctggttgcgtcgttggaatacattttttgtttcgggggctggactgcatcatgcgtggtgttcttccacttgatcgtgtcattttacggcacagaaatgacggaaaacctgtgttcttgcgatgggatgacggccgaggaggccgccgccatgcgcggcgtcgaggcgtgcatgctgctgagctgcgcggcgcagatggccgcggcggcggcggccatggcactgacgacggcgacggcgacgtgggggcggcggtcacggcgcgcgcgcgccgtccgccgcgcgtcggcgtcggtggcactggcggtggccggcctcaccctgtggctgtggtgcgtctacctccggttcctgccggggctccggtgcttccgctgcttcggcgtgctcaggagggtcgccgtcgccgccgtggccctgggattcgccacgccggtgttcgccttcgtcgcgctgggctcgcacgccgtcgtccgcggagacgaagccgagtgggacgagtga

SEQ ID NO: 40547 - DNA, 482 bp, Oryza sativa
  Clone ID: PAT_MRT4530_4397C.1
ttgttttttttttttttttttttttttttttttttttttttttttttttttttttttggaaacctcaattaaaaattttttaaattttttaaactttacatatacaaaacggggccaagagggccagaaaacacagacttggggtaacctttgaacaagagggggtccctttggtggccctaaactacaacaatgggatccaagctggaatttattcttactacacacaacacaagggtaacctattgcccagtttatgtacaagggggcctgggcctattttggggctcaaaaacttgggggggggggttttcacccctgttttttttgaacctgaaactaaactaatctatttatttcaggcacctttttttggaggggcattaagcaaaccacttggtaaccacatttttttggttatttcagcctcaaaccagaggggatcaagacatgtgcaggaagcaataaaatgcaactttttg

SEQ ID NO: 40548 - DNA, 336 bp, Oryza sativa
  Clone ID: PAT_MRT4530_43980C.1
acggaatactgctgtagcacatcaccttcggtgaccccaaaaggatatcgaactcagggaacatgtctaatctatctaaggctaaggcagtccaaggataacaactgttgcatggttcctgctatagctctatgatgtacccaaacgtggaggattactaggacgggattcagggttgtcaccagctaccgtctacctctaacaaattagtgggatacacaacaaacaaaggtaatctccactacaagaatatatttaatccgtgacaaaattttcgtgatgtttttagagatcatcacggatatgcaactatggatacaaggcccataatccgtg

SEQ ID NO: 40549 - DNA, 828 bp, Oryza sativa
  Clone ID: PAT_MRT4530_43981C.1
atgagacttcggacttgtttcatgctgctgccttgctggtgtagagaggcctgctgcatttggctagtgagtgagcgacacactgctgacactagtgaattagtgatgaacaaccatattatgtgtgggattggcgtcaaaaaatccgtctcgcgccaacatctgaaagccccggtgtggaatcgccttgcaaattgcagcgttcgcgaaggtgcaggagcaatcgatctatcgagcaaaacaagaaccgccaccaccaccggatttgcctggatggcgacacacactacgagggcatgcaatgcagcttactcctacttaattagcagcttttactccaagttaagtgcccaacgaggaacactctacaaagatcctcttctaccatttttcaatgcgagctgcaaaacaaaccgaaatgcagacgcaacactgcaagtctgcaacagggatgccaatgccaatgccaatgccgaagcccatgggctacctattgggctcaccaagacagggccacagtactttgttgcaactccgaactctgaattgcagctcccaatcattgtccggcgaaagagccgggtcatcatcacagtcacagatagctttgtctcacctaagagcagtggtgtgtgtttatccaccactaatttccttgtgcttggaaagctgttccataatcctctcagcaatgagtgtattattgacttggtttcacgctatgaacttggcttgactgattggtggagacgcgaatatggggggctggattttgcatacggtacgcagcagaagacgcaggcatccaacgacagtgtgcttttgtga

SEQ ID NO: 40550 - DNA, 415 bp, Oryza sativa
  Clone ID: PAT_MRT4530_43982C.1
cccccaccccccataccactacttcgccttctcgctaccgcatcgttgcgccaacgcttggtctccgcgaggaccgcgactccgcacgccgtcttgcactctcgctcgttaccgccgtcccgcactgccacaccggccaccggtgcacgcgacggtgacgcctagccaccgcccggcgcctagcgacgaccaacgactggcccgatgccgcttgcagccggcgcccagcaactcgcttctcctcgtctcctcctcgcctccagcctcctcctgctctgtgccaacgcaacgccgtcgctgtcagcccgtcaccgtcgtcgccttacgtttggtccggccgtcccgctccctggcctggccggtagtccgcagcacaggcacaacagcagctagcaggctgcaggctagcgcctag

SEQ ID NO: 40551 - DNA, 369 bp, Oryza sativa
  Clone ID: PAT_MRT4530_43983C.1
atggccacccatcttttctccattctttttctctccccctttcctcgttgtcatcactgtagagacaacatcgtggacgccgctgcgagcgaggagacggcgtcgacgacgaggagtaagctcgcgataccggaaacgcggtcgctggcagagctctggggcggagcagaggggcgggcgggtatcgtggcgaagcaaagcggccgtgggccacgggcggagcagtcaggcggtgggggtggtccccctggtcgatggtggcggcggttgggtctagcaatgacgagggacaacgaaaaggcacccaacatcccaggcagagtgcggcgcgacgaaggggacgaggccggcatgagcagattggcttga

SEQ ID NO: 40552 - DNA, 1908 bp, Oryza sativa
  Clone ID: PAT_MRT4530_43984C.1
atggcctctggaatatcaatcggcacagggggtccatggtggttacttcagatctggctaaatttgcacaccaggatggttgccaatcggccaccactagccgatgcaagatttccaaggtttgagccgatcattgatgatgatggagaaaagatcaccacatgccgatgcatgtccttcggagaagcagcatcggtcagcattgcatccaaactatcggctaagcccttcagcgagtggttcaacaatttttatgacggggttccccagaaacaccaggatctgctgccaggtgattttcggtttgaagagatcaattccgaaaaatatgacaaatctatagaagtatactcaacagccatcagcccttgcatccttcctgttggcatccaccaaggcaaaaacattcagatgacctacgagttctatcatccgataagtgctgcaaggcaattgggcatgggtcaactgccaattagcctattctttgccgataagatccaaagtagaggagagatcacatcaacactcatgatggatcggctgctgaacatagcaggaccacctttgggtagtatcaacaatatcaagctaaggatgttgagaagtgcagcctttgaccgatggtgggtagaatggaagaaacatttatctcaccaatcggcttcaatgtatctgacagatctgtttcctgaagctgttcctcaaacaatagaatcttctcctcctcatcacagcaatagtggtatggagattcaatatgctccaggacttctgcccaatggtggtgggcgatctcctccagtcatcggctataatgcccccaagacctcaacactgctgcacggcctgccccgtgtgccgatagcccctgatgctggtaggaagaagagagcaaagtcggctgctgcaccatcggctgcaaagaagaaacctaagaagcaaaagaccactgccgatgaattgccagccatagatccagatgtaacggaattcctggaggatgaagcaacggtagaagatgtagatgaagcggctgaacacattagtgaaacaagggaacaaactactccagctgatccacctgctcctcaaagaacaccatcacctccacctcctcgtcctccaactcatgttcctgaatcaagtgaaaacactccatcggctgcagacagccatcatgtggatgaagaagaaaaagctacaccagctcctgctattcctgttttagctgacatgttctcttttgacattaggcaattcttggatgaagaggaagaaacaacaagcaaaactctggtgcccttagctgatgatatcaagtcaactctactacacatctcaaaaaggcttgaaggctctctagaaatcttggtgacaagctgtggatccatccgagatagacttaatgaaatccatgacaagatcccggatgagctagcgaatgccatcactccagcagcataccttaagcagcatcggcttaaacttgaaaaagcccaaaggaggattgccgatcagcgtgaaagaagagatcttgaggcaaccatccaagctaacagggtttctatcaatgaaaagaaggcaaagcttgatgaattggaggctggtacaaaccccactcaaactaacattgatcggctgaatgctcgaaagatagaactcttggctgagttggagcagtgcaatgcaccggtcgcccttgaacagcaaaagcttgctgacttgccaaaaggcattgaggatcagaagtcaaagttgaaagtatctgtcaagcacttggccgatctgaccaaatctctgaaggtgttcccaagcactgatgcagccgatgcccaaatcatagacgaagtagatcatattaggcaaagggcaatatcggtcatccaaaaatacatgtctggatga

SEQ ID NO: 40553 - DNA, 791 bp, Oryza sativa
  Clone ID: PAT_MRT4530_43985C.1
aatcctactattttgtcctaaattagctagaaatgcaatttttatgggacggaggtagtaattatttattattaccagataacatcgatcatatttattgtttgagacataaattttttacatatgaaaaacttataacaataaattttacagtcatgcatttccttttgaattatacaaaataattaagtagtcttttgttgactttgaaaagtctaaaatggcttcatttcgtacctagacaaaaaaaaatccacaaaacaatcaataggtccatactcaaacttcaaaaaatggcatatcaaactgtccccaccagtttcaacgaatagaaaacaatgcaatattctcacatgagttgtaggtacaaagaaagggcacaataatgaccatttcaaactgtcagttatatttaccccaaagaacacaagaagtccatctcatcttccaaagaaggaaacgggccgttgttttgggtgccatttcgaccattacgaagattaattttggctgcttcaactgctccagccaatcaaccatgcacattacagtggtactaagagcaagtttaatagtatagtccactactagctccaaattatctatagccaatgtaatagtcaattcatacaatatttgcttactacactattaatacatggtcccacctgtcatacacacattatgtttgtccgtgctgcagctgactacagatctgtagcccgctgcttttctctcttttcttttatctgcttaaaatatgtttatatctggtttatagcatgctattg

SEQ ID NO: 40554 - DNA, 432 bp, Oryza sativa
  Clone ID: PAT_MRT4530_43986C.1
tttgtttttttttttttttttggttttttttatttgtttgttaagatcattgtatggagtatagccaactggtaattgatatatggtatttgagaggtcttcacacatgtgtcacggctaaaatcccctgtgaacagacatatgctttgatgcactgctattaattactaggccaaaagggtaatctggctcaaccgatggaatcccctatactagtttgagaccataaaccccacaacaaatcctgctaagtgacggcatataatattatggaaacacagcaggattctacaaagttggaaggtgcttgagtaacctcccacttcttatgccacagccgttagtcgtgctgggcagtctagcaccgggagggtggggggtggaacctaccctaagctggaacgttgatgtagtcagcctgagacttgcaga

SEQ ID NO: 40555 - DNA, 530 bp, Oryza sativa
  unsure (1)..(530): unsure at all n locations
  Clone ID: PAT_MRT4530_43987C.1
gaagtacttaatctgggccctgacctgcaccgcatcttaattcatctgcttcacttgtataccacgcgcccacccagactttcccgagcgaagagtacactttcaacctgcccaagttctgaagggttccttgcagtgccactggatcagcatatactaaatactgttaacttactatggagactcaattataccgattgaagagcatagcggaaaaaaaaatccccaaaaaggttgctggagaatatatattttctattctttgcaccnttctttacacaacacgctgatgttaacactttgttgatgctgagttatctgagtaacccccctttgctccctgttgatgtcacccaaccgttgcactaataccgttgggttttatatgtgaagtataaatccaatttagtgtgttgagtgcgttgttcagtcactcattaggatcagatgtttgtgaaaacctacccaattgctgatactgttgatgctccattgtctcccttccttctgaaaaaaaaaaaaaaaaaaaa

SEQ ID NO: 40556 - DNA, 108 bp, Oryza sativa
  Clone ID: PAT_MRT4530_43988C.1
cgcggttgagcatctgacaagccagcggcaacgaacgggtgactcacttgaccacgcatgtcataaggactgccaggtaacttgacccagagaaccttaatactttcc

SEQ ID NO: 40557 - DNA, 465 bp, Oryza sativa
  Clone ID: PAT_MRT4530_43989C.1
atggcggagaagcagaggagggagaagaacgtggagaagcagaggaggagagggaaggacgtggagaagcggtggaagatcgatgggcgcggcgacggagccgtcgctcgtggcggtccgccgtcccgcgtcgaggcagccggcggctgcggcgccctgctcgccgagcttatgacagtgtggagcttggctttggttgcagcaactgtggggagagatcgggaagagcagggactagggaggagagggagcggacggccggcgattcacgggcgcaaggcgcaggcgtgcagcgcaccgacgcgcggacgtgggcgcggcttggcaccagtgcgcggggtcgcgggcgcatggcggcggaacggccatgacaccgcctcgctactgctctgcactgcctcgagaggccaagaagcccagggcgtggagaggaccaacggtagcccaacgacacagtcggggtag

SEQ ID NO: 40558 - DNA, 513 bp, Oryza sativa
  Clone ID: PAT_MRT4530_4398C.1
ctggaagtaaggaaactacatgcttccacaactttccaaaatcatgtgctactccaaaagcatgtctgctatcagtataaatattggcattttgtccttggcaaaacttgtgtaagagtgtataattcagcctgttgggccgaagtaactataagtaaagtgttgcatcaacaacatccaagcatgttggcatacccagcacaatacttgccattgtcaccttttaaataagagccattgaggaaccatgagaagtcagttctacacagtggaatttcccatagatcatcatgaggaatcaaaagttaatccatcagtgttaaatagttgtgaaggacttcatcagtgacaaaacagagaagagcagcagtgttagggttattacaaagtaagagagttaggtcagtagcagttagcaaaaggacttcacaggaggtgatgcaactgactgagaaatgttgagcttgaagagaattcaggagggcttctactgcatgaggcacaaaaatggct

SEQ ID NO: 40559 - DNA, 476 bp, Oryza sativa
  Clone ID: PAT_MRT4530_43990C.1
agaaacaatacacattttcagcttgcattttccatggtcaggcatgtcacaggggaaaaaaaaacaaacccacaatttgcttgacgttcttaaaaaactagcatgaactcgacccctgtgtaagggaaaattggacaggctatgtactggccctgaaacacaggcttcctgccccaaattgcaagaaaggcatgggcgaaactgcattttggtggcgcagaaagacccctttggggcgctttggcctgtgtgcaaaattgctgggccaaccatcccaaagaataaaccttgaattgatcaccccggtatggaggggagcttaacgggggtcatttcgaacgctatgaatggtgataaaaacggcccccaccgggttttgaagaaccccatggtggccctggaaccttgaaaggtgaaccgaaccaaggcctgttgtagtggaggcgcataaagggcgtatgtcatccttggcgatg

SEQ ID NO: 40560 - DNA, 241 bp, Oryza sativa
  Clone ID: PAT_MRT4530_43991C.1
gaatgcaaccacagcattgggcgcaatataattatttgtgaagggccacatgaacactggcgtattagaccataacacaagctacaccagtaacagataacacaatctaatacgactgtacgcaaaatattcaaacacaggacatgaatccgcactcattgttaggaaagcacagagcaaggtcgtacatgggaaaaatgagcagggtaagaaaaacgatgctgcactcagaggagacatg

SEQ ID NO: 40561 - DNA, 335 bp, Oryza sativa
  Clone ID: PAT_MRT4530_43992C.1
ataatagccccgatagtacaagccatcgatacgtgttacctcttgtgaagcgaactcgttgaaaaattaatagatataattgccttaattgagctctatctctaattgacaatgacggttatcatgatttaggcgcaaaccgagcccaaggtataccatatcggttgtatcggttatcatccttatcaaccttgatcaactcacactctattttctagccgatatgatatcgagccgatgcgcagtttgactccaaattcaactcgattccacaccaaatccgcttcgatcttcttccttcttctctgaatccgatgcaaaattctgttgttaac

SEQ ID NO: 40562 - DNA, 1256 bp, Oryza sativa
  unsure (1)..(1256): unsure at all n locations
  Clone ID: PAT_MRT4530_43993C.1
atggcgagctcgcgggagcggaggcttccgccgccggcgtaccggatggagaaccccttcagcgtgaaggtgctccagctaaggaagtcagggttaaagaacattgaagcaggcattggctgtggagttggtataggccacggttttggaataggaattgcattgaagccacaagaacttatgtctaagttcacttctaggctgaaggataccccaactttgtcatctgcaccaaatatggctggttctgtgcctagcaatggacaagctcccaatggtgtgtccattgatctaaaggctaagaccacgaaaagtaatttccaccatacaagtaatgaaacatcacaagtaaaaccagctcctgggttgcaaagccagcatggaatgcaaccagatatgactgaaagtcggactgaaaagattctgtcaaccgttggagagcttatgctctaagttcacttctaggctgaaggcttccccaactttgctagaaattcacatgggatggataatgtgctggaattgttgctgaagcaccaaagaattattgacgaactgcgggacgagaacgacaagctccgtcaaatgctcatagaagaactcaaggtttcaccttccaagttacaattagatcataaaaatggagtgaaggcctacaacccatgctcggactgctttgattgccggaggcgaagtcgaaaaacaagaagatgatgttccaggatgaaaccaagatggacatcagagatgtggctagaaattcacatgggatggataatgtgctggaattgttgctgaagcaccaaagaattattgacgaactgcgggacgagaacgacaagctccgtcaaatgctcatagaagaactcaaggtttcaccttccaagttacaattagatcataaaaatggagtgaaggcctacaacccatgctcggactgctttgcttgccggccgcggagtcgaaaaacaagaagatgatgatggaattgcaggattgcatttgggctattttcgcaatcctttgcaatttcttggatgcttcagtagcttaatagttcatcggattagcttgcgacataatatcctcagcagaagatccactcttgttgttcaggccagttatgttacctatctcctgaacattcgtgaacacttgctccccttgatgcgttacttctgtgctgaacatgcgcagactgatagcatcacagcagtacgtgattttagttctcaaaaaaaaaaaaaaanaaaaaa

SEQ ID NO: 40563 - DNA, 228 bp, Oryza sativa
  Clone ID: PAT_MRT4530_43994C.1
atgggttgttggcaggaggcgagcggcaaaaggcggcaggtactgtgtcttgtgcgccgccacgggaggaggaaggtgcgggcggacaagaccgatgtcgacggcaaggcgaggtcattgatggcgaccggcttcaccccaagctcgccactgccgccttttcaccgaccagttccactgttcctgctgctcgtcgctgtcacctttccgccactagcgcctttctgc

SEQ ID NO: 40564 - DNA, 840 bp, Oryza sativa
  Clone ID: PAT_MRT4530_43995C.1
gagcggcagcgccgcccggcatcgtcatcgctgctcgggacatcccgccgcccggcgcctccgtcgcagctcgcacctcactgttcgggccacctccgccaccgagctcgtcgtcgccgccgagctcccgcgccaccgacgtcagcgttggttcgggagaggagaggagcggtggatctagccgcccgcaccccgctcctgcgccgccaacgccgccgctgcttcggggccgccgacggggagaggagggcaccaccgtggagctcgagctgccccaccgtccagcaccgtcgagctcccacgccagcgccatcgccatctccacccggtgcgttctttgcgtcggaaaaggaggaggaggggacgaccgcgccgccgctcatcgcgcggcgacctccgcgaagaagatgcggaggaggcgaacctgtggtgaaggcggcgctcgggccggcggtgctgaatcgccgcgacgacgcccaggaacgatggcccccgctcccgccgagaccgcctcggggtcgtccgccgccggcttcggcgccgcgtcgccgctggccagccgccagattcggagagggagaggggcgccggcggagggggagaggggtgccggcggtgggtgggagagagaggggcaccagcggcgcagtaaaggagcgggagcggcggggaaagggaaagagagagaggagaaagagcgggtgggaccccctgtaagggaaaaagtagaccccatgcattgtggaggttgttgcttacgaagttattagtctaggtggcagttttggcttctcaaaaattagtgacgcagtgtgagtgccctgataaaatctggcatcc

SEQ ID NO: 40565 - DNA, 2922 bp, Oryza sativa
  Clone ID: PAT_MRT4530_43996C.1
atgaggcaagatgttgcctccaaatgcgacagccgttctcggtcaggagcagctcctgaaatcatgcgatcccctcgccgcaccatcggagaaaatggctatcgggacacaagacaccaccagttgaaatgctcagatggcaacctgggagagctacgcgtagagagcatcccaaatttccactgcaagagcttgcccacaagaagccgcaagaccaatgcggaggatagtattgtgggaaagcgtggttctatgtaccagagctctagtgaaattagcatgataagaaaactccacgaaggcaggaggaagaaaatagattctgcacttgacggggatgcatttctgtcatttgagattgttgattcatcctcccagcctagcacaagtggagcttaccttttctcgcatcagaatcgccgctcagaagctaagtcttctgtggaatctcgtagaattcatcgagcatcgagggacttcctggatctttcattccgtgagcttcctgatgagaattgtaggctggaccgtccacgcatggattgcaccctgttgaaaaatgatgcaggcgatggtttcttggagatctcacttgaggaagagatgaccaaaggtccctgcagaaatgcagctcctcagttgataggtggagagtcaagtaaaggtacagaagcaaactgcctgcaaaacaagatcagtgtatgtcccagtgagaataattgtagtcagagagagaggaattcaacaaacagtttgcctgagtccatgtcggccaaggtgagcatctctgatggcacccgtccatcagaaagtgttcgtcatggcatagagaacagcactaaagttcgatcaagccccttcaagaagattctggaccctattatgaagtccaaatctattagaagtccatctctcatggaagactccaaccatgttactatgccggttaacaggaaaaattgtgtatcccgcaaatcattgctgagtgatttatcaaggagtgaacaaagccaatcaattaattgccagctgaatggagaaaggcagcatacaactaatgctctatcacctgctcatcttcaggcggttcttaaattggataccaagaatggtattccagtttttgagttctgtgtcaagggccctgaagaatccatttctgctaggagttggaaaacagggaatgacttgaactggatttacactttccacagtggtggaaaacgagcaagtgctactggaagggcctccaaagatggacgttggtgttcaccgccgattgtaggccagatgcaagcttcttcgtacttgtgctctgaagttggaaaagatggtgttctgactaactctgtcatcactgagtttgttttgtatgatatcgctcatgcaagacagagcttttctgctgaggagaaaactcaatgtacagagactactcaatcgacattgtcaagtgccgtcgagaaatcagcctctggtgactgtccccagaggattaatctgatggaccagcaaaacagtgcaagaaataactctgatgtatcaacatcttgtccgtggtctgaagaagatctttatcctcatttggagattgcagcaacggtcatccaagttccatttaatagaagcaagtccaaagaacttaagagtggtttgtcacctggtactgtaaaagtgattacaccgagtgggctgcatgggttaccaaacgatgatgaaaccagtccatcacctttgctggatagatggaggtacggtggaggctgcgactgcggtggatgggacatggcttgtcccattgctgtccttggcaatgcatatgataataactgggccaattctgtcacaaaggaaggcgagaatcctatggaactctttgttctgggtggcaaagaagagctccctgccctttccattaagggcaacgagaaaggacagttattggtgcattttcacgcgcggttatcagcaatgcaagccttctcaacctgcatttctctgctgcactgttcggaagcttcgacagccgtaagtattgagaagggcaagcacaagctctactccagttcacttaagatgctgctcgaggaggaagtgagccagctgatcgaggcagtcacggcagaagagaagaggaaaacaaagaagagaaaagaagcagcagtagcaaaagggcaggggcaattcggtggcctccagccccaccttctccaaattgatgcaggagaggaaatcataccgaagattacggcactgtcaaagtcaaatgggagggtgatctgtgttctttcagtgcttggagctgttcaggaagcaactctgctcctatcatccggtgttacttcatatcacaagggtcctttggaaataattcgtttgttcggatccattttgacaccaaatgaccaaggatgcttgcgtgtaacccttgcttctggcgatagttctgtgattggtggtgttatcactggacctctcaaagctgcaacacctgtccaggtagttgttgcaagcttttacagcgatgtatactggccaaacaggacacctaagatcattgcaccttaccctaattcccagtctaccatcaggaatggcagcactctgtctagtgagcatgtcaatccaggatatgtatcttacactgcagtggatcaacatgaatcaagtgaggttgatgttaagccctcactcgggatgcttaacttagcatcattggatcgacatgaatcaagtgaggttgatgtcaagccctcactcgggatgcttaacttagcatccttgtaggtaatttaactcaatggaagagatgtttgacatatttttagagaaaatgcatcagatagctcagatttcgtgaaccatcaagtagtcgtgactttgtggcttagttgaaaagcagttctttatagatggaacatt

SEQ ID NO: 40566 - DNA, 327 bp, Oryza sativa
  Clone ID: PAT_MRT4530_43997C.1
atggcgatcacggggtccaagaagccggggcagctcaagcagatgctgcggaggtgctcgtccagcctcgggataaagggcgccggcggcgacgacgatgggctgcctggggacgtgccgaggggccacttcgccgtgtacgtcggcatcagccggagacgctacatcgtgccggtggcgtgccttgcggcgccagagttccaggagcttctcaggaaggccgaggaggagtttggcttcgaccacgacatgggtatcaccctgccctgcgatgaggccaccttccacggcgtcctcgcctccgcctctgccacctccatcagatga

SEQ ID NO: 40567 - DNA, 241 bp, Oryza sativa
  Clone ID: PAT_MRT4530_43998C.1
gtcgtgagacggtgcagaccggcaagggctacttagaggatcgccggccggcgtccaacatggacccttacgtggtgacctccatgattgccgataccaccatcatctgaaagccctgaagcgggttcttgaccccacgacatcgtagggattgagctgcgcatatagccatgtcggtccgggcgctccattgatcgaacaagatcgtgagctgcttatgggctggctgaagtagcacctg

SEQ ID NO: 40568 - DNA, 183 bp, Oryza sativa
  Clone ID: PAT_MRT4530_43999C.1
atgggcttaggcagaataaaggcgcatcaccttcgtctccgtgagcgccacggtgagggcgtcaacgactacgcattgatcgatgtagggatggcttgcagtagtggcagggagcaggaccccagggaagagatgctcttcctctggtggtgctgccgtgacgataaaaatctgaagaggtaa

SEQ ID NO: 40569 - DNA, 1074 bp, Oryza sativa
  Clone ID: PAT_MRT4530_4399C.1
atgtcgtcgtggaactcggtggggatggaggtgctgtaccaggtgctcgggtgggtcgccttcttcgcttggtccttcagcttctacccgcaggtcttcctcaacttcaagcgcaagagtgtggtgggtctgaactttgattttctggtgttgaacttgacaaagcactcatcctacctcatatacaatgctgctctattcttcagccccttcatccagagacagtatcatgagacatatggtgataaagagatgattcctgtcgcggcaaatgatgttgccttttctgtacacgcggttgccttgagatgtgaggtgctttaccaggtgctcgtgtgggtcgccttcaacgcgaaaatctccagcttctacctatcaatcatcctcaacttcaagcgcaagagtatggtgggtctgatttttgattttctggaattgaacttgacaaagcactcatctttcctcatatacaaatgacctcaatcaaatacattcctcatccaatcatgaactcctgagacatgagtacaattggttggagtattggcaatattttacttgatcttacaggaggggtgctaaactttggccagatgggtgtgcaatcaatagatcaacacacgctagtgaacttctatggaaatattgggaaaacccttctttcattggaagtcgttttcttcgacatcttattcataatccaacactatgtgctgtaccctgtcaaacgagatgagaatggtaaggctatcatttctgaaagggtagctcctcttatcaggccttcagacaagcctgaagaagatagtgtgtgatatacctattgtatttcaccttttttatggccctgattacattcgcttcagggtatagtcccaactatccattcatatgaaacaaatgcatttttcgtaaaactaaattttgtacatatttgtttacggattaatgtaaagatgtagatacaataggcctttgatactagtcttaaaacaatgtttgtgattatgtaagtgtaagtatacttacaatatctatcacggatttgtcatgagtaaaaaaaaaaaagcggcc

SEQ ID NO: 40570 - DNA, 2356 bp, Oryza sativa
  unsure (1)..(2356): unsure at all n locations
  Clone ID: PAT_MRT4530_439C.1
aagcagcaaagatgggcaagcagaatcacaatgacggagcttcagaagctggaagcccatcgccagctaattacaaaaattccactggtcatgaacagctctattgttcattgcatagcatgtcataacctgaaacgatatggttattcataactctcccagggcataaactcccaaaccaaaccaatgatgaacactacctcaacaagtaccaacacggccaaccaacctatcatcctccggtatacggtaacacaacaagtacactaggaacaggaaaacttttggtatggtgctaaagacagcaggggtggagatgtacattgagaagattcatcaagtttaaccgcctaggcgaagggtggaagcagccatccacgttcagttgcgagatccacatatgctccaaacttctcctgtgcatttgggatgtcgaggatcagatcatcgaggccttccttgacgcgagtgaagcctaatgtcatctggttgattgttatcagcccctcaccgaagcactcctgtagcagagccaagatccttgcttcattctccttctccattgccataacaagcgctttcttcaccacttcatggttgaagaagggcattccaaggtcacggatgcattggcaagcctcccccaagtcaccgccagtattgtattcttcaaggagctttgcgatcttgtccttcgcatcttctacagcccagccagtgccgccaccccagcaacgcagtatcctctcaccagagtggcgagcagcaagaagggcacgagccatctggacagtttgactaccactgctgttagggcgaagcctgttaccgatctcatccaaattcagtggaatcagaacttcatcaataactgccctggcaaggaagagggcaagttcactgggagcatccacaatgtcgagggcagtgtcttctgctgactgcaggagcaatatgaatcccttcatgatgtcatcagtggagaaaagttccaagctgagtgaagaaagcagggcagaagccatctccttctccctattctttctgtccatagcgagggtgataagcttcttgaggaagataggattgtactctggggcagaaagctcttgaaggcttataatgagttctgggacatcatctgagagaaaatactcttggattatgtgtccagattcttctttgaaatgcttgatcttttcaccacttgcatttcgcatatcttcattaggggcagaagatgtagtgaatgaagcatcaagccatccttcagatgtagcagtcagaaccagcttgtcaaagagaatcttggcagaaggaatatcaaggctcagatcatcaatactctctgctagccgacaaaaacccttagacatttgattagaactgatcaggcaacctgcagttgattccttcaacagcttcaggattaatggctgtgatgacagattctccatgctcaaggtgagagcgcgtttaacaacctcatgatggaaaaatggaaggcccagctcccttatacacctaaaagcttcatcaatatctccactctcaatatactccttcagaatatcctggattctccttttcgcctcttccacagtaaagtgagtgctcccaccccacttgcgctcaactagctcagcatgatggggggctgacaagtagcttttctcagaaacttgcagaacttcaatacctttagaaaattcaggaagcagtgctctggctcgagtgaggaaaacaggaggcagtatttcatccacaacagcacgagcaacaaaaacagacaagacatcaatagcatccggtatgtcgacagatagatcttctgttgactcaagaagcatcataaaaccttcactcatcttggaagagcctagtagatccgcatacaacgcagacaacagaattgacgccatttctttttctttgtcatgacgatccattgccatggatatgagcttcttgataaagtaactgtggaactgatcagatccaagactccttaactcagaagctgccagttccacatctcctgtactaaagtactcctcaattacaggaactaaaagccttttatagtcatctaatgtagcaggaaccttattgttcccattaactagtttgttcgacatcttagatggtacagaatctacatcctcaaggttgtattgttcatttttcccaccagcaccttctctcttagatgcgtggtggtgtgggaggtggcggacggcgatcccgccgtcggccggcgcgcccccgccggtggccacccgcaggtgcccctccgccagcatcctcgtcggcgacctcgccccctcctccgccgccattccacntnccccgcacc

SEQ ID NO: 40571 - DNA, 642 bp, Oryza sativa
  unsure (1)..(642): unsure at all n locations
  Clone ID: PAT_MRT4530_43C.1
gnaattgtaatacgactcactatagggcgaattgggtaccgggccccccctcgagttttttttttttttttttaactgggtncatggtntcgncaccgttcgacanccntnaataantacnngtnnncntntctttccnncacaaactngaactnngtattgggancncanancacaaaagnaagctgtctactctatccggcattcatcgaaccntaacctatganaaccgnacacagattgctggcaantactttttctngggnattcccactagcngacgcncacacttgcatgctgcctcntggtgttctcnttccgctggaacannaacaacncnggtnctgcnnggnnaatgaactgagaagnagtncggcctntngtcntntaaacnatntgngctgaaatgctctgcactgtgnnggatcctgccggatccccanaaatccngnatctgagtccngaactancttatattccctggcttnaanccaccaacacgggctcaaaaaacngtnacccatngaattgacccntacaaatcaccttccaatatancccgtanccctaccgccntcaaaaatttgggtggtcaaaatatnaaccntnttttccncaaaaannccccncgtcaaccannaa

SEQ ID NO: 40572 - DNA, 1219 bp, Oryza sativa
  Clone ID: PAT_MRT4530_44000C.1
atggagtcgtcgcgggggaagcccggcctgaacggcagcggcggcggcgccgccgccttcgactacagcagccgccggggctactacacgggcgccggcgcggcgctgccgccgttggccgctggttccagggcgccgccggtggacccgtgctgcgtggttctgcgggtgttcgtcctgctggggacgctggcgtccgctgtggtgatggccgccgaccggcagagcaccaccgtccagatcgccgccggggaggagctcgcgccgccgctgcgggtgcccgtcacggccaagtggacctactcctccgccttcgttgttcctactatttttgaaagtgatacacaaccatggcttattgccaatctatgcaaaattatgggagttggtcatgtggcactgtgggtgacattgtttgttgatagcagcagcagccacagaaaatttctttccttcacgaccgttgatttggatgaggagaggcccaaattaacgaccgttgatttggcctttacagaaaggcgagagaaatcgatacggatagagatttggagaaggtacttcgtggtggcgaacgcgatggtgttcgcgttcagcgcggcggcgctggcggcggtgcggaggcggagcgcggtggtgccggtgatggtgggggacctggtggcgatggcgctgctcttctcggcggtgggggcggcggcgcagttcggcctcctcggcgagcgcggcaacgcgcacgtgaggtgggccaaggtgtgcgacgtgtacgggcccttctgcgagccggacgcgtgggcgtaccctacatctctcatcgccgccttcgccgacctcgtcctcctcatgctcaccatcctcaccatccacaaggcctcctcctactactagccatactctattttgctttgcatgggtcttcgatatggatgtcatgtgtgattaactgatttgatgattatattgcgattattagtcaattagaggcaacagtggtcgtttacctctgtcagtgatcaccgtgagatgatgcctgcttgccgtcttaatttaatcgttgacatgttcactgaagtagtaattgaggcttcatttattagctgtaaggtgaatttgagatgagtataaaaaagaactgatggattaaaagaaaataatacaaaatttacaatgttgtaaggtgaaaaaaaaaaaaaaaaaaaaaaaaaaaaaaaaaaaaaaa

SEQ ID NO: 40573 - DNA, 800 bp, Oryza sativa
  unsure (1)..(800): unsure at all n locations
  Clone ID: PAT_MRT4530_44001C.1
ccacgcgtccgaacgccccccaaaaccctaggccccccttctcctccgacgccggctacagtctccgacccctccggcgcaatcgcggaatcggaggcggcgggcggcgccatggacaacgccctcgcgagcgccgcggcgatcgccgaccagcgccagaagatcgagcagtaccgccacatcctctcctccgtcctctcgttttccccgccggacatctcgcaggcgaagcgcttcctcgaccacatggtttccgacgaggtgccgctcgtggtgtcgcggcagctgctgcagacgttcgcccaggagcttgggaggttggagccagaggctcagaaggaggtcgcgcactacgcgctcacgcagatccagcctcgtgtggtctccttcgaggagcaggtggtagtgattagagagaagcttgcagaactgtatgagtctgaacaacaatggtcaaaagctgcacagatgcttagtgggattgacttggactcagggatcaggatgctggatgacacaaacaaattatccaaatgtgtccagattgcacgactttatttagaggatgatgattctgttaatgctgaagcttttattaacaaagcttcatttttggtaacaaacagtcaccaagaacttctgaacttacagtacaaggtatgctacgctagattttggatctgaagagaagatcttggaagctgcacttcgatactatgacatctctcagattgaacaacgccaaattggtgnacgaanagatcgatgaaaatgctttggagcaagctcttagtgctgct

SEQ ID NO: 40574 - DNA, 2355 bp, Oryza sativa
  Clone ID: PAT_MRT4530_44002C.1
atgagtcattggaaaaacacatttaaatcctggccttctcttgagaaaagctggcctgtatggtacaaacggatatcggctagcaagcaagctcattgggatgcgattggaatcggccaagccctagccctcacaatagcaaattcagccaaagatgaacccctgttagctgctgccacttatttttggtccaacaccctcaatgccttcctcttcaaccaagggccgatgaccccaactctgctagatatcatcatgctcactggcctagatgtgacctcgtcggctaaccccatgaacttgaataccaagaacaccttcgagttcaagactaaaagcattggaggctggtcgggatatattgcagcatacatgggcaaaggaccagttacccccagagagcatgtggccttcctgttgatgtggctagaaaaattcctcttctccgaagccctagaatcgaagaaacaatttcccttgagcaagatccttctcggctatctataccagatgctaaacaatgcatcagccaaaataatcatcggctcagtagttggggcaggtggaccatggtggttattgcaatcctggctaaacctggtagtcatgaaagttgtcaatcggccatctgtgacagaagccaaatttccaaggttagagctgattgtggaagatagtggaaaggaacgcactcatcgcagatgcatgtcatacggggagtatgcatctacaccagccgatgcaggagcaaagctatcggctgaacttctgaaagattggtttttcagtttctatgagggatttcagaaggatgcccgagtttggttcttttatgccgactcaatggatcttgaactaccagccgatttcagattcgaagacattaatcacgaaaaatttcagcaatctagagaagtcttcactactgccatcagcccgtgtattctccccgttggcatccatcaagggagaaatatccaagtctcctatgagttctatcatccaatgtcatcggctagacaactcggaatgggacagctgccgatcggcttgtacttcgtcgacaagatccagtgtagaggtgacatctcttcaaccttaatgatggatcggctgctgaacattcctggacctccattaggcaacattgagaacataaagttggcaaggttcaggagccgggcatttgacagatggtggagcgaatggaagctacacttgttccatcaatcggcttccatgtatatgacagatctattccccgatgccattcctcagacaacagaatcctctcctcctcgccggagtaatagcggcaaagacattgaatatgccccgagtctaattccaaatggaggtgggcgatctccctctgccatcggctataatgcccccaagacttcagcgcttcttcaagggcttatcaggcaaccagccgatgccggcgagaaacgaaaaaccagatcatcggctgtggatactttagccccagctttaaagaagaagactaagccgaagaagtctacgccagctgatgatctgcctgctctagatccatccattgagcaagctctggatgaagaagcaatcgaggaagatgttgaccaagccgcagccgaagtaagcgatactgaaagaacaccatcggcttcacctaagcaggcccctccaagtccttctgttccagctcacttttcaagacctcctcctcctccttcacctcctgtgcaaccagaatcaggcaaacgtacgccatcggctgcggatagtcatcatgtggaagaagaagaacaattaactgcccctgctattccagtcttagccgatcttttctccttcgacatcaaggattatcttgatgaaacagaagaagacaccactagcaaagcaacagctcttctgcctaacgatgtgaaaagaacacttgaagacatctctcatcggctaggagcatcattagacacaacctggcagagattagccgatcattgggagcgcaaagatatcgaagctacaatccagcacaatcggcagcttgtgcacatagagaagtctaagcttgatcagctgtctgagggcccgatcaaatccaatattgatcggcttgaagctcgcaaaattgaactcttggcacaacttcaagaatgcaacgccgagctggatatagagcacaagaaactagtcgatctcccgcaagccgttgaagaacaaaaggcaaagctgaaatcggctatcaagaatgtcgctgatatgactaagtccttgaaagtcatccctggaaccgatgctcaagacacccaagctattgaagaaatagaacaaattaggaaaagggctataccggctatccagtga

SEQ ID NO: 40575 - DNA, 1585 bp, Oryza sativa
  Clone ID: PAT_MRT4530_44003C.1
aaacccccatggacaacgccctcgcgagcgccgcggcgatcgccgaccagcgccagaagatcgagcagtaccgccacatcctctcctccgtcctctcgttttccccgccggacatctcgcaggcgaagcgcttcctcgaccacagtaacgagccctctatctttgcccctttacctgttgattcgtatggattttgttctggttcgggtgtgacggttgggttcggtgcggccgcagtggtttccgacgaggtgccgctcgtggtgtcgcggcagctgctgcagacgttcgcccaggagcttgggaggttggagccagaggctcagaaggaggtcgcgcactacgcgctcacgcagatccagcctcgtgtggtctccttcgaggagcaggtggtagtgattagagagaagcttgcagaactgtatgagtctgaacaacaatggtcaaaagctgcacagatgcttagtgggattgacttggactcagggatcaggatgctggatgacacaaacaaattatccaaatgtgtccagattgcacgactttatttagaggatgatgattctgttaatgctgaagcttttattaacaaagcttcatttttggtaacaaacagtcaccaagaacttctgaacttacagtacaaggtatgctacgctagaattttggatctgaagagaagattcttggaagctgcacttcgatactatgacatctctcagattgaacaacgccaaattggtgacgaagagatcgatgaaaatgctttggagcaagctcttagtgctgctgtgacatgcacaatattggctggtgctggtccgcaacgatctcgtgttcttgctacattgtacaaggatgagagatgctcaaagttgaagatatacccaatactgcagaaggtctttcttgaaaggattttgaggaaaccagaaattgaagcatttgcagaggagctgagaccgcatcaaaaagctctgttaccagataagtctactgtgcttgaccgggcaatgattgagcataacctccttagtgccagtaaactttacactaatatcagctttgatgagcttggagcattattgggcattgaccctaggaaggctgaaaagatagcatcgcgaatgatttatgaagataggatgcgaggttcaattgatcaggttgaagctgtgatacattttgaggatgacactgaagagctgcagcagtgggaccaacagattgcgggactgtgccaagcgctgaacgacattctggacagcatgtcaagcaagggaatggctattcctgtgtgagctcttcaagttgcttcgatggtactcgtgagaactgtggtcacggcgtcaggcctcacggacattttgtacagatgttcgcagctgcgagtaccagtcatgtttcggaacgaattttggccacaattagtcggtgatcggtacatgtgaagttgtgaactgctggatagattaaggcagtggcgccgtaatggcattatatcacaaaccaaaattgatcgtgatagcattttatgccttgttttcttctggtaaaaaaaaaaaaaaagccgaattcctgcagc

SEQ ID NO: 40576 - DNA, 194 bp, Oryza sativa
  Clone ID: PAT_MRT4530_44004C.1
atggtgggcgtcccctcgcatgcgccggcttccacggcctcgcgagccatctcgcgccacgctgcctccaccaccgagtcacgctgtgccacctccgccgccagagagggggctacggcgggcgccgcctacctccgccaacgcgtgtgccgccctcgcgagctgtcccgcagcactggatttttcacatttgg

SEQ ID NO: 40577 - DNA, 3472 bp, Oryza sativa
  Clone ID: PAT_MRT4530_44005C.1
tatctctaggaaaaaatcatcatggtcgtcatggaggggagagacagtatagcctaatctaatcccagattgctagtgattagcacgtagatacatagaagcgatcgatcgaggacacatcgagaaaaaggtaaaagggagatcaattaatcgaagaagagagtttttgaaatatcgatcgatctagctatcatcatgtcgttcatccggaagaagtcgatggagttcttgaagagcttcgaggtgccggcgaagaacccgtcggaggaggcgcagcgccggtggcgggatgccgtcggcacgctcgtcaagaaccgccgccgccgcttccggatggtacccgacctcgacaagcgctcgcaggccgagacccagcgccgcaagatccaggagaagcttcgtgttgcactcttcgttcagaaagctgcacttcagttcatcgatgccgtccgcaagacggagcacccgttgccggagctcgcccggcaatgcggcttctccgtcagcgccgaggagctcgcctccatcgtgcgcggccacgacaccaagagcctgagattccacaatggcgtcgacggcatcgcccggaaggtggccgtgtccctcgccgacggcgtcaagtccgacgacgccggcctccgcgccgaggtctacggcgccaaccagtacacggagaagccgccaagaacgttctggatgtttctgtgggacgccagccaggacatgacgctgttgctgctcgccttctgcgccgccgtctccgtcgccatcggccttgccaccgaggggtggccgagcggcatgtacgacggcgtcggcatcatgctcaccatcctcctcgtcgtcatgatcaccgcggcgagcgactacaagcagtcgctgcagttcagggacctggacaaggagaagaagaagatcgacgtgcaggtcacccgcgacggctaccggcagaaggtgtccatctacgacatcgtcgtcggcgacatcgtgcatctgtccatcggcgaccaggtccccgccgacgggttgttcattgatggatactcgttcgtcgtcgacgagtcgaacctctccggcgagagcgagccggtgcacgtgtcgacggcgaaccggttcttgctcggagggaccaaggtgcaggacgggtcggcgaggatgctggtgacggcggtggggatgcggacggagtgggggaacctgatggagacgctgagccagggcggcgaggacgagacgccgctgcaggtgaagctcaacggcgtggccaccatcatcggcaagatcgggctggcgttcgcggtgctcacgttcacggtgctcatggcgaggttcctgctcggcaaggcgggcgcgccgggcgggctgctgcggtggcggatggtggacgcgctcgcggtgctcaacttcttcgccgtcgccgtcaccatcatcgtcgtggccgtgccggaggggctcccgctcgccgtcacgctcagcctcgcgttcgccatgaagaagctgatgcaggagcgcgcgctcgtgcgccacctctcagcgtgcgagacgatggggtcggcgagctgcatctgcacggacaagaccggcacgctcaccaccaaccacatggtcgtcgagaagatctgggcgtccggcgccgcgcagacgatgagcaacgccaagggattcgaccagctcacctcgtcgatgtccgagaccttcgccaaggtgctcctcgagggcgtcttccattgctccggctccgaggtcgtccgtggcaaggacggcaggcacaccatcatgggcacgcccaccgagacggccatcctcgagttcgggctcgcggtggagaagcgcgccaggatcgagcacaccggcgccgggaagctcaaggtggagccgttcaactcggtgaagaagacgatggccgtggtgatcgcgtccccgagcgccggcggccgcccccgcgcgttcctcaagggcgcctccgaggtcgtcctgagccggtgcagcctcgtcctcgacggcaccgggaacgtcgagaagctcacggacgccaaggcgaagcgggtggcgagcgccatcgacgcgttcgcgtgcgaggcgctgcgcacgctctgcctcgcctaccaggacgtcgacggcggcggcggcgacatccccggcgaagggtacacgctcatcgccgtgttcggcatcaaggacccgctccgccccggcgtccgggaggccgtggcgacgtgccacgccgccggcatcaacgtgatggcgaggtcgctgccgttggacaagcacacgctggtgacgaacctgaggggcatgttcaacgaggtggtggcggtgaccggcgacggcaccaacgacgcgccggcgctgcacgaggccgacatcggcctcgccatgggcatcgctggaacagaggttgccaaggagaaccgtgatgtgatcatcatggacgacaacttctcgaccatcatcaacgttgccaaatggggtcgctccgtctacatcaacatccagaagttcgtccagttccagctcaccgtcaatgtggtcgccctgatggtgaacttcatctctgcgtccttcacagggagtgcgccgctgacgattgtgcagctgctgtgggtgaacctgatcatggacacactgggggcgctggcgctggcgacagagccgccgaacgacgcgatgatgaagaggccgccggtgggtcgcggcgacaacttcatcaccaaggtgatgtggaggaacatcgtcgggcagagcatctaccagctggtcgtgctcggcgtcctcctcctcagagggaagagcctcctccagatcaatggccctcaagctgacagcctactcaacaccttcgtcttcaacacctttgtcttctgccaggttttcaacgaggtgaacagcagggagatggagaagatcaacgttttcagcggcatcttcagcagctggatcttctcggcggtggtcggcgtcacggcggggttccaggtgatcatggtggagctccttgggactttcgccaacacggtgcatctcagcgggaagctgtggctgacgagcgtgctgatcgggtcggtcggcttggtcatcggcgccatcttgaagtgcatcccggtcgaatccggcagcgacgcttctgatcgtcacgacggataccggccgatccccaccggcccgagtgcggtttgatttttgcaggcattttgatcatcgttttcttcataaagaaggagatgagtttgcatgcaaacttcgtagtttaactcagttttttttttcctcccgaacggaagacattcagtttttcacacaaacatcgtagttttaactcctccaaagagtaggttttgtcattgcgtcttcttttttcccctcagatttggtagtgataataagttgtcattgttttgatccaagggatagaattcagttagacaaaattgaactaaaaaaaaagcaaaaaaaaaaaaaaaaaaaaaaacaa

SEQ ID NO: 40578 - DNA, 621 bp, Oryza sativa
  Clone ID: PAT_MRT4530_44006C.1
atgcggctgctctccggcgcctctgcttcccgaatcccctgccccctcctctcactcgcccgcgcgagggcaagatgcttgccggtccccgcctctgccaccgcgtgccgagcggcctcctcgtcagccgcggcggccgcgggcgacggcggcgcgctgaagccgtggttgttcgtcgggctcgggaaccccgggaaagtgtaccaagggactcgccacaacgttggattcgagatgattgatgttatagcagaagctgaaggtatatccctcagcagtatgcagttcaaggcaatggtaggaaaaggtcgtattggagatgcccctatcatgctggccaagccacaaacttttatgaatgcaagtggtgagtctatgtatgatgatctagacttgccctttgcaaaattgcgtctactgccgaaaggcattggacgaccacctgggaagatggatcctgccaattttgttctccgaccatttaacagaaaagaacaggaagagcttgatttcgctttccataggggcttggaggcagttagaataatggcacttgagggattcaacaagagcgcaacttatgtgaacaccgcacagtcctctgaaatgttgaatagatga

SEQ ID NO: 40579 - DNA, 1079 bp, Oryza sativa
  Clone ID: PAT_MRT4530_44007C.1
ggtggttcctcctcctcacgggcggcggcgacggcggcgactacggcgatgcggctggtctccggcgcctctgcttcccgaatcccctgccccctcctctcactcgcccgcgcgagggcaagatgcttgccggtccccgcctctgccaccgcgtgccgagcggcctcctcgtcagccgcggcggccgcgggcgacggcggcgcgctgaagccgtggttgttcgtcgggctcgggaaccccgggaaagtgtaccaagggactcgccacaacgttggattcgagatgattgatgttatagcagaagctgaaggtatatccctcagcagtatgcagttcaaggcaatggtaggaaaaggtcgtattggagatgcccctatcatgctggccaagccacaaacttttatgaatgcaagtggtgagtctgtggggcagttggtctcatatttcaagataccacttaatcaagttcttgtgatgtatgatgatctagacttgccctttgcaaaattgcgtctactgccgaaaggtggacatggcggtcataatggggtgagaagcattatcaaccatttgaagcagaaccgtgatttcccacgtctaagaattggcattggacgaccacctgggaagatggatcctgccaattttgttctccgaccatttaacagaaaagaacaggaagagcttgatttcgctttccataggggcttggaggcagttagaataatggcacttgagggattcaacaagagcgcaacttatgtgaacaccgcacagtcctctgaaatgttgaatagatgataaagtgttcaatttattcttataacataaagattcttatgtcagatctgaatgtttcctatccagtagacacttgcacacatggtggtcattttactctcaggaaatcctgagctcccgaggacggaagaggttatttgagctgcagcaacttggtacggtgattttcaccagcagcttaaatacagggaagttagagacgtcacactacatgcgtacttctgttccttacatttgtagccttgtattgatttcaaaaaacaattgtagcactgtaa

SEQ ID NO: 40580 - DNA, 1679 bp, Oryza sativa
  Clone ID: PAT_MRT4530_44008C.1
ccggccaactctctcgtctctcccctgcaccatcgaaaagagagacaaaccccttccttccgccaatggccgccgccgccgcccttcgccggagcctcgctgctggccccgccccggccctcctcctccgccgccaactcctcatgcgcttcctctccacccagacacagtcacagacgcaaacccccgccgacctcgccaccctcaagaactccattcgcagcgccgcccacaccccggaagccctcgccgacctcttcatctccggcctctcccacccggccttcctcgccgaccgccccatctttaccctctccgtccaccgcctcgcctctgccggccgccgcgacctcgtcgcctccatcctctcctcctccctcacctccctccccgcgccccacccctccgagggcttcctcatccgcctcatctccctctactccgccgccggcatgcccgaccactccctctccaccttccgcatcgtcaccccgccctccgaccgcgccctctccgctctcctctccgcctaccacgacaaccgcctctacgaccgcgccatccaagccttccgcactctccccgccgagctcggcatcaagcccagcgtcgtctctcacaacgtccttctcaagtcctttgttgccagtggcgacctcgcctccgcccgcgccctgttcgatgaaatgccttccaaggctgacgtcgagccagacattgtctcctgcaacgagatcctcaagggctacctcaacgcggccgattacgccgcctttgatcaattcctcaaggataacaccactgccgcgggtggcaagaggcgactcaagcccaacgtgagcacctacaacctccgcatggcttcgctgtgctccaaagggaggagctttgaggctgccgagctgctggatgctatggaggcaaagggcgtcccacccaaccgtgggagcttcaacaccgtcatccaggggctctgcaaggagggggaggtgggtgctgccgtcgcgatattcaagaggatgccagaggtgccgaggccgaacggaaagggggtgctgcccaactctgagacctacattatgttgcttgaggggctagtcaacaagggtgtgtttgctcctgcattggaggtgttcaaggaatgcctgcagaacaagtgggcgccgccgttccaagctgtacaaggactgatcaaaggattgctcaagagcaggaaggccaaacatgccaaggaggttgccatggcgatgaggaaagttgtcaagggtgacgccaaggaggagtggaagaaggttgaggctgaattttcgttcgagcctactgataagaaagcctaactgctaggaatgatggatggcacaatcagaatgtcagttagacgattattttacacttcaaatccattgtctgattgcatgtcttttgtgcgcttgtggccaactctatctagcctttcgttccgtttagcgcataagattattttccatatgaggtatttgcatttcgaacaaatacaggtactactctttggtggtttaccgtgtagaccatgtaacttgaatgatcacatatgatgcaactctttccagttccttatcttaatttatctcaaacttggtacatttcaatcctctatatctttatgtgaataacccaaaaaataatacagattagtcatc

SEQ ID NO: 40581 - DNA, 1411 bp, Oryza sativa
  Clone ID: PAT_MRT4530_44009C.1
ccgactccgacactgacccatgcccatggccgcgctccgcctcctgcttctcgcgctcgccgtcgcctgctgcgccgttgccgagccgccgcagcaggagcgctcggctctgcgtgccttcctcgccggcacgccgcacgagcgggcgctcgcctggaacgcctccacgcccgcctgcgcctgggtgggcgtcacctgcgatgccgccaacgccaccgtcgtcgcgctccgcctccccggcgtcggcctcatcggccgcgtcccgcagggcactctcggcgcgctccgcggcctccgggtgctctccctccgatccaaccgcctcttcggcgacgtccccggcgacctcttctccctccccgacctccgctccctcttcctccagggcaacctcttctccggctccgtcccgcccgacgtcgccaagctcacggcgctccagcacctcgcgctctcgcacaacaacctcaccggcgccatccccttcgcgctcaacggcctcgccaacctccgctcgctccgcctggacggcaaccgcttctccggcagcctcccgagcttgactctcccgctcctcgaggacttcaacgtctcctacaaccagctcaacggctccatccccgcctcgctcgcgcgcttcccgcctgagtcctttgccggcaacctccagctctgcggcaagcccctgagccgcccatgcgagcccttcttcccgtctcctgctggcgcgccgacgccgacggatggacgaggcagcggaggcggttccgtgccagtgtccgagaagaagaagaagaagctgtccggcgcggcggtcgcggccattgccgtgggcggcggggcggcggcactgctggccctggtgctactcgtggtctgcaccgcggcctcccggcgccgcgcggcgaacggcgaggtcgggaaaacagcggcggcgaggggcctgacgccgccgtcgacggcgtcgggggagctgggcgaggtgacgtcgtcgacgtcgaaggagatcgctctggcggcggcggcggcgacggcggagaggagccggctggtgttcgtggggaagggggcggcgtacagcttcgacctggaggagctcctgcgggcgtcggcggaggtgctggggaaggggagcgtggggacgtcgtacaaggcggtgctggaggagggcgccacggtggtggtgaagcgcctcaaggaggtggcggcgtcgcggcgagaattctcggcgcacctcgactcgctgggcaaggtggaccaccgcaacctcctccccgtccgaggctactacttctccaaggacgagaagctcctcgtctgcgactacctccccgccggcagcctctccgccacgctccacggtgggggggggggggggtgtatgtacagatttacaaagttacagggtttg

SEQ ID NO: 40582 - DNA, 228 bp, Oryza sativa
  unsure (1)..(228): unsure at all n locations
  Clone ID: PAT_MRT4530_4400C.1
ctttcnctcgaaacactgtctcttttctgcgatgcatagcccgccgcttcccctgtgtttttcttcgccgtccgtcgttcttttcaactccttagctgcgatattaaagtctagacacaatgagaggaaggagctacacgccctcaccaccaaggggttatggaaggaggggccggagccgtatccgtngggccggtttggtgggtgtcgttgccgtgttctcccgcc

SEQ ID NO: 40583 - DNA, 489 bp, Oryza sativa
  Clone ID: PAT_MRT4530_44010C.1
atggaactccacgtggagaggaggggaggagttccacagaaagaagtgggtcgaacgaagagcagccaaagctccgggaccgcttgccaagatgacatgcgatgccgccgcctgtcttacacgagtctccatgctaagcgacatagcaagcccgtcagaactgccgaacaaccaccaattggtaatctaacccgctggaaacccaaggcctggatttggagaagccgatggtgtcgacggacgaccacgcaggccacccaaacaccgccaagaaaccccattgtcgctgctgccaccgaggagccagtctcgccagatctcctctgggatgtgccggatctaaaccttgtggggctagattcggtcgtccccctcgccaccttcaccactactgccagccgccgccacaataggggatccagcctctcgcgccggagatacactcgaatcccaccggagacgcaccggatctggaccttagttggctag

SEQ ID NO: 40584 - DNA, 312 bp, Oryza sativa
  Clone ID: PAT_MRT4530_44011C.1
atgggtaagcccgagtggcaaccgaaagctacaaagtttgcgaggttgcatacattggggcagaaggacgtcaagcaacaacgagatgatcgaacggcggacttgggcggtgcgccggtgacaccgagcgtggacgtcgaggcgccggcgagggactacgagcctccggagcatctggagcttctcgtcacagacctcggcgttctgcagccgttagcgaggtgcttattaagctctctaatgtcgcaaaattcagggacatataaggtagtatttgacaaagtttcagagatatacagtgaattttcctaa

SEQ ID NO: 40585 - DNA, 435 bp, Oryza sativa
  Clone ID: PAT_MRT4530_44012C.1
aacgaccatcgatttcgaggcggaatgtgattgggaaacaggaaaggctatcgcagaagaataatcaatcaaacccttgaagacttgaaaccatgagatgaatcacttatctctagacactgaagattctcttgcaagcttgctgctggagcttgcagccaacaacgatgttacgggtttcaaaagattaatcgagtgtgaaccttcctccatagacgaggttgggttgtggtatggacgccacaaagagtcaaagaagatggtcaacgagcaaacaacttcttttatgggtgatgccacctactgttgcattgatgtcatgaaaattgattctttctgtatcagaagctgatgtgaaaccgatcatctggccttgacaaaagcactgcacttcactgtgcatcttcaggtgggtctgaaaacgccgtcgatgct

SEQ ID NO: 40586 - DNA, 184 bp, Oryza sativa
  Clone ID: PAT_MRT4530_44013C.1
tttagcaacaccaaatgagtcatcatcgtttagatgttgatggtagcctgagaccttaggtgagtgttaaatgtcagaagtgtttctatgagctctgtacatgtatagaaccattaggattaggtcattttgtgctgtcttagaagtacagtgtaaataccagagctagtgtcagatcctacta

SEQ ID NO: 40587 - DNA, 240 bp, Oryza sativa
  Clone ID: PAT_MRT4530_44014C.1
gaaacctatatttaaaactgtgctctaacacaatttgctccaagggaagaactggcggggctgtattttacgttccaacagcactaggtgctaagtacattactgggagggctttcttcaagactaatctaagggattctggagcaggctgctagaccaaatctatgacagaaggcaccgtgatatgcttacctacaggaagtgaagcttaagggttgattgctggaaatgcgacacaca

SEQ ID NO: 40588 - DNA, 881 bp, Oryza sativa
  Clone ID: PAT_MRT4530_44015C.1
ccaacgcgaccacaagcctagcgagcttggttgatttttcgtgtgcgtgcggttgtgtaggcgaaatcctccggttttttctcgtagtttgggatcgatcgatggcgtcgttgggtggtggtggtggtgggcaggggccgcccaacggcagcggcgtcccaaccaaccggccggtgttcaccatcgagggccgtgtcgtggagccgcccacccttaccgcggcgcagctggacatgattaggtcaatgtatctctcgtcgcttggtgtgccacctgtcaacggattctatccgggcgcagtacagtacccgagaggagtgttcgtcccttcaaacgagtacgaggcggcaggggcaactcgggctgccaaaagggccaagcagactgacatttccgctgagaacgagctggccgcgaagaccaccggcaccaccccaccaccagccgcgccgaagaagtgatgcccgcgagatggatacatggcgcgcgcggccggccggcgtcgagctccatcgattcctccggcgaccggccggcgtgcgtgcaggcgaccgacccagcgagcgaacgaataaaatcaggggcgcctccagccgggcggcctctgagcgttactatctactactattagctgtagttttgctattttcagcgtgaagactgcgtgataattaaataagtgagacccggcagaaaccatgcgtttgtgtgtggtgtgtggcatggtggacaactcatatgccggttgatttacctgtatgtactctgtgtgaatgtgtgatcgatagatatgctcgcctgcagtgtgttgtggtttttaataaaaaaaaaaaaaaaaatgtgtgaaaaaaaaaaaaaaaactcaaaaaaaaaaaaaaaaa

SEQ ID NO: 40589 - DNA, 303 bp, Oryza sativa
  Clone ID: PAT_MRT4530_44016C.1
atggagccgacgccgacggcgctccccggtctgctccccggtctcctcatcgtccgcgtcgagctgcttcaccgcgaacacatgttcctcgtcgtctgcatagaggaaggtgcaccggacggtggcctgggtggaggatgcggcagcgctcggagggagcaggggcggctgctgaacacggaagtagcggcggcggcggaaattgagccatcgagcgacacgcagtgggtgtgctcccgcatcgagctcggcatcacctccggcgccatttatccagatctaggcgtccctcgtgacacgtag

SEQ ID NO: 40590 - DNA, 336 bp, Oryza sativa
  unsure (1)..(336): unsure at all n locations
  Clone ID: PAT_MRT4530_44017C.1
ggccacannnnncaaacgaacctcagcaacttttgtcagaaagaaaagaacctccgcgagaaacaagaaagcgagagagggagagaaaggaggctcgtcggagtaggggcgctcggggtatggggctcggcggaggctcgctggagtaggggccgccactgcgtggggctcgccggagtaggggcgctcggggagcctcccgagatccgccgctcagcggcgccgccgtcttccgggcagagctctcgaagctcgccctcctcgcgcgccggtggcgttggcgtggcccgcgtgtggctactccattccggggctgggccttcaccgttgacgaca

SEQ ID NO: 40591 - DNA, 202 bp, Oryza sativa
  Clone ID: PAT_MRT4530_44018C.1
ccccctctccttcgcagccaccgccgcccgcatagccgcctccgctccgagcaaagcgagggaggggcgtcgtcgatctgctgcatcccggggatacactgcaaattatggagtgatccatcaaggagacagaacctgattgagaagtgtacaagcagttcttggtggcacaattttatgaaacatcaacagggcatcaggt

SEQ ID NO: 40592 - DNA, 664 bp, Oryza sativa
  Clone ID: PAT_MRT4530_44019C.1
ttattcatgtcgagagatttttctggctctggctgaattcgctctgttcgcacggtccagctcttcacggagctgcccggtctcccatgaaatcatgaatcccaccggcaagccgttgctcctcctcctcctgggccttctcctgctagcaaccaccactttgtcccgagcaatccatgcgataccgtaccgaaactcggctctggtgccaccaccgtcgcttgcgtgccacgggaacgggacgcccttctggcctgtagcaacctcaccggccatgtcctcaagcttcacctcagtggcatatacactaatgagcatacaggtatggaaggtttggtcggccagataagtccccagctgctctacctggacctgagttacaataacctggcaggtgacatcaccgaagaacactttgccgcttccgtcaactgaacagggcagctggccccgcttggccgagcttgcctgcttcaccttcgttgccacccaccggtcgtgacagctataaacgatggcatgcttttgtcccctctgtccatttccccttcctgcgaagccacggctctgcttcgccccatgtgccaccactgcctccatcccgaaccgccatggccaccgccatcgcactgatttccagccaatagtttttatggatttataa

SEQ ID NO: 40593 - DNA, 186 bp, Oryza sativa
  Clone ID: PAT_MRT4530_4401C.1
atggaggtgatctcacaacgttgggatgagcccgaggtcactgtggagcttgtaacttgggatggcggcggcggctcttcttctattctcacgttcgagaaggttggcgtgctcgaggatgacgttgtcgctccaccggcaggagcgcacaagggagtggctttagctggtttggttgggccatag

SEQ ID NO: 40594 - DNA, 2579 bp, Oryza sativa
  Clone ID: PAT_MRT4530_44020C.1
cccgggcccccgggctcggcatttggctctactactagtaatactcttctctcttctcacagggagtgtgtgtgcctccatgacagtgctcgctctccctgagccgagagagtaaaggctctctccttcacacacctaccgcctactctcccactcttcttcccaccccactcgtgtgcgcgccactgccgccggcgatggcgccaatgccggcgccggccgtggctctggcggttctggtgctcctctccgccgttccggggtacttctccgacgacctcaacaccgacgcgcaggcgttgcaggcgctgcggtcggcggtggggaagtcggcgctgccgtcgtggaacagcagcacgccgacgtgcaattggcagggggtgacgtgcgagagcggccgcgtcaccgagctccgcctccccggcgccggcctcatgggcaccctcccgtcgaacgtgctcggcaacctctccgcgctccgcacgctctccctccgctacaacgcgctcacgggccccatccccgacgacctctcccgcctgcccgagctccgggccatctacttccagcacaacagcttctccggcgaggtcccggcgtcggtgttcaccctcaagaacctcgtgaggctggacctcgctgggaacaagttctccggcgagatctcgccggacttcaacaagctgaaccgcctcggcacgctgttcctcgacggcaacagcttcaccggcgagatccccaagctggacctgccgacattgagccagttcaacgtgtcgtacaacaagctcaacgggtccatccctaggtcgctccggaagatgcccaaggactcgttcttgggcactgggctgtgcggtggcccgctcggcctgtgccccggcgagaccgcgctcacgccggccggatctccggaggttcaacctgctggtggaggcgcggcagacgccggcggcgcaagcagcggcacgaagaagaagctctccggtggcgccatcgccggcattgccatcgggtgtgtgttcggcgtgctgctcttgctggccctgatcttcctcctctgccggaagaagtctagctcatccacgccagcgacagcggtggagaagggtcgtgacctccagatggctccgatggacatggaaccaaagggacagaacggctcagcagccggcaacggcgcccacgtcggagcagccgcggcagcgccagccgccgccacctccgccgccgtcgcggcggcggcagcagcagcgaagaccggcggcgcgacgggcgggtccaagaagctcatcttcttcggccccatggcggcggccccgccgttcgacctggaggacctgctccgcgcgtcggcggaggtgctgggcaagggcgcgttcgggacggcgtacaaggcggtgatggagagcggctccgccgtggccgtgaagcgcctcaaggacgtggaccttccggagccggagttccgggagcgcatcgccgccatcggcgccgtgcagcacgagcttgtcgtcccactccgcgcctactacttcagcaaggacgagaagctcctcgtctacgactacatgtccatgggcagcctctccgccctcctccacgggaaccgtgcttccggcaggacgccgctggactgggagacgaggtcggcgatcgcgctggcggcggcgcgcggcgtggcgcacatccactcgacggggccgacggcgtcgcacggcaacatcaagtcgtccaacgtgctgctcaccaagaactacgaggcgcgggtgtcggaccacggcctccccacgctggtcggcccgtcattctcgccgacgagggtgtccggctaccgtgccccggaggtgaccgacattcgccgggtctcgcagaaggccgacgtgtacagcttcggcgtgctgctcctcgagctgctcaccggcaaggcgccgacgcacgccgtcgtcaacgaggagggactcgacctgccgcgctgggtgcagtccgtcgtccgggaggagtggaccgccgaggtgttcgaccaggagctcctcaggtaccagaacgtcgaggaggagatggtgcagctcctccagctcgccatcgactgctcggcgcagcaccccgacaggcggccgtccatgtccgaggtggccgcgaggatcgacgagatccgccgctccagcctcggcgaccgtccggccaccgacagcgccggcgagggcgaggagccttcactataaccgaccagccgacattgccgtctggatcaccgtacatcgatctcagcctcagcgaacggaaattaagttggagaattgcttagttctttgcatggatcttgctcccccaggctacttttggttcatcagcaacttgtgcatgtttttttcattactttttctttcttcttcctttcttttttttcccttcttttttttgggcctttctctcacgggctttgattctattctatagcacatgtcactgtactctttgattcttggaaaggaacacttgataatgcgttgtatctatgacgaataccatcaccagctgtatggtttgctatttaaaatacgaaatgatttcatttc

SEQ ID NO: 40595 - DNA, 129 bp, Oryza sativa
  Clone ID: PAT_MRT4530_44021C.1
atgtcgggtgatcaagccgacgacgttcgcgaggaattatccgttgggcgcgacgactctgcatttgtcgagatcgttctcgataatgcggtgtactcgaccacgacctactcgaatattattgtataa

SEQ ID NO: 40596 - DNA, 2121 bp, Oryza sativa
  Clone ID: PAT_MRT4530_44022C.1
tcatctaggatatggctcagtgagtgtaacaccgtttacagaaatgttatcaaaaccacatcggtcatacacatagctgcgttgcccaaatgaaggagaagaggaagctgatcctcccccaaagaagaatgcaggttgtgctggtggctgaagctccatgttttctcgggtcaacatgaaaatgacagatgatatctgaggtctatcgttagggtctgactggacgcacaacagcgcaatgtggatgcatcgcagtgcttggctttgagaatatccgtgaagcgattggtcaatcatttgggaaaccgtcccttttgtccagcaattccagacatcactaaggagattcacaagatcatgatcatcagaattgcagttccttctcctcgttactatttcgaggaccaacacaccaaagctaaaaatatcgatcttggttgacacatttccatctattgcatactcgggtgccatataaccgaatgttccaacaactctagtcgtcctagtatgagtatggccttctcctagcagccttgccaatccaaaatctgcaattttcggttccatatcctcaccaagtaaaatgttgttcgattttaggtcccggtgaatgatcctcaagctcgagtcctcgtgtagatacaatattcccttggcaattccaagaatgatgttgtattgttgctcccagtttaatgcatttcccctattgatatcttttggtatctcctcaagaagtgtaaaaaaataagatatgtttgaatgggaagtaaaattaccgaataggaagttgtccaggctcccgttcttgatgtattcataaaccagtaatgtctccccctgatgcaagcaaaatccatgtagccgaacaaggttcttatgctgaagctctgccaataacagaacctcattgtgtagctgatctaatccatgcccacttgttcctaaaagtttcttgactgctacttcttgtccatctgagagtactcccttgtatactgaaccaaaaccaccttctcccagtttattgttctccgagaagttctcagttgcctcttgcagcgtaggcagatcaaaaatcatgcattgtgctcttgttatcttcttcaatgggtggtcagcctcgacagccttggtcctcctcttgaaccgaacgaatgcaaaaactgcaaggatcaacagtaccaaaactgaacaagccaggcctgcagcgactcctgctgcactctttttcttccctgctccagcctcaaccggagtctcgacgaccggtggtggcggcggcgagagctgcagcgtcgcccggcctccgtagaacggccgcacgctatacatcagccggaggctgttgcccatgtacaccgttttcgcattatcgtggaggctcctaaggcattccttgcactgctccggcgtcaggaccggcacgcactgcgcgaacccgtagatcttggggttgaagctctcctcacccgtggcgaaatacttgatggtggtggtcgagttgttgcccgtcgtcgtcgtcgtcgtcgtggcccaggcgtgctcgaccagggcggcgaggatctttgccacggcggcgttgaaccagccgacctccggcaccttgacgttccccgaggcttggccgggaatccaactgtttaggacgaggagcaaatcagtttctgtcatctgggagacctgccacttgtccggcctgaggaaatccatgaagctctggccggtgaagcggatcaagcaggcgtcctcgtacagggagatgccgccggggcagacgcccttcgcgtcgacgaacgccgccgcgacgcacgcgcggcaagccgaggcgttcacgtcgccgcggcagagcgccagcgcgtagacctggtcgggcgccgcgccggcggtgcggacggcgaagcccggggcgccggcggcagaggcgttggcggcgagcgccgcggcgaggaggcccaggttcctgtcgaaagcgctgttgccggtcacgttcgtgttggcgacaccggggtcgcattcagcgaccggagccgccgtggccggcagcggcagcgtgacgacgacgacggcgagaacgacggcgaggatgccaccaccgtagacatagccggcgagcat

SEQ ID NO: 40597 - DNA, 1083 bp, Oryza sativa
  Clone ID: PAT_MRT4530_44023C.1
atggtggaaaccacagttgatgttatgataagaaaaggaacaaacatgagactcgaaagctacgagtttttgagtgatttcaagcatggcaacgctgtggtactcctggactacacagagtccggaaacaaggggagtttcatcgtcacacaagttgatgggtcattcactgcctggtttgaaacaggtggaaaagagctctgctttgactcatctggtcatattactcagttatttaaagacatgattgtcgatttttacgatctgacctggagtttgcacaagaggcacttagtcatgcagaattttgtaaaggaaaatatatacgtcaaaatctttgatggcgtacccaaacttatgattctactaactgaagttaaattggttgatcagctagggccattcaaacaggactggagtcatgtccaaggcctcatgacttggtgtaaagaacaatctggtttaaaaatggactttcttaccaagagtttctatgatttcatcggatctaccgactgcacagtaatcaagctgagaaactaccctgatgattgggatgaaaaaaagaaaggtgattatttgctcacactcgcagaagtaaaccacggagttcttaaagataagttgaagagtagggatgattttcattggccgtttgtgaagctgcctaagctggagcagaacttaccaccaatgttacagcaaattcttagtggggagagacagatgaaaagaaagttcgacgtgacattcttttgtgattatatcaacctcttgagaaactcctacaagaaattcaatgaattaccagaaaatgttaaggctttatgcataaaccaggatggcttcattaaactgatagatgggtggtctcctgagttttggaccaagatctacgagaaaattggaacactgcttgatctcaatgatggcgatgccggtgcccgcgctgacattctcaggacatatggtgctgttctgcaggatttggttcagggtggtgaaggtgccgtcgatgaaataggattcggttcaggtgcagtcagtcacactaggaccatccaagttgtatctaaggactga

SEQ ID NO: 40598 - DNA, 340 bp, Oryza sativa
  unsure (1)..(340): unsure at all n locations
  Clone ID: PAT_MRT4530_44024C.1
gcgcatcgagccgagcgtgaggaatggactggctctggcttagcgactcgctcgcatccttttcttccgcttttctttcccccgccgccgtcgcgatctccttccccatntcgcctcatctatctggatcgtctctnctcggngccgtcggctagccggtaatnccctccgttcaacaaccgatgcggtcacctctctcgcctgctaccgtcgtcgacgnctcccctgtgttacactncgngcgactnccccctggntacgggcgccattggtgacggcggcggcggctgggtcagntaaagngagcacgangngtgttccatctaacnaactacnngcc

SEQ ID NO: 40599 - DNA, 547 bp, Oryza sativa
  Clone ID: PAT_MRT4530_44025C.1
atggtcaaaataggttttgctggtggtcagctgtaccgccagcgatcaaaggccattaaaaataatatatttgtgctaacaaacagtcggctgataatttttgctggtagcaagccgtgcgccgccgccgttccggtcatagccgtcgctcgggaagaccgccgtcatgatcgccaagtcgtcgccgtcctcgtccgccccttggccaccgccgaagaccgccagagcaccgtcgtcaccgtcgacccgaagaccgccgccgcttcaacctcgtcgccgtcgccgtccgttgcgccgtcgttcgccggcgagcgtgcgagcccgagccgccgagccgtcgtcggaggtgacgtcgtcgccgacgtcatcgtcgccctcttccgtgagccgccgtggacccgatggatctcggccgtccgttttggatcaaatcccgtcgtttccggagagtccgttttcgccggagaagagtttgaagagttccaaggccagcaaggcaagtcacacagatcccaaacaaccctttgagcatgttgatcctatttaa

SEQ ID NO: 40600 - DNA, 385 bp, Oryza sativa
  Clone ID: PAT_MRT4530_44026C.1
aatacaaccggtttaaaggtagttcttttgataacacggtgtcttatcggtaggattgatatttgctagaacgcgcgtatcttacaaaccccatacattgcggttgctcatttattgataatgggggtagcttttccgggtggagagcccgtatcacagtcttgctagctagcgccggtcatacgggttgagctaaagaacattcatctttaatatgcaggcactgaaacatagacggaccgaagtcttttatactcgctgataccacagaaagaagtatgcgcgacagcatgccaggtgccttaggagactgcgatctggcgatactacatggtaggctcacgtcattatgaaagcctgtcgtagcaccttggctacgaacagt

SEQ ID NO: 40601 - DNA, 3231 bp, Oryza sativa
  Clone ID: PAT_MRT4530_44027C.1
atggcgcggccggaggagaagctgcggtgcacgaaggagcccttcatcgaggatgtcggcacgcggaggataaagagcatccggttcagcatgttctcggggaacgaggtgcgccaatccgcggaggtgcaggtttggaacagccggatctacaaccatgagatgaagccggtgcccaatggattgctcgacacgcggatgaacatttctcacttttgcgtttctttggttggtagtacaggtgttgctaaaaagggcagagcagggttgattattcttcatgattgtagcaaaacattggatggaagcacagaagagcttcgggacgcactatcacataagaaagagaaactatctattagtgctgttcgcatgctagaccctgcaattgttctatctcttttcaaaagaatgaccgatgaggattgtgagttgctaaacctcggtgataggcctgagaaacttattgtgacagagattgcagtgccacctgtacctatacgtccttctgttttcgtggctggtggaagaatgagcaatgaagatagcattaccgtcatattgaagagtattgctaatactaattccatccttaaggagaaccttcaaactggtggtcagttcatgaagtgctttgattgctggcaacaccttcaacttcaagttgttgaatatatcaacagtgacgcaccctctcttcccgagtcacaacatcgaggccttgttcagcgactcaaagggaagacaggccgatttcgtggtaacttgtctggaaaacgtaccgagtacactggaaggactgtcatttctcctgatccaaacttgagaataacagaggctaggattatgccctggagaacactaaggtttaacgagtctgtctgtaacccatataatgctgattttgatggcgatgagatgaatttgcatgttcctcagactgaggaagcccgcactgaagcgcttatgctcatgggggttcagaacaatttatgtaccccaaagaatggggaaatactggttgcatccacgcaagactttttgacttcctcttttctggttacaagaaaagataacttttatgacaggtcgtcattttctctcttatgttcatatcttggtgatgcaatggaaaacattgatttgccaacacctgctctgattaagcctattgagctttggactggtaaacaactcttcagtgtgttagtacgtcctaacgcatgtacaaaggtgtttctgaatcttactgttaaagagaaaatttataagactcctaagggttcaactctggaacctgaagcaatgtgtcccaatgatggttttgtctacttccgaaacagtgaacttctatctgggcaagttgggaaggccactttaggtaatgggaataaggatggcatgttctccactcttgtaagagattataattctcatgctgcggcaagctgtatgaaccgcttggcaaaatttagtgcaagatttatagggaaccatggtttctcaattggtgtggacgatgtccaaccgggagaacatttaaaccaagagaagaaaatgaaaatagatggagggtacaaagattgccatgatcttattgcttcctattccaaaggtgcactccgtttgcagcccggttgcaacgcagcccaaacattggagcaaagtataactcgtgtactgaatgaaatcagagaagaagctggaaaagtctgtatgaatacacttcactggaggaacagcccattgatcatgtctcagtgtggatctaaaggttctccaatcaacattagtcagatggttgcatgtgttggccaacaatcagttggagggcgtcgtgccccgaatggcttcatagatcgaactcttccccactttcctataaattcaaagactcctgcagccaaaggctttgtcgctaattctttctatactggcttgactgccaccgaattcttcttccatacgatgggtgggcgagaaggtcttgttgatacagcggctttggtccttgcagttgagtgttttatctcaggcactgtagttcgctgcatgaaaaccttcacagcactatgccagttctatgtagaggttaaaacagctgaaacaggatatatgtcccgcagattaatgaagggattggaagatctctcagttttctatgatcagacggtccgcaatgctagtggtggtattgtacagttcctctatggagatgatggcatggatcctgcaaagatggaagggaaagatggaaagcccttaaatttggatcaattgtttatgaaagtcatggaaattatcaatgctgctaaaaagataagcacacctattatcactgctgagttactttctgagaaggatgtgttgtctgcacgcattgtgaaaggctctatggaaaaggcagtgctgggtgaggtggctgaagccataaagattgtgttgaaatcaagtcaaccaaacttggttgttaaactcgatatgcaacgtatagaagccctgcacatgggcatctctgctgactctgtgcagctgtcaatattgaatcatccaaaaataaagctaaaatctgagcatgttcgtgttattgataaatccaagttgagaatttatccagctggaatagataagtccaaacttctatatgagttacatcatctcaaatccatgcttccaaaagtgatcgtgaagggtattccaactgttgaaagagctgtgatcagcgaaactggtgaagaaaatgacaaaagatacaagttgttggttgagggaacaaatctcttggcagtaatgggtactccaggagttgatgctatgaaaacaaaaagtaaccacatcatggaagtgaaccgaacactcggaattgaagctgcgaggagatctattattgatgaaattcagtatacaatgaaaagtcatgggatgaacattgattcgagacatatgatgcttctggcagatttgatgacatacaagggtgaaattcttggcattactagatatggtattgcaaaaatgaaaagtagtgtgctgatgctggcttcgtttgagaaaacagcggagcatctctttaatgcatcatacagtggtcgtgaggatcagatagagggagttagtgaatgcattatcatgggtatacccatgcaacttggcactggtattctcaaagtcagacaaaggcttgaccatttgcctgaatttaaatatcagcctgatccaatattggcgtga

SEQ ID NO: 40602 - DNA, 313 bp, Oryza sativa
  Clone ID: PAT_MRT4530_44028C.1
ggaaccttgccaggatttttttttctttttggttctcattcatttcgagaataacttattttgatttcacaaggatgaccggttttgataccaacgaatttacagacttttgggttacaaaacaaaatagttccgttacaaaaagaaaaatttgaggggaaaaaatgaatttttcctatatgggacattggccgcgattttttacaccgcaaaattattcctttattgaatatataagctttgggcccctcaaaaaactttgaaggctttatttctgttccctggcaataaaacctcgggctggaaaggttaa

SEQ ID NO: 40603 - DNA, 4232 bp, Oryza sativa
  Clone ID: PAT_MRT4530_44029C.1
atggcgcggccggaggagaagctgcggtgcacgaaggagcccttcatcgaggatgtcggcacgcggaggataaagagcatccggttcagcatgttctcggggaacgaggtgcgccaatccgcggaggtgcaggtttggaacagccggatctacaaccatgagatgaagccggtgcccaatggattgctcgacacgcggatgggtgcggcaaacaagcttggggagtgcagtacttgccatggttcatttgctgaattcccggctggcttgagttcctccgaattcgtcttccctacgattggtgggcgagaaggtcttgttgatacagcggttaaaacagctgaaacaggatatatgtcccgcagattaatgaagggattggaagatctctcagttttctatgatcagacggtccgcaatgctagtggtggtattgtacagttcctctatggagatgatggcatggattctggaattatggaagggggagatggaaagctcttaaaaatgggtcgatcattgatgaaagtcatgcccgcttgtcctcaaagaggacagaatagaatagcagcactttgaaatgttccatatcttaaatgacaggctctctgaattagttgtctcctctgattatacggttgaattgtacagtctatgcaactattaacgaattatcttgatgatcgtataaaattgctcgagggcacaaggagagcgcttctcctagatgaagatcatgttggagagaggcactccagctttgaagaatccattgctgctaatatttctggtatatctgtgaagcaactacaggttttcttggacacatgttttactaattccaacctgaaggagaaccttcaaactggtggtcagttcatgatgtgctttgattgctggcaacaccttcaacttcaagtgattgaatatatcaaccattatgcaccatcacttagcaagtatctacatctaggccttgctcgccgaatcaaagggatgacaggtcgatttcgtagaaacttacctataaaaagtgccgagtacactgcaaggacggtcgttttgcctgatccaatcttgaaaagatcagaggtggatattcccctcctggtggttcgagtttcgacaaatcttgaaagagtatcaaactatacaatattgatgctgcatcagtgtatacggagtagagaagcccaacatccgggcgtctctgctgactctgtgcagctgtcaatattgaatcatccaaaaataaagctaaaatctgagcatgttcgtgttatggataaatccaagttgagaatttatccagctggaatagatgacattgtcctcttcaatagacaaccgagcttgcatagaatgtcaattatgtctcacagggctaggattatgccctggagaacactaaggtttaacgagtctgtctgtaacccatataatgctgattttgatggcgatgagatgaatttgcatgttcctcagactgaggaagcccgcactgaagcgcttatgctcatgggggttcagaacaatttatgtaccccaaagaatggggaaatactggttgcatccacgcaagactttttgacttcctcttttctggttacaagaaaagataacttttatgacaggtcgtcattttctctcttatgttcatatcttggtgatgcaatggaaaacattgatttgccaacacctgctctgattaagcctattgagctttggactggtaaacaactcttcagtgtgttagtacgtcctaacgcatgtacaaaggtgtttctgaatcttactgttaaagagaaaatttataagactcctaagggttcaactctggaacctgaagcaatgtgtcccaatgatggttttgtctacttccgaaacagtgaacttctatctgggcaagttgggaaggccactttaggtaatgggaataaggatggcatgttctccactcttgtaagagattataattctcatgctgcggcaagctgtatgaaccgcttggcaaaatttagtgcaagatttatagggaaccatggtttctcaattggtgtggacgatgtccaaccgggagaacatttaaaccaagagaagaaaatgaaaatagatggagggtacaaagattgccatgatcttattgcttcctattccaaaggtgcactccgtttgcagcccggttgcaacgcagcccaaacattggagcaaagtataactcgtgtactgaatgaaatcagagaagaagctggaaaagtctgtatgaatacacttcactggaggaacagcccattgatcatgtctcagtgtggatctaaaggttctccaatcaacattagtcagatggttgcatgtgttggccaacaatcagttggagggcgtcgtgccccgaatggcttcatagatcgaactcttccccactttcctataaattcaaagactcctgcagccaaaggctttgtcgctaattctttctatactggcttgactgccaccgaattcttcttccatacgatgggtgggcgagaaggtcttgttgatacagcggctttggtccttgcagttgagtgttttatctcaggcactgtagttcgctgcatgaaaaccttcacagcactatgccagttctatgtagaggttaaaacagctgaaacaggatatatgtcccgcagattaatgaagggattggaagatctctcagttttctatgatcagacggtccgcaatgctagtggtggtattgtacagttcctctatggagatgatggcatggatcctgcaaagatggaagggaaagatggaaagcccttaaatttggatcaattgtttatgaaagtcatggccacttgtcctcaaaggggacagaatacattatctccaggtgaaatcttacaaattttaaatgacaagctctctgaacatgatgcctcctctgatgatggttgtagcgaaaagttcaagcaactgttaacgtattttcttgaggatcgtataaaattgctgaagagcacaaggagagcgcttctcctagatgaagatcatgttggagagaggcactccagctttgaagaatccattgctgctaatatttctggtatatctgtgaagcaactacaggaaattatcaatgctgctaaaaagataagcacacctattatcactgctgagttactttctgagaaggatgtgttgtctgcacgcattgtgaaaggctctatggaaaaggcagtgctgggtgaggtggctgaagccataaagattgtgttgaaatcaagtcaaccaaacttggttgttaaactcgatatgcaacgtatagaagccctgcacatgggcatctctgctgactctgtgcagctgtcaatattgaatcatccaaaaataaagctaaaatctgagcatgttcgtgttattgataaatccaagttgagaatttatccagctggaatagataagtccaaacttctatatgagttacatcatctcaaatccatgcttccaaaagtgatcgtgaagggtattccaactgttgaaagagctgtgatcagcgaaactggtgaagaaaatgacaaaagatacaagttgttggttgagggaacaaatctcttggcagtaatgggtactccaggagttgatgctatgaaaacaaaaagtaaccacatcatggaagtgaaccgaacactcggaattgaagctgcgaggagatctattattgatgaaattcagtatacaatgaaaagtcatgggatgaacattgattcgagacatatgatgcttctggcagatttgatgacatacaagggtgaaattcttggcattactagatatggtattgcaaaaatgaaaagtagtgtgctgatgctggcttcgtttgagaaaacagcggagcatctctttaatgcatcatacagtggtcgtgaggatcagatagagggagttagtgaatgcattatcatgggtatacccatgcaacttggcactggtattctcaaagtcagacaaaggcttgaccatttgcctgaatttaaatatcagcctgatccaatattggcgtgatacaagctagaagcctagaaccagcttaatttgtctgaagctggaattctgtacagatatatagaggggttggatgtataagcatgtataagcatcatatagcagggcagctacggcaactgtaatttgaggccagtatgctctgctgagctagcattggggcaaaactcccttttttc

SEQ ID NO: 40604 - DNA, 593 bp, Oryza sativa
  unsure (1)..(593): unsure at all n locations
  Clone ID: PAT_MRT4530_4402C.1
ctttttttttttttttttttttttttttttttttttttttttttttttttttttttttttttttttttttttttttttttttttttttccccccgaaaacccaagggctttttttaaaaaaaaaaagaaaaaaaaacccccaaaggttctcaccggggggggagtaacttaccccacaaaaaacagactggaccccccccaaccccctctttttttttggtaaaaacgaagcagcaactaaataaaatcgcccaaaaattccggggcccccagggggggggatcgacaacaaacccggggggctttaggggggggccttggggaaaaccccctgcccaacgggaagggggggcacccccgggagggcccccttttggggggggcaaagggccccccccccgttaaaaaactggagcccccccctaagtttttccgggggggggaaaagggagtcccccttgggaactttaacgaggggggagccaacaaaggggtccccggccccgggggggtcaacggggttgacggaaaacccgggaacggaccccttgaagccctgggggaagaaccggcatcccttttccccgnggggg

SEQ ID NO: 40605 - DNA, 470 bp, Oryza sativa
  Clone ID: PAT_MRT4530_44030C.1
cggacgcgtgggtggaactcagatgacattgaaaactttccattttgcaggagtagctagcatgaatgttactcttggtgttcctcgcatcaaggaaattatcaatgctgctaaaaagataagcacacctattatcactgctgagttactttctgagaaggatgtgttgtctgcacgcattgtgaaaggctctatggaaaaggcagtgctgggtgaggtggctgaagccataaagattgtgttgaaatcaagtcaaccaaacttggttgttaaactcgatatgcaacgtatagaagccctgcacatgggcatctctgctgactctgtgcagctgtcaatattgaatcatccaaaaataaagctaaaatctgagcatgttcgtgttattgataaatccaagttgagaatctatccagctggaatagataagtccaaacttctatatgagttacatcatctcaaatccatgc

SEQ ID NO: 40606 - DNA, 210 bp, Oryza sativa
  Clone ID: PAT_MRT4530_44031C.1
atgggccactccactgccaaggccaagcggatctggtcacttcaccaccaaggctgccaaccccgagcccttccaccttgtcatcgccaacagctggccatggtggaaactactgacacagtcctggcgcgcctaatgcatcttgctctgaacaagaaggaattcaccaaagagggcaaggagctggcaagcagcaataggcatgattga

SEQ ID NO: 40607 - DNA, 356 bp, Oryza sativa
  Clone ID: PAT_MRT4530_44032C.1
atgtcgacaactggtgacaacagcaacactagatacaaagagaaggagcctcccgtcaacatcaacggaggcaatactgcctcaaactccagcggagaactattctcgggggtataacgtttcactgttactattcgttctttgtttcctacaactgtcagtcacaatattattgcgttgtattgtctatattgatgcttattctatattaagtatgctcatgttgattacatttaccactatcactggatcaattcccattgcgaatatcatgcttattatcttactttccttctttcctcaaatttcctgggtttcaactctttatttcttttttgcctttctttcctcattga

SEQ ID NO: 40608 - DNA, 306 bp, Oryza sativa
  Clone ID: PAT_MRT4530_44033C.1
atggacacggccacacggcaccagtttgaacgtcgtaccatccctgtgcacaataatgtattactaacaagcaccacccgatacggaaatctggtggagcggacagccggacacattagcattagaatcggtggctaccggctgcctgatgacctgattcgttcggaccgatcttgctcaagtttggctaccttaccaaaactttgttccccttcccatagtttcgattctacattcgtcatggtctccaacaaagggaaaggaatgattggcggcattggcactcctagtacacgccagcttaat

SEQ ID NO: 40609 - DNA, 252 bp, Oryza sativa
  Clone ID: PAT_MRT4530_44034C.1
ttagtaactgcagttcaggctgtttgtgatcttggacatctaaatggactaacacaaattcattgttatgcaaaccggcacttgttggagaaagatatatgctctggtaaaaacgtgttacttgattacgtcaagagttgcctgacattgatctgtcttacatgtatgttgataatgcatcaatgcacctcattttgaatcttaaccatattgactcaatttgtcacaaacaattttttctgtgacatatta

SEQ ID NO: 40610 - DNA, 1068 bp, Oryza sativa
  Clone ID: PAT_MRT4530_44035C.1
cccctgttccctctccctcctccgtttccttcccctcgaagcagcgagcagcgagcagcagcaaagccgcggcatcggcggcgatcccccaaccgaatcacccccacctccggcgatcgccggcctccgccgcaggcatccatccatccatccatctccgcgtccggtccacccagcccccccctggccgatggggagcgacgcggagccggccaaggggctgctgccctacctgcagcgcgccgacgagctgcagaagcacgagccgctcgtcgcctactactgtcggctctacgcgatggagaaggggatgagaattccgcagaaggagcgcaccaagaccacaaactccctcctcatctctctcatgaaccagctggagaaggataagaagtcgttgactttggggtctgatgaccatcttcatgtagaggggtttgcattgaatgtctttgctaaagcagacaaacaggatcgtgctggacgagcggacataaacactgcaaaaaccttctatgctgccagcatcttctttgagatcctcaaccaatttggtgagcttcagactgatgttgagcagaaacagaaatatgccatctggaaggctgctgaaataagaaaagctctcaaagaaggacggaggcctgaagctggtcctcctggtggggacaaagatgaagcacctgacagcaccaccacaaattcccatctaacggatatggggcgcagccaatcctttggcagtgggcagcatgggaacgaagcatcatctcagcatgtagatcaggattttagcaggagggatagcttctctgcggtccaaccaggaaataatgcactccggcacagtacagagaagttcaatgaccatgtctctgcccagtcaccttattcaccaccacccccacaatcccagacgcccccacaatcccagttttcatctcctgcacagtcatcttattcctctccgtcatatcaaggaacagattacccttcttctgatgttcacaaaccaccccacggttattcatccgccccatatacaagcacagactactttaccaatga

SEQ ID NO: 40611 - DNA, 102 bp, Oryza sativa
  Clone ID: PAT_MRT4530_44036C.1
atggggttcatggggtacaggtgcgagtacgagccagggtacaagcagatgcacgtcggtgacgaggccaacttcctgccctgcgtcatcccaaactcttag

SEQ ID NO: 40612 - DNA, 256 bp, Oryza sativa
  unsure (1)..(256): unsure at all n locations
  Clone ID: PAT_MRT4530_44037C.1
caaatgtncatcgagcacagaagggttaaagggtgcatgtccggaaagactggtctggctaatcaaaagatggcatccatttaatggacaacaggcatattctagttgaaagaaataggggcgtatcaccagatgggttgtacaaccttggggggtaaggtccaaaaaccctatgggacagtaaaagatttccngggcatcttttccaggtttggagggagtcangaccagggatagttctatcttcaagtccagc

SEQ ID NO: 40613 - DNA, 5922 bp, Oryza sativa
  Clone ID: PAT_MRT4530_44038C.1
atgggctgtgtcagttcgaagcaattccatggcgaggagcagcgtggcggcgaggggaagccccggcggcgcccatgtccgaactctctgaggcgtcttgttagttacaattccagcaagaggcatgagcactttgaggaggaggatgaagaaggtgtggttgtgtcagccacctcctccagtgctggacatcgtgtagggaatgatgtgagcacggctaggctcatccggaagccccccgcgccggtggttgaggctgtggctgtgcctgtggctgcattgccagatgaggcggcttctgtggcggttagcgtggttgatgtggagaggccagttgccgcgcctgcgaattggaggcgtgctccgaatggcgcggcggagcaagagcctaggagtggtggtacaaggagtgaggcgaaaccgaggattacagatgttgtgcccaatggagtgcagggggggcatgcggcagctggctggccaaggtggctcacagaggtcgcagcagaggcagtccgtgggtggcaacctcggaaggcagagtctttcgagaagttggacaagatagggcaaggtacatacagtagtgtttacaaagcacgtgatcttgagagtggaaaaattgtggcacttaagaaagttcggtttgccaacatggaccctgagagcgtgcggttcatggcaagggaaattcacatcttaagaagacttgatcacccaaatgttattaagcttgaaggtttggtgacgtcgcgcatgtctagtagcttgtatcttgtatttgaatacatggagcatgatctagcgggacttgcagctacacctggcataaagttcacagagcctcaggtcaagtgttacatgcaacaactactctctggacttgaacactgtcataatcgtggtgttttgcatcgggatataaagggcgcaaatctcctcattgacaacaatggtgttctcaaaatagcagactttggtctagccacattctttaatcctaaccaaaagcaacatttgacaagtcgtgtggtaacattatggtaccgacctcctgaactattgctgggtgctactaactatggtgctgctgttgatctctggagtgctggttgcattcttgcggaattgctgtctgggaagcctatcatgccagggcgaacagaggtggaacaattgcacaaaatatttaagctttgtggttcaccatcagaggatttctgggctaatttgaagttgtcacgtgctacaatattcaagccacaacatccttatcgtcgatgtgtgagtgatgtatataaggatttccctcctccggctttagcactattggattgtttacttgctgtagaacctcagaataggggtactgctgcttcggcccttggaagcgaattcttcacgacaaagccttatgcttgtgatccatcaagtctacctaaatatcctccaagcaaggaatatgatgctaagcttcgagacgaggaggctagaaggcaaagagcagctgcagttaaaggacatgaatctgaagctgggcgtagaaagcaacttccagcaccaaatggcaacaacgaattgcagcaacgacgggttcagcttaatccaaaaagcagcagtaataagtttattccaaaggaggatgctgtcactggcttcccaattgatcctccaggaagagctggagacaatgtttaccctcagcgtgcgcctctgatgcatgctggtcgttcatcctctactctgggccgatcaagtggcactgatcagaatgctcagaggttttacacatctcaaattgctgctgctgagatgtctactgcaactggtgggcagcgaggcaatgccactaagctgtcctccaaccttggggagagtgccaggagacaatatttgagagagcatcgatctagttcaagatatagtcaacttgctgctgctgaaccctctgacagacctgaatggacacaccaattccaagaaagaccatcatcttcccaccgcaaagatgatggggcagcaaataaggaacctactgtggtgaatggcgctaagaagagcaggatccactactcaggaccattaatgcctcctggagtaaacatggaagaaatccttcgagagcacgagcggcagatccaacaagctgtacggagggcgcgcctcgacatgggaaagggcaagaatcacgtcgagagagaccagtcggaatcgcttctgtacactacccagaatggcagacccaaagacggagagagtacttctgttaaaaagggcacccttagtcctcatggatcccgggaatcgccgccgccctcgccgccgcacccggcctcctccctctcggccatcctctactcctgcaccgcgcggcgcgcccgtcgccccggcgagctggcccacgcgcgcgccgccacgctcggcctggccgcccacccgtccgtcctccccaggctcgcctccttctacctagccctcgccgacctcccggccgcgcgggccgccgtcgagcaggcggcggggaaggcgcgggcgttcccctggaacctgcttatatggggctacgccggccgtgggctgtgggaggacgtgatcttgtcgtacgagaagatggtggggtggggcgtcgccgccgacaggttcacgtacccgtcggttctgcgtgcctgcggcgagctccgggaggtcaccattggccggaacattgagcagcgcattcggaggtgtagatatggtctggacatgtatgtctggaatgctttggtggggatgtatgccaagtgtggggagctggaggatgcccggagggtgtttgatggaatggctgtgagagatgttgtcagctggaatacgatggtgtccgcgtatgcgtcgacggggaagtcgaataaggcatttgagcttttacagcaggttcctggtgcaaacgttgtcacgtggaatgcggttgcagcagggaatttgaaggcggggaactacgatgaagtgattaggttggtgtctcaggtgagaggatatcatgggacaggggtggattctgtgaccatcgtgattgggctcaaggcgtgtggtaggaccgggtatttgagtgttggtagggagttgcacggggtggctgttcgtctatgctttgatagccttgagtgcgtggtgaattcgttgataactatgtactcaagatgtgggatgatgagctctgcctgccttctgtttagagcatgctcagttcggagcatcacaacctggaactcactgcttgcaggatttgcattcatggaacagatcgaggaagcttctttgattttcagagagatgatcggttttggtgtctgtccaaatggtgttactgtcttaactatgctttcccttggtgcacgggttggacacctctgtcatggaagggagctgcactgctacatccttaagcatgagctggatagctctaaactaatggaaaattcacttgtcgacatgtactccaaatgtagacaaatggtagttgcacagagagtgtttgaactgatgcaatttcgagacaagcatgcctacacatcactggttttgggttatggattgcaaagagagggacatgtatcactgaagctctttgatgagatgattgtgaacagtatagagccggaccatgtaactttcgttgcagttctatcagcatgtagccactctgggctagtaactcaggggcagctactatttgccaagatggtttctatatttggtattgcaccaagagtggagcatttttcttgcatggttgatttgtactgccgtgaaggtttgctcaagatggctgaggtgataattgacaagatgccatttcaaccaactgctgcaatgttagcaactcttattgaggcttgccgaatccatggtaatacggaaatcggggatcgggctgcaaagaagttgctggctatgaggacaaacaaccctggtcattacagattgattgcaaacatgtatatagcagcaaaatgctggccagaactagctaaagtgagatcactaatgagcaccctggagctaaatatgattcctagtcattctttgctggagtcagaatatgacgtgtgtccagtcgagcaagataatttcctgaatcatgtcacatatgataaattcagaagtagcacggctttgccttcacaaaacaccggagtttcagataccaattttgctactgctctggcttccctcctctacttagccacccacactgctctggagttggcaaccaaaatggacgtcaacaccggcggcggcggcggcgtcctcgtcgtgtcacgccgcatgatccggccggagttcaaggagctgccgccggagcatgatacgacggttcaccttacgccgtgggatctccggctgctcaccgtggagaacatccagaagggcatcctccttcccaagccacccaccggcggcgagactctcgtcgaacacctggcgtcgtcgttcgctcgcgcactcggccgcttctaccccttcgccggccgcctcgtcgtggaagaggtggatggcggagcgtcgcctgcgagcagcgtatctgtctcgctgcgctgcaacgacgaaggcgctgagttcgtccacgccgcggcgcccgacgtcgccgtcgccgacatcgccgcctcgctgcacattccacgcgtggtctggtccttcttcccgctcaatggagtggttgctgcacacgccgcgacggaatccctgccggttctgtccacgcaggtcaccgagctctctgacggcgtgttcatcgccatgtctgtcaaccacgtcgtcggcgacggcaccaatttctgggagttcatgaacacatggtcggagatcagtcgaagtagcggcggcgaactgggcatctcgccatcggcgtcgacgtcgacttcgccgcctctggtggtcaagaggtggttcttggacaactgcacggtgccgatccctctgccgttcgccaagctcgagcagatcatcccgcgaagcgagcaccaagcgccggtgcaggaatgcttcttcgctttctccgcggcgagcataaggaagctgaaggcgaaggcgaacgacgagatcgccggcgccgccgtcgccatctcctccctccaggtgctgctcgcgctcgtgtggcgcgcggtttcgcgagcccgcggcctcgcgccgcgccaggagacggcgtacgtggtggtcgtcgggtgccggggacgcgtgggcggcatctcgtcggggtacatggggaacgccgtggtgcccggcgcggtgaggctgacggccggcgagatcatggagagggggctcgggtggacggcgtggcagctgaacaagtacgtggcgtcgttcgacgaggcggccatgaggggcgcgctggcgtcgtggccgcggcggccggacttcttctccgtcctgagcctgctcggcggcgccgccatcatcacggggagctcgccgcggttcgacgtgttcggcaacgacttcgggtgggggaggccggcgaccgtgcggagcggcggcgcgaacaagttcgacgggaaggtgacggtgtacgaggggccggacggcgccgggagcatgtcgctggaggtttgcctgactccggcggcgctggcgaagctcgtcgccgacgaggagttcatgggcgcggtgaccacgccatgagttgcatccagtgcatgcttctattcacttgcgatttgcgagctcaattggttaaaaaaaaacacttcacatcgacatcatgtaatccatttatgtcacatttgtcagtagaaaggtgatgaattcatcaacagctatagctgatagatcaggagatatcagctggattaccttttgtatcaaacaaggataaatcaatatgtttgtgaagtgtagtatggaatgggttttcgccgccgaaaaaaaaaaaaaaaaaaa

SEQ ID NO: 40614 - DNA, 442 bp, Oryza sativa
  Clone ID: PAT_MRT4530_44039C.1
ttgttttggggatgtttgagttgcacgcacgctagtggaaaaatcacactcaaaacggctggaaggttagcagccatggcaatggaggcggaggctctcctgccggagccggagccggagtcaccgccaatgctcgccgtaaaccacctcggcggtccgggctgccgcggtagctccggccggaggaccggcgcgttttttctcatcggagcggaggtaggcgaatggatggcatactctgccatcatggggaacctggggagctacctgactgggccgttccggcagccaacggtggtgactgcggctgtggagaaccagtagatggccacctggatgtttctgccgatgctcggctcggtcgtcaccgactgatggctcggacgataccgtaccatcctttgggcctccctgctttaaatcttggcacgcggcccatgac

SEQ ID NO: 40615 - DNA, 177 bp, Oryza sativa
  unsure (1)..(177): unsure at all n locations
  Clone ID: PAT_MRT4530_4403C.1
gatgantttattaagtctaattaatatatcattagcccacacatcattttcactcatcaggcccaccccacgcatggttcacaatccagtggcacaccacatttggggtcttcaacacagcatatcgctcgtcggtcacatttcaccacccacgngagactcagtgtcacactatca

SEQ ID NO: 40616 - DNA, 279 bp, Oryza sativa
  Clone ID: PAT_MRT4530_44040C.1
atgggcaagatcgatgacccactcaagctcggtgaggagttcctggaagtaggctcacatggtagcagcaaagatttgtccgtcacaggagaccttggggggtgcagtaggctgcgtcaccgttgctccgcctcgaggctgctatgtcagctgcggaagcggctccgtcgaccgctgttcgagcctgtcaccgtgtggcattgtggtgaaatgagaggggagcaaggaagagaaaagatgggagaagaaaaatgtggtgttggcatatggttctcataa

SEQ ID NO: 40617 - DNA, 261 bp, Oryza sativa
  unsure (1)..(261): unsure at all n locations
  Clone ID: PAT_MRT4530_44041C.1
gatttcgacaggcgcgcgtgcgatagtttgtcgcatctgtttccgctcctgctcatagcgctgatactagctgcttgtaaccgcggagtgatcgatcggcgagcgatatggcggcgtcgcagcggagcgtggccgtgtcggcgaaatgcgccgccgcgtcgtgggcggaggagcggcgcccggggggggcccccnctggcccccccgccctcggggngtctcccggtggcgcgtgcccctccgggcgcgcgccgcgctcgt

SEQ ID NO: 40618 - DNA, 309 bp, Oryza sativa
  Clone ID: PAT_MRT4530_44042C.1
atgaagacgactttggctgtggtggaagggaccagggcacatattgttaacctggcgaattcaagggcgtctcgattgaacgaacggctgatcgatccagcaatcgagtctcgatcgattgccggagcaacacctgcgccgtttgagatggagacggcaatggtgctgctgctgcttgcactggtcgccttccttctctgctaccctcttgttctaccaccgctgccgccttcgcccccggccctgttcatctggataccggtgttcatgctgctcctgctcttcgcccttgccctcttccctgttcag

SEQ ID NO: 40619 - DNA, 276 bp, Oryza sativa
  Clone ID: PAT_MRT4530_44043C.1
atggagcaggtcgcgccgccgccggtgcgatactgcggcgtcacggaagactacgagcagcagttggacgaggagccaccctcaccgctgtccccgagccgggtctcttccccgctgccgctgccggagcagaaactgtccaccgcatatcttgtggagctccggccgcggcgcaagaacgccctcataaacaacggcccacgctacaggtgtggagatcatgggtatcccatatctacacggcgatggtattcgagctgggcacaggatacctaa

SEQ ID NO: 40620 - DNA, 399 bp, Oryza sativa
  Clone ID: PAT_MRT4530_44044C.1
atggaggaaatgcagaagctcaccagtgagcgagggaaatggggcttcggtgggattccgcagttgcaagatcaaactgactggcatgcccgcatctcatcaacctttggacctgcactaaagttaagcagatctcttaggccgttgtattcgtttacttatatagttcgcgccaacacaattctggcaccatcagccaagcgcgaatttttcatcaacagcggggtacggggtggaccggagattgcggcagcagtggttgcggcatccgacgccaacggctggaggaaggggacgggcccgatagatgggccccacctgtcagtaaccaggaaaggagagagggggtgcgggccggcccaacagggagggcgagcgtgggcacagaaggcggactag

SEQ ID NO: 40621 - DNA, 1809 bp, Oryza sativa
  Clone ID: PAT_MRT4530_44045C.1
atggcgacacggccgtcgccgcggtcgcgagacagcgcgcggccgaaaagcacaagcgggaggcctccgtcgagcccgcgaagctccgacaccacccgccgctcctccttcaccgccgcctcgtcgtccgacaagccggtgccgtccttcctccgccccaccgtgagctcgtccctgcacagctcgtcttcgtcatcgccgtcgtcgtcgtcgttgttgtcgtcgtctccctcctccaagggcaccggcaccacgccgaggaggtccgcggacaaggccccgtctgcgtctgcagcttcgtcgcggccgatcacgcccaaggacaaggcccccgctgtagcgacgtcgcggccgatcacgcccaaagacaaggccaaggcggcggcggcgtcgacgtcgcgatggtccgcggtgtcgccgaggcagctgatgcagaaggcgtccaatgcctttacaagaggcagcagcagcaagtcgcgcgctgccaagaaagacaaggaggcggccaccccggcggcgacctcggccgccgccaaggacgcggccactccggcgtcgacctcggccgtccgcaagaaggccgccacaccggcgacctcggcggctggaaaggcggtggccggtgcttcgcccgggccgacgagagcccagcccacggaggagcaccaccagcaacccactgaagcgccgccggccgaaccgtcacctgccgccgccgcggtgcaagaagaggcggtgacttcgagagcccagctcacggaggagcaccaccagcaaccacctgaagcgcccgccgagccgtcacctgccgccgtcgccgtgcaagaagaagcagcggctgcggagaccgaagcagagcaagaaaaacaaccggatgagacgccgcaagaagtcgtcgcggcagtggaggagaaagttcaagacgagcaggttagcacggaagcagcggaggaagccatcgccgtcgaggaggatgccgccgccgtgaagaccgatgcgccggagccggaagagacgcagacgcaaaccggtgccattgcagagtcggaaacagagtttcagaggagttcagaggatgagccggcatccgacgccattgtcgaagaagcggcgatcgaatctgcaacgcagaatgagccagatgaaccagaatccaccacggttgaagagatggccgtcgaggaggagatcaagaccgatgagagccaacaagaagagacgccaaaaccagaagagagaatggagaactctgaaacaagcgtgatctctgaagatccaaaagaaatggatgcaatctctgaagaccaaaaggtggaagaacccgtggttgctgaagaacaagaggaactctccgaggttgtaaaaatggctgtcgagccgagcatctcgtcagagccagcaacgccgctggaggaagaagatcgcgacgacgtggagacggagcaagcgaactcgtcggagcccgcaacgacggtggaggaagaagaagatcgcgacgacgtggagacggagcaagcgagctcgtcagaccccgcaacgccgttgaacgaagaagctatcaacgaggagggcacgtcgacggagacggggaagacgaagaaggtggcgttcaaggggagcaaggtgaagacggcgatggagaggcggccggagggggagcagccgaggaagaaggacgtggcgcggagcaacgacgtgatcgaggagaccaagaggacgctgatgatgaagaggaagagcaaggtgaaggcgctggttggggcgttcgagacggtcatggacacccccagcccgggaaaatcgagctga

SEQ ID NO: 40622 - DNA, 1299 bp, Oryza sativa
  Clone ID: PAT_MRT4530_44046C.1
atgcagccgccggagtcagcccatcgccacggcgcgtcctcgtcctcatccggcgctcagcggcggcggagcgtcgggtgcatggccggtctcctccgcctgctctcgccgtaccaccgtagccaccaccggaagcgcctcaccgccaagaacgccgcgccgccggtggtctgcactccgccgtctccaccgccaccattcaggcagaaggtgccggtggcgacgtattcaccttcgtcgcagggacagccgccgcagcagcagatgcatccagcgccgactccggtccgtcggcggcgctcctgcgacgcgccgcggagcccgacgatcgcgccggagcaccgccgggccagctgcgacagcccccgcccgacgccgccggccatcgtcgcccgcctcatgggcctggaggagtccgcgccgccgtctcccgccgcgacgacgccgcggccactaccgactcgaccccctccccctcccccggagacggcggcggagaagcggcggaagctgctgggcgcgctggagaagtgcgacgaggacctcaagacgctgcggcggatcatcgccgccgtccgcgccgccgagatgcgcgcggccgccgcgtccgacgccccgccgactccagaagccacagggaagggatcagacaaccggtggaaggacgacggcagccgcgacgtcgatccgtcgccgtcgccgacaccgcagaagccgcggtccgaggagcactacccgagtcctgactccgtgctggacgccatcacctccccgagattcccatgcaggaaacggtcgtctccctgcacggatctcgatgcagatcgcaagctcagctgcggtacccccgccgtcggatcgaagatcgtgaagccctctcgcacgctcgttttctcgggcgactattgcaagatcaaaccatgcaacgagctgcacgccgtcgccatgtaccaccacccggtggtggccatcgaggccataccgaggtggataccgccgccgccgccgccgtcgtcggagatcagctggcggcaccggcgacggtggggcctcgaggcggcggcggcatccgggcggagccgcgcgatggcggagagcgtgggggaggtgtgggggcatggcgccgacgaggagcggcacgaggccggccgtgtcggcgcggcgctggagcgcgcaatcctgcacgacctggtcggggacgtcgtcgcggagatgctcgcgcagtcggcggcgccaacgccgcacccgttcgtccacggcgccggcgccgccatgtgcaggaaaaggctggtcttctga

SEQ ID NO: 40623 - DNA, 222 bp, Oryza sativa
  Clone ID: PAT_MRT4530_44047C.1
atgaggaaggcagataggaggttggcggcgacgcccgcggagacgacgaggaggcgatcggggacggggtggttgcgaaggaggtccaggttgtcgggcgcgaagccggagttcgggtcgtcatcggggaggtggcggcaaggaaatggcccgactcgtgacgaggacaatggtggcgaggacggaggcggtggaggcgacgaactcgacgctagcgaggag

SEQ ID NO: 40624 - DNA, 3540 bp, Oryza sativa
  Clone ID: PAT_MRT4530_44048C.1
ctacagcaccgcgacaacatgtcgagtcagagggcctgtttggtacagctccaactcattttgtgagagagctccacccaactccactcccagttttggtggagctgaaactgtttggctgagctccagctccaggaggggtggagctggagctagagtctctccaaatagatgttctacctctgatgctgctatttgctcttgctcactcaaccgtagcttgtcacttcgtcttgctgaaagaaaattgtcaacgagaatagccatcttttggagctccctcaccagcgtgaactcctcgtggtcctggtacttgagggacgcctgcatgtcgagcctgcgctgaaccagcgccgcggcctgctgccggtcagcgtctcgaagcgccccgttggtctcaacaatggactgctcaagtcctgcttggtgagctcggcactctgcaagctgggtatccatatcgtctcgcttccgcaagactcccttgacagcctgccattaaatgaaaagagaacaaatagaaaacaatatgttatgaccagtaatcttggaagatcgcagcaaagtataaggttccctgtatcatattcggtggcctacatcgtttggaaaatcagggagataataggaagtctgatctgtattggaattcctgggcagatttcgtgggaaccggactcaggttttcatcggtgtaaaacggagggcttggtgtggccaaaggtacgattcaggaagtctcccaagtttggatcatcaatctgcaatctaggtttcgagctctacgtttcgccaaggtacctcatggcggctgccgatggtgggggtgataaagggatcattgttgagatggtttcccacccgaagccaatcggaagcggtgagggtgccttggagatcttagggcgggagttaagggtggagggtatggcggaggaaggaggatctatccaaagaccgaacaagacatcgacatacaagaagagatcgaaggagagcccgaatatcaatccatcgcagggaccgacaacctttacagagggagtggttgatgatgaagaggaggatgctctatgtgtgaatctggaggaggtggtgaagatagcaggtcgttacgatcttagcgagattctactcgttaaggattccaaaccaagggatgctctactggtagcacactttgacggttttacaagtccgtcagaagttcctcttgatgtggtgccgatttgggtgagaatttatgatttacccttggcattgatgacgaaggctcaaggtgaattgttcgggaacaagctgggtaaagttcacgaggtggatgtcgaggaggatggccagaacttacatgatctctttcgaattcgagtggatttatctgtcaagcatcctctgaaatcacagattgccattgaagtctctgtccaaggcagtgcgagctcttcttttgtgaggaagaaaaaatgtgattggtggaacgaggaggtgctaccaagggtagatgcatatgatggttttgaattcagggaaaaggagggagaccacaagattgatgatcaattggcggatcaagcagggaagctatccgtgacagaggaggaagttcagaagaatgcagtggttgcagcaaggaggcaacaagatcaatatgtggcagatacttgtgatggtaccgggaaacctccggcttatgagatgattcctgctatcaaggatctatacaagcaaccatcctttggggatggtgaccttgtttatggggaacctagagtggaaaatagacaccacatgcggtcattgttaagttctctgaaacaagtgtccaatctcccatggatggtggtgggtgattttaatgaagctctttggcaatttgagcacttttctctgaaaccaaggaatgaatctcagatgcaatccttccaagatgtgctacaaactcgtgatctgcatgatttgggtttttcaagggtgccatacacctgtgataacagaagagaggggagaaacaatgtaagggagagagaactggctatatcggaaattattaaggactcatgggaaagtgctggagataagagtaccctgggaggcattaagtctgctttgagcaaagtaatgacttctctttgtacctggagcaaaaggaaattcaagaatgtgtcatggaaaatagaaaagatcaggaagaaactcgccttgttgcaggaaagaaatgcagataatatagagatccgtcagacaatggaccaaatgaacacttctgtatcgagaagagatgatgtggttacaacggtctcgcatctcatggctgaaggaagtgatagtcaaggaagtgcttgcagattatacttcaagcacaagacagctgagaccaaagagcatgagacaagtgcagatcatgttttgaatatgaccattcggtatgagttacatagtaggttggaaaatgatcaagctattgacaaaaccgctcagcgacaacttgagaaagaaaaggaccatttgagaaaagttctattcagaattgtttgcattgttaaatttcttgccaagcatagtctagcatttcttggtactaacagcaaactatatgaagatagcaatgggaatttcttaggacatagaaagggtcaattagcgaatgaggggtacaatgataccaatgggaatttcttaggtttgatagagatgttggctgaatttgacccagttatccaagagcatgttcgtcgtattacaagtgaagaaactctacttcattatcttgatccaaagattcagaatgagttgatacacttgcttgcttctgctattaagtctgaaattacttgtggtagagctaaagacttctttggaatcatccaacgcatttatacaacttttgctaattccactaagaaatggcagattctgaaagataacataacaggattgactctcaagtcagtgtcagctacacgatgggagagctgtgttgaaagtgttaaagttatcagatttcaatgcgctgacattcgagaggctctacttcaggtatctgatgttgataatgatgtaaaaactagcagtgaggctaaaggtttggcaaataatgaacttagagaatatgaatttatagtggcaattgtcatttggtatgaggtactgtatgctattaatttagtaagcaaacatttgcaagcaaaggatatgcttattgatgttgctattgagaaagtgcaagggcttatttctttcttcaaagggtatagagaaactggtttcttacaagcattggaggcagccaaaggaattgcacttgagttggatatcagcacaacatttcgtaaaaagcgagaaattaaaagaaagagacaatttgatgagaacccagatgacacaaatgttgccacacagtccgcggaggaatcatttagaatcaactattttatacctattgttgatcaagctatttcttcgcttacaaggagatttgaacgatatcagcattaccaaaagaattttggtttcttatttactgctgactcattgcgatga

SEQ ID NO: 40625 - DNA, 216 bp, Oryza sativa
  Clone ID: PAT_MRT4530_44049C.1
atacttcacataagtacactaatattttacgcttatttattataagtagtaactcccactattttttattccaaccaaagacgaacccaatacatttcatttaaagattatatttaatcaaaacaaacaacaaacttaatcttccttatcaacaaaaaacaaaaagggccatcaccaacataaccaaaaatcatcatgacgtacaaccaaaattaa

SEQ ID NO: 40626 - DNA, 572 bp, Oryza sativa
  Clone ID: PAT_MRT4530_4404C.1
cgtgccgcaccgtgagagagagagagagagagtgtgtgtgtgtgggggggggggtgagggggggtaatgcgcgactagtcgcacggctcccccggcgcgcgactactctgtacgtatgttaacaatcaaatttggtaatatctgcatcggaaagaagattggattgaagcggaatcaaacatgagaattatcgcggaaacagagtaagaatcggctgaggtttggatcggctaagtccgagtcagactgggttaagtgatacaaccgattccgacaatacaacttatatgggtaaaagtctgccgcaaagacttatggtatcttagagtttgttagagataatagtcgtgtccggtatgggcatatcttgatcaaatcaactggcacgctagcatacccgaagacgagttttggacctacactggaattaagcagatctcccaggcctcgtgtttttcgtcatcaacgtactagtactaaaaagaaaaaaacggaaagaaaaccgcaaaaaactgaaaagaaaaaaaaagcaaaaacagaaaaaaaaaccaacagaaaaaactgtaggcccc

SEQ ID NO: 40627 - DNA, 138 bp, Oryza sativa
  Clone ID: PAT_MRT4530_44050C.1
taacataataattatgcagcatttagtgataaaagcatgatcacagtaccatgattcaaaacttgactggaatataaaacattcagactcagcacaatccaaggatgacaaccggatcttaactattgaaaatcaaag

SEQ ID NO: 40628 - DNA, 181 bp, Oryza sativa
  Clone ID: PAT_MRT4530_44051C.1
gcccgtgcccatctgtgagatcctccagtgcaacaggcagcacaccaccaaaactggccagaagagtgggcaccatctctccaactgtgaggtggaaagtgtgggtctcaggcctccatctatccacaagagcactcagaagcgccgcgtcaatgtggatccgttcggaccttgcacgtga

SEQ ID NO: 40629 - DNA, 247 bp, Oryza sativa
  Clone ID: PAT_MRT4530_44052C.1
aaattggaaagaaattttatttctatttatttcaccttaagtttcacatgtcacatacgatgatccctgggcttattttttcacttccgaactacaattttgggtaaatttcattccatgacaccgccaggggtggtaatgctaccgggtgctctctcgtcccttgggtcgttcccatttgtagatggcaagttaaaagccaacagtgcttgagcttgtgcccgcttccggtcaatgtccagatccc

SEQ ID NO: 40630 - DNA, 366 bp, Oryza sativa
  Clone ID: PAT_MRT4530_44053C.1
atgtcgactcctcctgagcaatctgcgagtcagagcaatgtgcagatggcagccatccttgatgagcttaaaaagatcaacatcacgctccaagaacactcgacggcaatcaaaagccttgagtcctccaaggggatcatgagaccactaccgtcgcctacaccgcacgcggaaacacacggatcaaaccaactggcacgccctgaacccaaaaggcataagtgcaagcgcctgttttggcttggcgcgcctttcgcggatgacgaccacaatgcgacgccggaggcggacgacgaccccggcatctccctctatgccctatcaggcgtgagacgatgcaactctgcatctcgttccacggcatga

SEQ ID NO: 40631 - DNA, 150 bp, Oryza sativa
  Clone ID: PAT_MRT4530_44054C.1
cacctctctctgtcggggtcgcgcgcgcgatgcgggacgtcacatcgcaacaggcgtcaccggtggcgcggctgcgcggcgacggaatcattcacccgggcagaagctggccgtgtacgtgccggcgggcaccaagggcgcgcgcgtgtg

SEQ ID NO: 40632 - DNA, 180 bp, Oryza sativa
  Clone ID: PAT_MRT4530_44055C.1
atggccgccgcgccgctctcttcttgtgccgccaccgtcgcaactccggccgcccctcaccgtctttttgtatttattcgcgttggtcgtgtagatcctgccgttccggaagatcagctgttcatcgccgttgacgtcgaagactttgtgagcgataaaggcaagtcatatctaccttga

SEQ ID NO: 40633 - DNA, 699 bp, Oryza sativa
  Clone ID: PAT_MRT4530_44056C.1
atgaggaaggttgcagtggccatgttcttcgtgccgatggtcatgtcggcctcatggtcgccggccatggcgaggccgtacgccgatcaagcctccggcgccggtggctcgggcaacatagcgctgccgccgccgccgtcgccgcactggacaggaggccacaggctaccaccgttggagcaaaagttctctctttgtaatcatgtcccccaagtccccaacctatataagttttacatgaaaaatgcaattgtatttatagaaatagaatataagaagagtaagaaattaatcaccgcgtcgccactcgcacgcacgcgctcggcgctcctgcggtctcctgatctcctcgcgctcgcggcgacttcgggctctcctgcgctcctgactttcggccatttatcgtgctgggccagccttgggccttcgggcatttttcgtgctgggctgacccaggcacggcccaatggccgtgccgtgccgtgccgcccagcgtgcctcaacttacggcccaggcacggcccaactacgggccgtgccggcccggcccatagccgtgccgtgctcggcgtgctttccctcgtgctgggccatcgtgccttgggccggcccaagaaagcacggcccaagtcccagctctatactcatgtcgcctcaaataatcgatcgattgcgccaccatggatcaacatcacctaa

SEQ ID NO: 40634 - DNA, 1437 bp, Oryza sativa
  Clone ID: PAT_MRT4530_44057C.1
atgacccgcgcggcgcggatggcggctgtggcggcggcggtggcggctggcgacggtggcgcctgtggcggtgatggttggcaggccatcacgaccgaaggggctgacgcatctaggttccgatggtgcatccggtttgaagtcgaagctgctgtgtcgcttggcggcaagcttggcaacgatgacacggttgaaaagtcagaaccccctatgctgttttggtcaaccttggtaacgacatcctacgttgggctccgtcagtggtttcagctgttaggcgccggtggactctattctctgcgccgcatacccgcgaatcgtctcttctacccatcaacaagagcagctgaagaagcaacggcaaagtcacaagaatcattcatggaggagcacggtggcaggaagcatccaggcctccacaccatggagatgttggagaagcttccccgttcgacgttcgccttcgagccggcccccgtggatcgctaccatcttaggtctctcgacttcgcctgtctcctcggccacgagagcaggatgctcactgcagacaacaggggaaacaccgtcgtcttcgacgccgactcctcctccgtcctcgccttccccaacctcatttctcccaagaggtataacgccatatccctctccattatcaacaacgatggcagcaacaacaacaacgggttggaaccaccgccggaggacggcctctacgtgatgacccggagtcccgacgtccacagaatcaaggatggttgctttgaggtgctcaactactcttcttcctctgccgatttccgtgagatgacccctcattgggtttctctgccaccaccgcccttcgccggctgcatgaacgccgaaattacctcctacacggtggttcacggcaccaccatctacatttcttgcaataagccaatccattctacttatgccttcgacacggttagccatgagtggcgccggctgggctcctggacaatgccattccatggcagagctgagtatgtgccggagctcaacctctggtttggactgtctgctcgccacccctacagcttatctgcttttgatctcctctccgacgactcatccgtcgcagcaaaaccacccacggtgcaccatacttgggtggaccttgacatacctcagtcctggttgccctggaacattcatctcatcaacctcgggtgtggcaggttttgcatcgccaagatgttccattctatttcgggtgatggcacattttgttcctactctgagagtgacgatggcacaattgaagactctgacccaattcatgggagtttcgctatcttcactggccttcacatggttcgccctcgtggtaaacatgatgatgtccagatgatcaagcacaagttcatgtactaccaatttttcgatgattacatcgaatgggttatctga

SEQ ID NO: 40635 - DNA, 1470 bp, Oryza sativa
  Clone ID: PAT_MRT4530_44058C.1
atggcacaccggtgccttgcatgccgcgtgccgctgtgccgtcagctcgcattgtctgtgctcgctagggttggggatgccgccatgccggatgccatgtacgggattggggatgacctgactggatgggagattttggatttattagatgatgatgagatggtatgtggggaggtccctgcgtacaaagagagggtggattcccttgcagcgcgcccagggtatggatcagccggaaaaaagttgtccatctttacaaactatttcggggtatctgtgaattgccctgcaatctatctgtacaaagtttccatccaccctgagccaaaattaggagttactaaaaaagctgtgctttcagagattgttaaattgcatggagaaagagttttcagaaacaagatacctgtttttgatactagaaaaagcttgtatactgcacatgcactccctattgtgtcagaaacatttgtgatcaaacttgatgatgatgaagacaaaacaaggacaaaaggagttcatgaggtcacaattcagttttataaaaggatagacttacaagatctacaaagctaccatactagaaggaatgcctcccaaggtgctatacaggcgattgacgctgttgttagagtgctgctttctagttgtctcagtgctcctgggacgatcttttcgactaagtttggtcccataatagacacccaggagggattggagttttggagagggtgctacaagggtgtgcgcttgtcacagtttggtcctggtctaaatataggatgtctgaaaaatatggtctttattggcacacactatataccagcagcaccattttataaacctcttccagtggtggaatttgtggctgagcttttgaatagaactgatgtcaaccaactattttctacagaggaatatgacaaggtagagaaagcactgcagggtgtttttgttgaaaccacccatcgaacagacaaaaccataagatacaagattaaagggctttctgtcgttcccttggaagacctcatgtttgctgagggcgctaaagaaaattttactacaactgtggttgattattttcagaagcgttacaaatacaaattgaagtacatttattggccatgtttgcagtgtggaagctctcgtgatattttcttacccatggaggtttgcaagattttaccagggcaaaggtactgtcggaagcttactacgagacaggcagctaagctattgaaggcaacttgtgaacggccccatattaggaagatcgcaattatgaaggttcgcaacaactgtaacgttgagaggtgtgtggaggagtttggaattagagttaatggtcttcctgccattgtgtgtggccgcatcttgcctacacctgagctgaagtaccatgtctccgggaatgagaaaacgtgtgtgcctactggcggacgatggaacatgatcaataagtcataa

SEQ ID NO: 40636 - DNA, 111 bp, Oryza sativa
  unsure (1)..(111): unsure at all n locations
  Clone ID: PAT_MRT4530_44059C.1
gccgcgcgcgttcagtaagggatcaatctgtttcgatctcacctcgttcgctgccgtttgttgattnataatcggggcgggccaactaacacggggcgggtggtctatatc

SEQ ID NO: 40637 - DNA, 510 bp, Oryza sativa
  Clone ID: PAT_MRT4530_4405C.1
atggcgacgcgacggcggcgctcggggcgggacgacggcgacacgcgggcggcgacgctatggcggcgcggggctcggaacggcgatgcgacgggctgcggtgcggggctcgagacgggcgacgcgacgggagacgggcgacgcgacgggtggcgtgggagcggcgtgacaggcggggcgacgacgggacggcgcggcgcggcgcggggcttggcgcgcggcgacgacgacacgacggcgacgggcgacgtgatggcgacggggcggcgcggggctcgagggcgacggcgacacgacggcgacgcggtgcggcagcggcaatgggacggcggcgcacggcggcaagcgacgatggcgacggcgcgcggcggctcggggcgcgaggcggcgatgggacgcgcgagcggcgacaggacgtcgaccgcgacggcgacagcggcgacggcagaggggaggcggagcggcgcgcggcgcgcggtgcgcgaggcagcgtggcagaggaggggctag

SEQ ID NO: 40638 - DNA, 2232 bp, Oryza sativa
  Clone ID: PAT_MRT4530_44060C.1
ttttttttttttttttttatcttgaagaaccatctgattaagtcaccaagtcaggctaacaatacaactaggtccaatacgagactccagaacaatgtttagcatccaaataatctgcccacagagattctgctctgctgtgtttgcactagcttaccgatttgagtcgatacagtaaggtaaaagagtcgcacaagcacttgaagggtacaagcctgggttccgcaccagaggatataaccaatatttgaaaggaacattctaaatggacaagaaattagaaacctactagagttattacaggactgggttacacagatagtcacacgattcagctccttggagcacagctggccaagtgagtcttgaagttctccagctctgcaagaacttcatcttctggacggtatatcaggtcactcatgcgccatatctgcaatgttccacctccaccagtactctcaccatcatcagacacactcacaatagtccaaggatccgaagaattccagtggaagtctacaatcttatccctatgaccagcatgttgaaagaaaagcccagcaggtgcgttgggatttttcttatttccaaccttctcatgatcccacacatttaagaagccgtcttccgcagagcttccaaatacagatgccttgtcaggtgaccactgaacacaaagaacagcagctttatgaccctcaaatttgtgaactggaatgccagctcctccagaacccagatttctccggtcccacatacggacagaattatccgcagaaccagttaagatatagttaacatcatggaggttccagtcaacacaatgaacatcaccaccatgagctttctcaaccttaacagctgggcctgtaccactccgggcatcccaaagaataagacaagaatcatcgcccacactacaaaactcctgtgcactagaagggcagaactggacatcttcaacagtactgtcgtggccaagaaagataccacgaggatcaactttaggactatccttatcatttgcagtttttcccttgcttcctgatgcccctggagaagattcagtttcgagggaatctccccagtgcagatatgtggtctgggatgctccccccatacaacagattggtcttttcctccagataacacatatggctcagctgggcacatagcaagcgcaaactcagcaatatccttatgtcctcttaatatcaaatcagggcgagagtcaggtggtaccaaatcaggacgagactccatctgtgccagttgagcttgtctatttggctgggcctcgacatcccaaatgagaacatctgggctgtcggtatgagtggcaatgatcttactgttctgcggaagctccctaatcctgttcacctcgcctggatgaattatagtcttgtacttctttacaaaaggtgatcgtgcttcctcattgaactgagatatatgttcagcagctgcaacccttggtttgacaacttcacaatttgcaataaccagagtattagggacagtcccatccgtctgctctgaaaggtaaagacgctgacgattcttgtaggtagccttctcaaactggggtccccaccggcaggagagggacggccagacgaggttgtggttggcgaaccagtcgtagagcaccgggatgagcgacttccactgcgcgtagcgctcgtccaccgccgccctcgaccccttctccttcatctccagcgcgcccttcgccgctcgctggcgcccgccgccgccgccgtcgcccgctcccgcctccgaaccccctcgcgctgtcacgctctctctgtcgtatgaggagcgtttgctctggacccttgcgcgtggctcccgctcagagatgccacccctcttgtgcccgaatgcaagggcagagcagagcatccaaggcttgaagcggtcgaaacaaatgcggcgcaacggttgggtgggtctctcgtcgacgcaggctcgcagcgtcacgtcgtcgtcgccgacagcgaccacctttgctgtccgtgtccccgcccccagcacgtttctactccggaagctcgcgttcgcgtcgccggcgacggggacgacggtatgagctccactgcagtcgcctcttccgccagccgccgccgccgccccgtcctccccgccagccgctgccgccgcctcgtcctcccggcgaggcctatcctcctccctccgcgtcgcctcctctgctcgccgcgccat

SEQ ID NO: 40639 - DNA, 335 bp, Oryza sativa
  Clone ID: PAT_MRT4530_44061C.1
ttcatggcgctctctctatctctatctcttccaaaaccctaaccctagcggcgggcgggagcggcggaggaggagggcgcggaggaggaggggtggtagcggtggtgggtggtatggaacacgcaatttttgaaaaggaagactctatactgtctttgaagtagatattggcttttgagatgtagtcctatctggggatgatttaaacacctattgttgtgatgactggattaactagtgatgttactgcttgtataccttggttgaaacttggatccctttacgagagcggaaatggtagaagtgtgatttaacctaaataaatgatggatcat

SEQ ID NO: 40640 - DNA, 3489 bp, Oryza sativa
  Clone ID: PAT_MRT4530_44062C.1
atgggcccgttccggcgggcgggcggccgaaccggcctgcatggagcaagctttacaccttggcctgcttccgctcctcccacagcaacaacgaggccgccgggcggcgggcccgccgccgagggcggcagcgccgtcggcggcccggggttcacgcgcgtcgtccactgcaacaactccgccgtgcaccgccggaagccgctcaagtacccgaccaactacatctccacgaccaagtacaacatcctcaccttcctccccaaggccatcttcgagcagttccgccgcgtcgccaacctctacttcctcctcaccgccatcctctcgctcaccccggtgtgccccttctccgccgtcagcatgatcgcgccgctggcttttgttgttgggcttagtatgatcaaggaaggggtcgaggactggcggcgattcatgcaggacatgaaagtgaacaaccgcaaggttgccgtccacaagggcgaaggcgaattcgagtaccggcactgggaggaccttgctgttggtgatgtggtcaaggttgagaaggaccagttcttccctgctgatttactactgctgtcctcgagttatgaggatggcatttgctacgtcgagacaatgaaccttgatggtgaaacgaacctcaaggtaaagaggtcacttgaggttacgctgccattggaagaggacgagtcatttaaggattttccaaggattgataagatacttctcagggactcaaagctgaggaatacatcctttatctatggagtggtcatttttactgggcatgacagcaaggttatgcagaactcaactgagtcgccatccaagaggagcacgattgaaaagaagatggacttgatcatatatattttgttcactgtactggttcttatatcactcatcagttcgattggatttgctgtgaggatcaagtatgatttgcccaactggtggtacttgcagccagagaagtccaataaattggatgatccaacacgtcctgctctttctgggatattccatctcattacagcactcattctttatgggtatttgattcctatctcactgtatgtgtcaattgaacttgtgaaggtattgcaagcacatttcataaatcaggaccttcatatgtttgatgaggatacaggcaatactgctcaggcccgaacatcaaacttgaatgaggagcttggccaggttcatacaattttgtcagataagactggcactttgacctgtaatcagatggatttcttgaaatgttcgattgccggggtttcatatggtgtgggttcaagtgaagttgaactcgctgctgcaaaacagatggcgtcaggcgatgatggccaagatattcatgtacaagatgtatgggagaataatgaggatgaaatacagctagtagaaggagtgactttcagtgttggaaggacccgaaagtcctcaataaaaggttttagttttgaggatgaccgccttatgcaagggaactggactaaggagccaaattcttctacgattcttatgttcttcaggatacttgctgtttgtcacactgcaattcctgaggtgaatgaggcaactggtgctcttacctatgaagcagaatcacctgatgaaggggctttccttgtggcagccagagaatttggatttgaatttttcaagagaacacaatcaagtgtctttgtcagggagaaattcagctcttccaatggcccagttgagagggagttcaagattctcaatctattggagttcaacagcaaaagaaaacgaatgtcagtaattctgaaggatgaagatgggcaaattcttcttttttgcaaaggagcagatagcatcatatttgatagactggcaaaaaatggaaggatgattgaagctgatacgagcaagcatctcaatgattatggtgaggcaggcttgcggacactggctctatcatacagagtgctcgatgaatcagaatattcctcttggaatgctgagtttcttaaagcaaagacctctattggacctgacagagaattgcaacttgagcgagtctcagaattgattgaaagagacctgatccttgttggtgcaactgcagtagaggacaaactgcaaagtggggttcctcagtgcatagatcgtttggcacaagcaggtctcaaaatctgggttctgacaggtgataagatggaaactgcaatcaacattggatacgcatgcagtttactgaggcaaggcatgagaaggatatgtttgtcaatacccactgatgaccaagtagcccaggatgcaaataaggctgcaaaggagagtctcatgtcgcaaatcgcaaatggttcacaaatggtcaagctagagaaggatcctgatgcagcatttgctctagttatagatggaaaagcgctcacatttgctttggaagatgacatgaagcatatgttcctgaatcttgcaatagagtgcgcttctgtcatatgttgccgtgtgtccccaaagcaaaaagcactggtgactcgactggtcaaagaaggtattggaaaaactacattagcaataggtgatggtgcaaatgatgtaggcatgattcaagaagctgatataggagttggtataagtggggtagagggcatgcagatctgctacttcttctacaagaatattgcttttggacttactatattttactttgaggcatttgctggattttctggtcaatcagtttatgatgattggtttatgctgctcttcaatgttgttcttacctcactgcctgttatctcacttggggtatttgagcaggatgtttcatctgaaatctgcttgcagttcccggcgttatatcagcaaggaccgagaaatcttttcttcgattggtaccggattttaggatggatggcgaatggcctctactcatctctggccatattctttctcaacatctgtatattctatgatcaggcaatccgttctggaggacagactgctgacatggctgcagtgggaactactatgttcacctgcatcatctgggctgtcaacatgcagattgcgctgacaatgagccatttcacctggattcaacatctctttgtctggggcagcgtaggtacttggtacctcttcataatcgtctatggctcggcgttgaggtcccgcgacaattaccagattctactggaggttcttggacctgctcccttgtactgggcagcaactcttctggtgactgctgcttgcaacatgccctacctgatccacatatcctaccagagattgtgcaatccacttgatcaccatgtgattcaagagatcaagtacctgaagaaggacgtcgaagaccaaacgatgtggaagagggagcggtcgaaggcccggcagcggacgaagattggtttcaccgcgagggtcgatgcgaagatcaagcagatcagggggaagttgcacaagaaggccccatccctaaccatccatactgtatcgtag

SEQ ID NO: 40641 - DNA, 327 bp, Oryza sativa
  Clone ID: PAT_MRT4530_44063C.1
atgctgaagaagaggtgtgatctgcaagctccctcacctctgagcagcgagctcgccaatggcggcggggggctcctctcgccgaggtcgtcgtcgtcgtcgtcgtcgtcgctgcagggcttctctccgaggagcatcttctccgtcgacgaccaggccaagaaccatccctgcgcgagcccaaggaacccgctgagcggcggcggtcaggtgaccgggctcgccggagttctcgtcgacggcgagggcgagcggcggtgctacgggaggaccggcagggtgctgctcgggatgatgcggctccgggtgcagctgcctcaggagagg

SEQ ID NO: 40642 - DNA, 3570 bp, Oryza sativa
  Clone ID: PAT_MRT4530_44064C.1
atgggccgttccggcgggcggcggcgcgaccgcctgcgatggagcaagctctacaccttcgcctgcttccgctcctcccacagcaacaacgaggccgccggcggcgggcccgccgccgagggcggcagcgccgtcggcggcccggggttcacgcgcgtcgtccactgcaacaactccgccgtgcaccgccggaagccgctcaagtacccgaccaactacatctccacgaccaagtacaacatcctcaccttcctccccaaggccatcttcgagcagttccgccgcgtcgccaacctctacttcctcctcaccgccatcctctcgctcaccccggtgtgccccttctccgccgtcagcatgatcgcgccgctggcttttgttgttgggcttagtatgatcaaggaaggggtcgaggactggcggcgattcatgcaggacatgaaagtgaacaaccgcaaggttgccgtccacaagggcgaaggcgaattcgagtaccggcactgggaggaccttgctgttggtgatgtggtcaaggttgagaaggaccagttcttccctgctgatttactactgctgtcctcgagttatgaggatggcatttgctacgtcgagacaatgaaccttgatggtgaaacgaacctcaaggtaaagaggtcacttgaggttacgctgccattggaagaggacgagtcatttaaggatttccaaggattgataaggtgtgaggacccaaacccaagcttgtacaccttcattggtaaccttgagtatgagaggcagatttatgccatcgatccgtttcagatacttctcagggactcaaagctgaggaatacatcctttatctatggagtggtcatttttactgggcatgacagcaaggttatgcagaactcaactgagtcgccatccaagaggagcacgattgaaaagaagatggacttgatcatatatattttgttcactgtactggttcttatatcactcatcagttcgattggatttgctgtgaggatcaagtatgatttgcccaactggtggtacttgcagccagagaagtccaataaattggatgatccaacacgtcctgctctttctgggatattccatctcattacagcactcattctttatgggtatttgattcctatctcactgtatgtgtcaattgaacttgtgaaggtattgcaagcacatttcataaatcaggaccttcatatgtttgatgaggatacaggcaatactgctcaggcccgaacatcaaacttgaatgaggagcttggccaggttcatacaattttgtcagataagactggcactttgacctgtaatcagatggatttcttgaaatgttcgattgccggggtttcatatggtgtgggttcaagtgaagttgaactcgctgctgcaaaacagatggcgtcaggcgatgatggccaagatattcatgtacaagatgtatgggagaataatgaggatgaaatacagctagtagaaggagtgactttcagtgttggaaggacccgaaagtcctcaataaaaggttttagttttgaggatgaccgccttatgcaagggaactggactaaggagccaaattcttctacgattcttatgttcttcaggatacttgctgtttgtcacactgcaattcctgaggtgaatgaggcaactggtgctcttacctatgaagcagaatcacctgatgaaggggctttccttgtggcagccagagaatttggatttgaatttttcaagagaacacaatcaagtgtctttgtcagggagaaattcagctcttccaatggcccagttgagagggagttcaagattctcaatctattggagttcaacagcaaaagaaaacgaatgtcagtaattctgaaggatgaagatgggcaaattcttcttttttgcaaaggagcagatagcatcatatttgatagactggcaaaaaatggaaggatgattgaagctgatacgagcaagcatctcaatgattatggtgaggcaggcttgcggacactggctctatcatacagagtgctcgatgaatcagaatattcctcttggaatgctgagtttcttaaagcaaagacctctattggacctgacagagaattgcaacttgagcgagtctcagaattgattgaaagagacctgatccttgttggtgcaactgcagtagaggacaaactgcaaagtggggttcctcagtgcatagatcgtttggcacaagcaggtctcaaaatctgggttctgacaggtgataagatggaaactgcaatcaacattggatacgcatgcagtttactgaggcaaggcatgagaaggatatgtttgtcaatacccactgatgaccaagtagcccaggatgcaaataaggctgcaaaggagagtctcatgtcgcaaatcgcaaatggttcacaaatggtcaagctagagaaggatcctgatgcagcatttgctctagttatagatggaaaagcgctcacatttgctttggaagatgacatgaagcatatgttcctgaatcttgcaatagagtgcgcttctgtcatatgttgccgtgtgtccccaaagcaaaaagcactggtgactcgactggtcaaagaaggtattggaaaaactacattagcaataggtgatggtgcaaatgatgtaggcatgattcaagaagctgatataggagttggtataagtggggtagagggcatgcagatctgctacttcttctacaagaatattgcttttggacttactatattttactttgaggcatttgctggattttctggtcaatcagtttatgatgattggtttatgctgctcttcaatgttgttcttacctcactgcctgttatctcacttggggtatttgagcaggatgtttcatctgaaatctgcttgcagttcccggcgttatatcagcaaggaccgagaaatcttttcttcgattggtaccggattttaggatggatggcgaatggcctctactcatctctggccatattctttctcaacatctgtatattctatgatcaggcaatccgttctggaggacagactgctgacatggctgcagtgggaactactatgttcacctgcatcatctgggctgtcaacatgcagattgcgctgacaatgagccatttcacctggattcaacatctctttgtctggggcagcgtaggtacttggtacctcttcataatcgtctatggctcggcgttgaggtcccgcgacaattaccagattctactggaggttcttggacctgctcccttgtactgggcagcaactcttctggtgactgctgcttgcaacatgccctacctgatccacatatcctaccagagattgtgcaatccacttgatcaccatgtgattcaagagatcaagtacctgaagaaggacgtcgaagaccaaacgatgtggaagagggagcggtcgaaggcccggcagcggacgaagattggtttcaccgcgagggtcgatgcgaagatcaagcagatcagggggaagttgcacaagaaggccccatccctaaccatccatactgtatcgtag

SEQ ID NO: 40643 - DNA, 159 bp, Oryza sativa
  Clone ID: PAT_MRT4530_44065C.1
atgacactaggcagagtagtgggccaagaagtatgcctgatgaagcacctggcctggatcaagagcatcaaagcatcaagccaccacaagaaggtgaagttttatgctattcctcacaaccaagacatgacgaatcttacgggaggcaaccagcattga

SEQ ID NO: 40644 - DNA, 453 bp, Oryza sativa
  Clone ID: PAT_MRT4530_44066C.1
accatctctcggacaacccccccgagcatctccacctcttgaccgcagtggcgaccgatgcgatcctcgtgacgatgcacgccgcggcggagcgcgtagcggcagaacctcctcgggaccaacgccgccggcaagggcagaggctgcgaccacctcatcgggctgcggcggcggatgtcgtcgttctctgcgcgcatccagacgctgatgtcgtcggcggcggccgggggcgcgtccaggctggcgacgtcgatgccgtctgtgaacgcgctggcggcgcaagcctgctcggcgcggcggtggtgggggtggggtctcggttggttgatgaaccggaggccggcgtgcgcgcgctgactggacatgaacgaagacgaggacggcgccctcggctggcactgccgcggcacgtggtggcacgttttatacaggctgcgcgccggcgcgcgccgg

SEQ ID NO: 40645 - DNA, 1223 bp, Oryza sativa
  Clone ID: PAT_MRT4530_44067C.1
gcacgaggcccttgtctcctcccccaccggggcccgcccccccgccgtcgccccctccgcctcgcggccgccgctcggagatggcctcctacccggtgttccaagtaagcccagaggaagcagcgaagggtaaatggtacatggcaactgctgctaccaactacctgactcgcgaccagagccccatgtccgacctcaaacctctgaccggccgtgtcctgagtcgtggcaacggcgcagggttgaaggtgcatggcagtggagctgtgaacacagagacggtggcgatcccagacgtgtggcatgtgccggggatcaacgcgaacctggtttctgttccccagctctctctacttgggcccaaggtttcgtttgaccgtgttgggtgcactgtgaatcgagattcggtttagcgcgtagtctgcagggggtcaagcccatggagcatctgcagggtctccggcggcaaccctccaaattccgcttaataagcactgttaattcctcgctgcaggaacggtggtagtggtcagtctcatatggtggctaatgttgccaactctatcgaatgcttgcagggtttgaacttaaatggcacctctctgaatgtagttaagaatctgggggttaacggaatgtaattgaaagtacatggcagtttagctgtgaacacagaaacggtggcgatcccagacgtgtgtctcaacaacatcttcataagtgcagagcccggagcaacatttcctagatggttcatcacagaagctgctacaaaccacatgaccagcgacaagagcatcttctccgacctcaagcctatggccggccttgtcatcgacgaccgtgccggcgccggcgcagggttgccgatgcacggcattggagctgtgtactcatgggaggtggcgctccaagatgtgtggtatgtgccggggatgagtgcctacattggcttagtttctgctggtcagctcactgcaattggtctcaaaactgagattgcaggagatgtctgcaccatcactagtgctgatggatctgaagttggcaaagggcgctgtgacatggaagaagcgccggagtggccgacgccgccggaggccgcggtgaccatgacattcaatctgggcagggtgtccagggcggcgctcatcgccttgagcgagcgcggtgacagcctggagagcggcagggatgcacccaccgccgctatggatccatga

SEQ ID NO: 40646 - DNA, 209 bp, Oryza sativa
  Clone ID: PAT_MRT4530_44068C.1
ccccggctgcaaccttcaagacgtgcatttctcagccagcaagcaagctgcccgccggacagcagcggtgcgacagctcggggagctgccacacagtcccctgcagtcgtttcgccgtcgtcgactcttcgtcgtcatccccgcgcgaacgcgtggtggacaaaggcgacggggatcgagaggagcatatatgagaatgagaccgagag

SEQ ID NO: 40647 - DNA, 117 bp, Oryza sativa
  Clone ID: PAT_MRT4530_44069C.1
tccaatcccaacgtctgaccacaagaggagctgaactattacattattactgacgcgaggcatccctacaggcatcacttacagtaggttaactgatgagtacactgcagtgtggat

SEQ ID NO: 40648 - DNA, 676 bp, Oryza sativa
  Clone ID: PAT_MRT4530_4406C.1
aggtggaattaaagtgaaggctcggcagggtaatggcaacttgaccacggcgctcggggtgggacgacggcgacacgcgggcgacgacgctatggcggcgcggggctcggagcggcgatgcgacgggcggcggtgcggggctcgagacgggcgacgcgacgggtggcgtgggagcggcgtgacaggcggggcgacaacgggacggcgcggcgcggcgcggggcttggcgcgcggcgacggcgacacgacggcgacgggcgacgtgatggcgacggggcggcgcggggctcgagggcgacggcgacggcgcgggctcgaggcgcgggcgacggcgcgcggcgcggggctcaagggcgacaggacgcgacggcgacgcggtgcggaagcggcaatgggacggcggcgcacggcggcaagcgacgatggcgacggcgcgcggcggctcggggtgcgaggcggcgatgggacacgcgagcggctacaggatgtcgacggcgacggcgacagcggcgacgtgacgggtggtgacggcgtgcggcgcagcggcggcggcagaggggaggcggagcggcgcacggcgcgcggggcgcgaggcagcgtggcagaggaggggcttgggctagggatcaaactgactggcacgcccgcgtctcatcaacctttggacctgcactag

SEQ ID NO: 40649 - DNA, 498 bp, Oryza sativa
  Clone ID: PAT_MRT4530_44070C.1
tccaaatcagatgaatgtcaccttttgccctcccagaatacacactaccaccccacatccacctcaaatgcattacaggcctcagtgagaccacctccaccaaacatgatgccaccccctcctcttggcatggtaaggcctccgccgcctccttccagtatgccagctccacctatgtggaggccacccccacccccacaacaagctggtggtatgccaccacctcctatgtccatgccaccgccgccaccaccaccttctggttaaacatatgctggtgaaggttccataccatatggcacattgtagctgtagactgagaatgttggtacctttcttatatttccatgtaacttgcaaacactaggagaggatcagaattcagtgagtttagctgaccctgatacaaattctcgaggttaactgtattttgttggaaatacatgaattttgtggttaactgtatttttgtgatttcaaaaaaaaaaaaaaaaaaaa

SEQ ID NO: 40650 - DNA, 201 bp, Oryza sativa
  Clone ID: PAT_MRT4530_44071C.1
atggccccactcgtcagtggtgttggcggcatcatcgccacaagtctttcgaaaggagagtggaggaagcggggttatgacttccacaggatgatgctctctctctccccacgttacttacccaggattaggctgaagaacgaatatgattcttttgggcaacaaatggcatctgaacgtatgtccgccctcaaactaatg

SEQ ID NO: 40651 - DNA, 4044 bp, Oryza sativa
  Clone ID: PAT_MRT4530_44072C.1
atggccggcgctaacgacgacgtttggcgccaacgcttcgacgacatgatgcgccggctggaggagctcagcggcctgatcaccgacatcgaccagcagcaacgtacccagaccttggccatcaaccgcttggagaatggcgcccgcgctccctcttctcgcttcgacgacctgagcgacgtcggcgatcgcaatgggggccgctttgcccatcacaacgtcggccgcggcgaccgctacggtcgcggcggcgatggctttcatgggcatggacgtccgggcggccaccgcttcgacggcgatggcgatcgtcctccacgctaccacaagttggactttcccaagttcgacggccgcggcgatccgctccccttcctcaaccgctgtgaacaattcttccggggccaacgcacgccggaggacaacaaagtctggctcgcctcctaccatctgctcgacggcgcgcaacagtggtacactcgccttgaacgtgaccatgaaccgccttcgtggcatcgcttctcggagttgctcaacatgcgctacggtccacctctgcactcgacgcctctgggcgagctggcagcctgccggcgaacgaccacggtggatgactacgccgagcgtttccttgacctgctcacgcgcaccggctacctctccgaggatcaacagttgggggaggacgacaccgacaacgactccgccaccgaccaagcagacgcggccgccacactccggatttctctgcatgcggccaccggagttcgcgcgtccgacgccatgcacatcacggcccacctcggcgacaccgacctctacaccctcatcgactccggcttgatgcacacgttcctgtctcaggatacagcggcacgtgtcggtcgggctcctcagccccgcatgggcctcaacgtcacggtggcgaacggcgacaaggtggcgtgccccggcgtcttccccgacatgcctttacagatcgccggcgaggaattcgccacggacgtttacgtcctgactctgggtggctatgacctcgatttcacggtgctgacaatgtccttctggcaccgcgtcacgctccacgggttgccgggacaccagcgaccccgtgctctggcgtgcgctccagcggcactactggactccctcctggaggaattcgcggacgtcttcaccgagcctacaggattgccgccggcccgagaccgctcacatcgcatccagttgctgcccgggacagccccggtggcggtacgcccgtaccgctaccccgtccgccacaaagacgaactggaacgccagtgcagggtgatggaggaaaatggattgattcaccggagcacgtcggcgttctcatcgccggtgctgctggtgaagaaggcagatgggtcatggcgcttttgcgtcaattaccgggctctcaacgagcgcacagtcaaagacaaataccccatccccgtcgtcgacgagctcctcgatgaactgcacggcgccgccatcttctccaagctcgatctgcggtccggctaccatcaagtccggatgcaccctgacgacatcgacaagacggcgttccgtacacacgatgggctctacgagtttctcgtcataccgttcggcctcacaaacgcactggccacgttccaatcactcatgaacgacgtgctccggccgtttctccgccgcttcgtcttggtcttcttcgacgacatcctcgtctacagcccaacgtggacgtcgcacctgcagcacctgcgcaccgtcttcaccgcgctctgggcagcccagctcttcgtcaagcacaccaagtgttcgttcggcgacccaagcgtagcgtacctcggccacatcatttcgcagcacggcttcgccatggacgccgccaagattcaagcggtagctgagtggccgcgcccccgttcgcccaaggaactccgtggcttcctcggtctggccagctactaccgcaagttcattcaagacttcggttccgtggcggctccactcacgcagctcctccgcaaggacagtttcgcatgggcgccggcgaccgatgatgcgttccagcgcctcaagctcgccctcacaaccacgccggtcctcagccttcccgacttcaaccgcccattcgtggtcgaatgcgacgcatccggtaccggcttcggagcagttcttcaccaaggcgaagaccccatcgcctacttcagtcggcccatcgccacacgccatcacgcgctcgccgcgtacgagcgtgagctcatcagcttggtgcaagcagtgcgacactggcggccgtacctgtgggggcggcaattcatcgtcaagacggatcactacagcctcaaattccttcttgaccaacgcttatccacgatcccgcaacatcattgggtaagcaaattgttggggtttgattttgtggttgaatataagccaggcaaacagaacgcggcggcggatgctctgtcttgccgcgccgcaccagacagccaggccttcgtactctccacgccgacgttcgatctcctcaaagacatccgcacggcgggggacaccgatccggcactacaagccctccgcgacgagatcaactccggcacgcgcacaacaccatgggcggtgatcgacggcctcgtcacctacaagcgccgcatctacattccgccgggctcaccatgggtgtcagtcgtcgtcgccgcggcgcatgatgacggacacgagggcatccaaaaaacacttcatcgactccgccgcgacttccacacgcccgacgaccggcgtgtcgtccacgatcacatccaaggctgcctcacctgccagcgcaacaagacggaccacctccatcccgcgggcctcctgcttccactcccggtaccatctgccatttggtccgatgtcgcgatggacttcgtcgagggccttccacgcgttggcggcaagtcggtcatcctcaccgtcgtcgatcgattctccaagtacgcccacctcatcgccctcgcacattcgtacacggcggagacggtggcgcgtgcgttcttcgtcgacatcgtgcgcttacacggggtgccggagtccatcgtttcagaccgggaccccgtcttcacgtcggcgttctggacagccctcttcaccgccacctgcaccaagctccaccgcagtacggcgttccatccacagtcggacggccagtcgaaggccgtgaacaaggccattgccatgtgtctccgctgcatgaccggagatcgctcccgccagtggctgcgctggctgccgtgggcagagtacatctacaacacctccttccacgccgcccttcgtgacacgccgttcaagttggtctatggccgcgatcctccctcaatccgggcatacgacgcaagcgagctacgggtggcagcggtggcacagtccattgaggagcgcgacgcattcctcgctgatgttcgtctccgcctggaacaagcacaacagtatgccaagcgctactatgatcagaagcaccgggaggtgtcgttcgaggtgggggcgtgggtgtggctccgcgttcgccaccgcgttcctgcgtccctcccggaggctgtcaagggcaagcttcgtcctcgcttctacgggccataccgcgtcgtcgccgtcatcaacgaggtggcgtatcgcctcgcattgccgccggggacacggcttcatgatgtgttccatgtcggactgctcaagccgttcgtgggtgtgtcgccatcggcaccactggctttgccacccattcagcatggagcggcccaacctgttcctcgccaagtgttgcgcgcccgtttggctcgaggggtgcgccagcttctggttcaatgggaaggactgccggcatcggccacatcttgggaggacttggacgactttcgcaaccgatatccctcgttccagctcgcggacgagctactgatcgagggggggagagatgttatgtggggaattcccttccgccggcgcaagcagcaagctgggcttggtgccggacgagctatagggccgggcggcacggctgtttag

SEQ ID NO: 40652 - DNA, 517 bp, Oryza sativa
  Clone ID: PAT_MRT4530_44073C.1
atggcgcacgtgagcttctaccgcaactatggtaagactttcaagaagccaaggcggccatatgagaaggagcgtcttgatgctgagctgaagctggtgggagagtatggaactgctcaccctggatgagaagaacaacacccgtcgtatcttcgagggtgaggcgctcctccgccgcatgaactgctatggtctccttggcgagggtcagaacaagcttgattacgtgcttgcactcactgttgagaacttcctctagcgccgcctctagaccatcgtcttcaagaatggcatggccaagtcaatccaccatgcacgtgtccttatcaggcagcaccacatcagggtgggaaggcagctcgtcaacattccatcattcattgtgaggcttgagtctgagaagcacatcgccttctccctcaccagcccgctgggcggcagccctgctgtaagagtgaagaggaagaaccagaaggcctcgggtggtggcggtgacggcgaggaggaggaagagaaa

SEQ ID NO: 40653 - DNA, 253 bp, Oryza sativa
  Clone ID: PAT_MRT4530_44074C.1
acccaggggttattgcagtagttttgaagaataaaattggccagaacgcacaaaatcatatataggactttatcaccagctatttggggggggaaacatttcattattcattattgggtttgaacactatctcggtggatgcaacacagcaacggggggaacccactagctttgggggaagccagctaagcctagtactggccggggtgaaaaaatgctgcactgggggggcttaacccggcacatatgacgg

SEQ ID NO: 40654 - DNA, 2048 bp, Oryza sativa
  unsure (1)..(2048): unsure at all n locations
  Clone ID: PAT_MRT4530_44075C.1
atcattgtggttttcccgcgaaatccttcttctcgtcgggcgattcgccgctaatatcaactctatccttctccaaatttttctttttttttcccagtgcgtggtgttacactgacagctcgctcgccagtggacgcttccacggaaggcgcagcagagtagccggctaagccgccgccgccatgcgttcctccgcccgcggccgcggccgcctcctgctgctcctcctcctcgccgccggtgcgccggcggcgccggcggcggcggaggtggccacctgcaaggcgtggctggtgcagtccatccccaccgacatgccccacctgcggcgcgtccccggtgtcctctccactgcggatgtgctgcaatggctatctgggaatgctacaaaaagcctggatgtccttgctcaatactggcagttcttagctcaacctaagaaccctaaatcaggcgattatgggtactctgagagtgaaatggtaaggttcggagctgacaaggggcaacgggtttataaggcactggagaaagctgcagatcgtaagatcaaaatcaggattgtgcaacactctggatttgcgcctgattttgacaaagagagtgctgatctcgctgcaggaagaccaaatgtacaaaatgtaaccttactttttggtgattggtggggctctggtgttgtgcatgcaaaagtgtggatatctgacaaaaaggatgtgtatattggatctgcaaacaacgattggaaatcccttagtcaggtgaaagagcttgggatttattttgctgattgtccacagatagcaaaaactgtggaaatatactttcaaaatctttggaaactttcaactctcaactcaactgcttacaccaaagttgcctgggacaagcaatggcaagcttttagaaaagtgccatgctggtcacattttctaaaaccagaagaaagatgcaggtcacctcttccaccctctgttgatgtcccatatgtggatggctatccgtcacttgccaatcctaaaatgcttgatttttcatttgaaacccctgggtataagagctctactaaggaacaccacttgagctatctttcatatgctcctcctgagctttcatttgacaagttccaggcagatgagcagggttggcttgacaccatcaagtctgtcaaattcgggggagtggtgcggataagtactatggactggctgggacagtcgcaatatgcaactcaaacagtgttctggccatccttgtcatcagcaatatcagaggtaatattctcaaagaatgcaactgtaaggatcctcgtagcctactggacgcacttcatcccgaacaccgaaaagtacttgaagagccttctatactcaaacatcctctgcacatcttccagctacaaccactgcatgggcaaggttgagatcaaatactatgtggttcctgggtacaacaagaccggacctgcattggcgcaaggcgctgcgacggggaatcgctaccctgatttcacccgggtgaaccatggcaagtacgccgtcagcgatgtgagggcgaacatcggcaccagcaacctcatctgggattacttctacaccacagccggtgtcagcttcggaacatacagccccgccattgtttcgcagctgcaggatatctttgatgcagattggttttctccatacactgtacctgtaaaaccactggaagcatctgcataaaatcaggtgatcatttcagttaggagtaggtcttttttcacttattgcccaaaaaagaacgtctcggagtgagctgggncaggttcaggncanaaaccgnccatcnaaccaggagaatcccatgcatcaacaacattagggaggtttcactggctcggtttttgtcaagaatctgcagatatttttttttcggtttctccaataagttagttacagaaattttacttcccagatgagaagtgtaaactttcagaaaacattgtacaagtgtaaattttactacctcttgagcattgcctcatctaatcaaaaaaaaaaaaaaaaaaa

SEQ ID NO: 40655 - DNA, 620 bp, Oryza sativa
  unsure (1)..(620): unsure at all n locations
  Clone ID: PAT_MRT4530_44076C.1
gcttttgctggagnacngaaggcagaggcacccggaaagaaaaacaaaccctacccggaccgctcgaaggcagcgagacgccgccgacggggatgagcggggccancggggaggaccacaacagcaagacgccgccgaccagcacccagggaccatgggcagaggagagggggcagacaaggaagaggaggaggctctttttttgagaacaagagcaaactcctaccttctatgtgcaccgggtgacctccatgctcatcacgcatcttcttaccatcccgtcgctcccaatctccaccgaggaacgtcaaggtggcgatagaagaaggacgcaaccgaattcatggccaatcaggaagagaggcgcgcacttgcagcagcacgatggtgggtgggactgcgctggtatctacttagcacaatcaatgcagatctggatgaactgttctctgtgattaaacgattattattatcatcaagactgaatagatgatcggtgtgatgtatccagggatgacattccctatgctagtgaacaaagaaaagatagggatcttcaaggttataggaactctgtctatgactacaggacacattacctgagggaccaagatcatgat

SEQ ID NO: 40656 - DNA, 2814 bp, Oryza sativa
  Clone ID: PAT_MRT4530_44077C.1
atggcaaccatattgggttctttgattggatcatgcgtaaacaagttgcaaggcatcattacagaggaggcaatactaattttaggtgtagaagaagaactcaaaaaactgcagaaaagaatgaaacaaatacagtgctttctcagtgatgctgagcgaaggggaatggaagactcagcagtacacaattgggtttcttggctaaaagatgctatgtatgatgctgatgacattatcgatttggctagttttgaaggaagcaagctattaaatggccattcttcttcaccaagaaaaacaactgcatgcggtgggctttcacctctctcttgcttttccaatattcaggttcgccatgagattggtgataaaattagaagtctgaaccggaaattagcggaaatagaaaaggataaaatatttgcaacacttaagaatgcacaaccagctgataaaggttcaacatcagaactgagaaaaacatctcacattgttgaacccaaccttgtggggaaagagatattaaaagtttctagaaatttggtgtgccacgtgcttgcacacaaggaaaagaaggcttacaagcttgctattgttggaacagggggaatcggaaagacaacacttgctcagaaattattcaatgatcagaaattaaaaggaagcttcaacaaacatgcttggatttgtgtttctcaggactactccccgtcctctgttttgagacaactacttagaaccatggaggttcagcacagacaggaagaatcagttggcgagctccaaagcaagcttgaattggctattaaagataagagttattttcttgtgttggacgatgtatggcagcatgatgtatggaccaatctactacgaactccactgcatgctgcaacctcaggaataattttgataactactcggcaagatattgtcgctagggaaattggggttgagaaacagcatcgtgttgaccaaatgtcaccagctgatggttgggagctactctggaagagcattagcattcaggatgaaaaagaagtgcaaaatctgcgagacatagggatcaagattattcagaaatgtggtggtctacctcttgcaatcaaggttattgctagagttttggcaagcaaagataaaacagagaacgaatggaaaaggattttagataaaaatgtttggtccatggctaaacttcctaaagaaataagaggtgctctatatctaagctatgatgatttaccacaacatttaaagcaatgttttctttattgtattgtatttcctgaagactggaccattcatcgtgattaccttattaggatgtgggttgccgaaggctttgtagaagtgcacaaagatcaattacttgaagatacagcagaagaatactactatgagctaataagtaggaatctcctccaaccagttaacacatcttttgataagagccaatgcaaaatgcatgatctcttaaggcaacttgcttgttatatatcaagagaagaatgctatattggagatccaacatcatgtgtggataataacatgtgtaaactgcgacgcattttagttatcaccgagaaagatatggttgtcatacctagcatgggtaaggaggagattaagttgagaacttttagaacccaacaacatccagttggaattgagaacacaatttttatgagatttatgtatcttcgtgttttggatttatctgacttacttgtggaaaaaataccagattgtattggacatttaattcatctacatttacttgatcttgatagaacctgcatatcttgtcttccagagtctattggtgctctaaaaaatctccaaatgttacacttgcataggtgtaaatctttgcacagtttgcctactgcaatcactcagttatataatttaagacggcttgatatagttgagacaccaataaatcaggtcccaaaagggataggaagactaaaatttctcaatgatttagaaggattccctgtcagtggtggaagtgacaatgctaaaatgcaagatggatggaatttggaagagttggctgatctttcaaagttgagacggcttattatgataaacttggaaagaggtactcctcacagtggtgtagacccatttctgctaacagagaaaaagtatctcaaagttctgaatctatggtgcactgaacagacagatgaagcatattcagaggaaaatgctagcaacgttgagaacatcttcgagatgctaacacctccacacaacttacgagatcttgttattgggtatttctttggttgtagattccccacctggcttggtactacccatttgccttcagtgaaatccatgatcctcgcaaattgcaaatcctgtgtgcaccttccaccaatcggacagctaccaaacttgaactacttgaaaattattggagcaagtgcaatcaccaagattggacccgaattcgttggctgcagggaaggtaatctcatatccacagaggcagttgctttccccaagctcgaaatgttgatcatcaaggatatgcccaactgggaggagtggtcctttgttgaacaagaagaagaagaggtgcaggaggaggaagcagttgcagcagccaaggaagggggagaggatggaactgttgcttcgaagcaaaaggggaaagtagccctgtctccaaggtcatcgtggctgatgccttgtttgaggaggttggatctttgggactgccccaagctgagggctctcccaccacagcttggacagaccaacttgaaggagctccttataagatacacaagttga

SEQ ID NO: 40657 - DNA, 1035 bp, Oryza sativa
  Clone ID: PAT_MRT4530_44078C.1
atggtgaattttctcaaattatcggatattcagtctacggatgcggaaagcgtggatgttggatttattagctcggttcataagacaacaagaaagaaagggttcactacatgtctgttaggaaggaattccattttgtttggcaagacgactgtggtaataggtgagaaggtggagcactgttgtaggtggagtcaagaagaagaaattacagggatagcaggagttgactcttgttatggtgagcctggtggagtcttatcggggcggctcggcgtgaacggcgaaaagggatcaactcaatttcagatctcctatggtgtttcttccgcgtttggtttccgatgtgatttcgggaccggctttataacacatgggatgggagatcaccacggcatgcctcttcctcctccacttcaactaccgtgccatccgaagctactccagatgccattcgaccaagaagatcagcccggaatccatggcgtgatgctctcttctgaccactgcgggctgtaccctctgccggcgcttccgttaagcaactccgccgccgccgccgccgcaaccgtcgcattggggaagcacagtgcagccgccggttccatgcccaatattggcggcgctgaggaggtggccaccactgtaaccaaagctggcaatgagagtactacttgcaatggctccactacatggtggaggggctcgacgatggcggcggcgggggagaaggggaagatgaagatcaggaggaagatgagggagccgaggttctgcttccagaccagaagcgaagtggatgtgctggatgacgggtacaagtggaggaagtacggacagaaggttgtcaagaacagtctccatcccaggagctacttcaggtgcacgcacagcaactgccgcgtgaagaagcgggtggagcggctgtcgacggactgccgcatggtgatcaccacctacgagggccgccacacgcactccccctgcgacgacaactcctccggcgagcacaccaactgcttcagctccttctga

SEQ ID NO: 40658 - DNA, 1506 bp, Oryza sativa
  Clone ID: PAT_MRT4530_44079C.1
atggcgtccaccgcctctttcatgctcgccgtcttgctggcggtggccgtcgcggcggcgccggcgagggcggtgcgatgcccgccgagcgacaagcaggcgctgatgagagtgaagcagtcgctgggaaacccggcgacgctgtcgacgtggtccctggcgtcggcggactgctgcgagtgggaccacgtccggtgcgacgaggccgggcgcgtgaacaacgtcttcatcgacggcgccaacgacgtccgcggccagatcccgtccgccgtggcggggctgacggcgctcatgtcgctgtcgctgttccgcctcccgggcctctccggccccatcccggcgtgcctcaccgcgctctccaacctccagttcctcaccatctcccacaccaacgtctccggcgtcatcccggactcgctcgcgcggatccgcagcctcgactccgtcgacctctcccacaacagcctgaccggccccatcccgaactccttctccgacctcccgaacctccggtcgcttgacctccgcagcaacaagctgacgggttgcatcccggcggggctcgtgcaggggcagttcaggtcgctgatcctctcctacaaccagctcaccggcccgatcccgcgcgacgacgcgcaggacgagatcaacaccgtcgacctctcgcacaaccgcctcaccggcgacgcctccttcctcttcgccgccggccggcccatcggcaaggtggacctctcgtggaacgacctcgacttcgacctcagcaagctcgtcttcccgccggagctcacctacctggacctcagccacaaccgcatcaggggcaccgtgccacgctccctcgccgcgctctccacgctgcagacgctggacctcagctacaaccgcctctgcggcccgctcccgaggctgcacggcgtcatccgccacggctgcaagccgtacgagcacaaccagtgcgccggcggcgccccgctcggcgggtgccaccaatcgtgagcatccatccatccatcaccgccggcgagctgatgctgccacgtaaggtggagcccggggtgcgtaacggtatacgtgtttggtgttttttcgcgtacggggacgtggccgtgtagtacacggtacgacgggtgcagccgtgcagggtactgggcgggtttacgttagtacaaattgtaaccaaggtagagtgcctgcacgcgtgcgtggtcgactctccttcagattgtacgaaacgagggagccgtgtgtacgtgtgcgtacgtgtaccgtgtatggagtacgatgatgatgatgatgcaagtgtgtgtattgtgaatgtacgttatggatcgccctaatgtatcatcgaaatgataagtgtttgatataaaatacaaaaaaaaaaaaaaaaaaaaaatagtggaatttacttattcgcttctaaaaaaaaaaaaaaaaaaaaaaaaaaaaaaaaaaaaaaaaaaaaaaaaaaaaaaaaaaaaaaaaaaaaaaaaagggcgccgc

SEQ ID NO: 40659 - DNA, 1041 bp, Oryza sativa
  Clone ID: PAT_MRT4530_4407C.1
atggatggatggaatggaatggaatcggacgttggctacggcgagaagatgccgctgccgatggcgatgaaaacaaaatacaggatgattactgatgccaatggagggcaccggcgccggcgcagcaagacagacggcgagaggtggtgtacggagctcgccccccgcatcccggtgaaggcgtcgggtcggcggaggtggagacgggctcggtaccccttggcggcgtggcgtggggacgccggtagcgtcgtgacgggcagcggagccgaggaggtggccggcgacgagcaggtcgacgggcggccggtggagggtgccgaggccagcgccccgccggccaggacgacagcgcgcgtggcggaggagtcggggtcgttgtgcccggcggcagagccacgaggcggtggcggaggtgggtcggcggcttgctccagcggcggcgagcgggagagggccggagcggccgcggcctccaagtgcggtagcgcggcgtggcttagcccaaatcgagcgaccgacaaccgattgattccaggagcatcgagcgatcgccgtcgcggcgcctcggcaaggcgccagtgccgccgctctcgctctttggccccgcgcctgcctccgcctccccggtccgcacgctccaccgccgccgctcccccagccccgcgtgaggcgtcctcagcggagggcacgctgtggtgcgccgtacgccgccgcccgcctccagaagcttggtcacgcctcggcagcgccgtcgcgctgctgagtgcaaacggcaaggcgaaggttttgggagtacatctcatcgtcaggagtggaaagcagagatgggcaaaggttttgggagtacgcctcgggcagaatccaacggaggagaaccaggtcgccgtgcgctccgggctcatcttcgtacccaccgttgccggcttgctgcttccggggcctcggctaggctgcctgccagcgaggctccctctcctcgaaggcgtgcgcgccgccgtgcatggtggcaagagccttgggctgcactgcttgtggtag

SEQ ID NO: 40660 - DNA, 301 bp, Oryza sativa
  Clone ID: PAT_MRT4530_44080C.1
gtgtcttttactagtgaccaagaaaaacatcttcggtagatctatggatacatggcttcgagctaagcacagtggtgaaggacggggacgcattgagttaggttccgtgtgttctttatatcgatagtcatgccattttcttcgcttattatttggtcactctagtcgatcttcctttagattttttagttttatattttttcattatttttatttattttgttttttttttatattatctttattaatttttatttttttaatttctttctattttttttattttattttatattcttat

SEQ ID NO: 40661 - DNA, 441 bp, Oryza sativa
  Clone ID: PAT_MRT4530_44081C.1
atgtcggtgtcaagcgcgtcgactaaccgcaccgttggggcacgtggcatctacgtcttcatcgccggcttgccttcgtcgtcaccaacaggtgtttccgcccacacggttggttggtcacaccaccgtagatgggcgtctaccggccggccgcctcatctgccgccaactggtgtcctcgccatcacggttggatggtcacacaaccattatcgggcatcatcgtcatcaccgaccagccacctgaccactgtcgactggtgtctccgcctacacggctggcctattatgccgccgttgttgggtgcctacaacttcaccgactggctcgccttcgccgctgctgactattgtcttcgcctacacagctgggctattataccgccgttgttgggcgtctacgtattcaccgaccggcctgccttcatcgccgtcgactag

SEQ ID NO: 40662 - DNA, 222 bp, Oryza sativa
  Clone ID: PAT_MRT4530_44082C.1
atggccacggcgcctcccctctgccagatccgccggggaggggaggcgtcggcccaacacgaggtgccgcagcgggaggcaacagcgccctccgccagatcctaccgggagcggcggcccgacaggaggggggacggggacggcagaggcaggcggtgtgttacgaggacatgctaccgctatagtgtgaggtacaacatccaagtcaacatgaaaaaatga

SEQ ID NO: 40663 - DNA, 2178 bp, Oryza sativa
  Clone ID: PAT_MRT4530_44083C.1
atggagattttgcgcgcacaaggagagggcgaagacgaatgccgggacggggaaagagattgggttgttaccgcgaaggatcttccggtgcatgatgagccccttccactctattcctccccactagatccctcatctctttaccatcccagcctcgggcagagatcgcaggcagcgccgcggcaaccagcaggtcgaggcggcaaggtgcatggagggcgtctccggtggctcgtcggcagcggagctattgaactcggcgttctgatcctgctcgttgctccggggccgtggcgctttggtgggtggggcgcgcgtatggcggccgcggctgggttacataatgtcaagggggcttatggacccttgatgggccgtcgggcgatcgccggccctatagcccctaagcttgatgggccggaaaggcttctttggcccttgcaggggcgaactggacatggcgaagccgtctttcttcgagctggatgccagggcgaactggccatggcgaagtcgtccttcttcggcagatttggtcgaatggcctcatgccatccgccaacgagcccctcacgggcaagggtgagagtggagcttcggccgagaccgtgcaaaccatgtggtatggtggaactccctcagttgagcccgtcagcgctggttcggatctcgatcttcgactgggcacgccggacttccgggttcgaacccaacgctgccctcttcggcgccatattctttgccaccgtgaactcgaagacggtggttactccggctggaacaaagaagacggtgttcgggagtgtgaactttaacattcgccccgaacggtccgacctctggccggtgaacgctgccatgtcgaagtgggaccgccattggatggcgaggtggttctatcacaccatccccttcgaagccggctctgactcggcgaaagctcttcggtgccggcgcagggttatcgtgccgaatcggaaacgcaggatcgccgtggacggcgctatggaggcacgctgccgcgacctggtggaggaattctgcatgcttcgcgtctttcccctctcccaatcatggcaggttacagttgatccgagcgaagaggttgatggcttgcctaagctggtcctccttgagggaatgaacatgctaaccctcgaccaagctgaggccgaagcccgcaagatgatcggcgatgtttacaatggcgagttgcctcctcgggcgaatccccacaagaccaatgacgaagcaggaccttcgcggaagcacacgcgcggtcaggtaaagcttgcccctaggaagcatagggctcctgcttcgtcggactctgatgctgatgacgaggaggatgctgaaggacgtgacggcgaagaggaagggggggaagaagaggaggtggagaccgtggttgaaaaggccaagggcgaggcggttgagggccgcgctgtgactcccggctatacccccactccgagtcctggccataacgagaccggggtggagtcgaatagctccccccttcgccaaaaatacttagacggggcgaaggccctggttgcgttttcttcgggcaaagcggcgaagggaggtcttgtcaagaaggtggctaagaaaaaaggactcgttgatgtcgctcgtgtttttagcggcgatgagtcctctgacgggactccgacttcgcccgctggccgcagcttggatctttcggctgcccccgttcctccactcggcgccgctggagcaggcggtagtactgccgctggggcttcggcctctgcggaaagaatcatgacagccgcagcaaaagtattcggcagtcctctatgtcagctggttgcgtcgccgctgattgaggcgaagggaaagagagcggtcgtcgagacatctgcttcggaatactcgctcgcggtaccccgcttcgcccctggcgacttcgagacacaggcggacctccttccttttgtggagggggtaagcaatcttgtattgcctgccagtgccctaagcttgttcaccgaactgaatgagttcgatgaggggtgctctgctataaaaagcctggcggttcgggcacacttggtgtgtgcagtacttcgaaaaatatgccaggcaaatgcggtccgccacaagcagcagatttcgccaaggcgtttgcttcctcgttctggcccctag

SEQ ID NO: 40664 - DNA, 2442 bp, Oryza sativa
  Clone ID: PAT_MRT4530_44084C.1
atggcccctcgcaaaccaaaccctgttcaggcgttaggtccggaccctggccgggtcaatgacgattacacctcctttttgggggtttctcttatggacgacgacgagctagcgaagctggtcagctctggggcgttggctgaggggcaggctttcgccctagggaaagccgtggtgccgaagcctgtggacaatcggacggtggttttcgccgtgtttttcgaggcggggctacggtttccatgcaacgtgctgttgccggagatccttcgcctttttcaggtggagctcccacagttgagcccatcggcgctggttcggatctccattttcgactgggcatgccggacttccgggtttgaacccagtgctgcactgttcggcgccatattctttgccaccgtgaactcgaagacggtggttaccccggctggaacgaagaagacggtgttcgggaatgtgaactttaacgttcgccacgaatggtccgacctctggccggtgaacgctgccatgtcgaagtgggaccgccattggatggcgaggtggttctatcacaccatccccttcgaagccagttctgactcggcgaaagctcttcggtgccggcgcagggttattgtgccgaatcggaaacccaggatcgccgtggacggcgctatggaggcacagttcgccttgctgcgaaaggtttgttctcgcctcagctgccgcgacatggtggaggaattctgcatgcttcgcgtctttcccctctcccagtcatggcaggttacagttgatccgagcgaagaggttgatggcttgccgaggctggtcctccttgagggaatgaacatgctaaccctcgaccaagctgaagccgaagcccgcaagatgatcggcgatgtatcgcttgtcgagttcagccagttgctgacacggcgggcagctggtcgagcgaaccgggtttacaatggcgaattgcctccccgggcgaatccccacaagaccgatgacgaagtaggaccttcgcggaagcggacgcgtggtcaggtaaagcttgcccctaggaagcgtagggctcctggttcgtcggactctgatgctaatgacgaggaggatgccgaagaacatgacggcgaagaagaagggggtgaagaagaggaggcggagaccgtggtcgaaaaggccgcgggcgaggcggtcgagggccacgctgagactcccggctatacccccactccgagtcctggccataacgagaccggggtggagtcgaatagctcccccttcgccaaaaagacttggacggggcgaaggccctggttgcgttctcttcgggcaaagcggcgaagggagatcctgtcaagaagcgacgatgagtcctctgatgggactccgacttcgcccgctggccacagcttggatctttcggccgcccccgttcctccactcggcgctgctggagcgggtggtagtactgccgctggggcttcggcctctgaggaaagaatcgtgacggccgcggcgaaagtattcggcaatcctccgcatcagccggttgcatcgccgctaattgaggcgaagggaaagagagcggtcgtcgagacgtccgcttcggaatattcgctcgtggcaccccgtttcgcccctggtgatttcgagactcgggcggacctccttccttttgtggagggggtaagcaatcttgtattgcctgccagtaccccgagcttgttcaccgaactgaacgagttcgatgaggggtgctctactataaaaagcttggcggttcgggaattggagaaagggaaagaagctagggccgaagtcgatcacttaaaggccaaactggagaaggagaaggcccactctgccgtgcttacagattactacaacctcactgagccgaagatggaggctcttcgccaggaggttcgcaaggccgaagcaagcgctgcggaggagtcgcgacggttttcacgggagatggtgaagactaccgagtccgcgcgaacagcgtgtcaaacgcttcgccttgcccttactgatatgggcgcgaaagtgcgaggtgtccccttcgaagatgcctcagcctttgtcttcttcgaatggacccaagaggctggtggttcggtttcggactgcgccaccgcgtacggcgactgctgtgcgcgcgtgtcagcggcctttactatgggcctcctgcagcagttcggctgcgagcacatcgccgagttccccaactatgcgaacggggattgggaactcagcgcacaagatatttcgcccgcacttcgtgcgtggcgaaaacaattctggcagaaggacggccgctccaccgctaaggcgcgccttttggagcagctagcgaaggcagaggcggcggacctgtgcgaagaggaagacgcggtggccggagggggtggaggcgatgcccaggatcacccagaggtgtga

SEQ ID NO: 40665 - DNA, 290 bp, Oryza sativa
  Clone ID: PAT_MRT4530_44085C.1
ccccaaaaaaaatttaataaaattatatccatgcatccttggaaaaacactacctttttttggacggaaagaagaaaaagctttttcccaaaaaccacccgctttcaaactctaagacagcataaaagctttggtaaagggctatctgggttggtaacagctacatttttttaccccagggccaccattttgttaaaacccaagggaaatcaacagtatagatcccaaaccctaaaaaatattttagggcctcagccgccattttttcctggttaaacgatttaaaggga

SEQ ID NO: 40666 - DNA, 608 bp, Oryza sativa
  Clone ID: PAT_MRT4530_44086C.1
catagataatcaagactacaggaagatgcttcatatggatgctacatgtatggaaatggcaggcaccgccaatatatgaagaatatagtggctgtgtggactcagcttgagccggcatcgcacaaagctgcacaagaacacaacagtgacagtttcactcttcttttagctgatgttactgttatatgatgcctgagggacatgcatctggtgagttcttacaagaacaatcaaggaaccaaatgacagttttggttgctatgttgatttttcaactggataagcataaccatcggttcttcaagattgcacatggtctaaagcagaaaaagaacttaggtagactgaaccatgtgcaattcagatatatggcacatcaagatccttggaaatgcgcagatatcggcagaaattttgctcctgaaccaaacagctaccacatctgtatctcctcttgccttggtactcattgcctcatccatgtaactttcacctttctcaagaccgagaaagtacagctgccgcgcgcccgcgccccgccccccggcggcggcgcgcgctgccgctctccgcgattgcatttcttgtaaaaaaaaaaaaaaaaaaaa

SEQ ID NO: 40667 - DNA, 102 bp, Oryza sativa
  Clone ID: PAT_MRT4530_44087C.1
agccggccaggactcatccaccacccaatgacaatgcaagcaagtacagtagccatggcgaagcatctcgcgctgtccgtggccgcctgtgtctccttgcta

SEQ ID NO: 40668 - DNA, 768 bp, Oryza sativa
  Clone ID: PAT_MRT4530_44088C.1
atgaacatggaaacacgccgctacacttctctctctcacaggaaggcgagaagcatggaatgcttcccctctacgcagtgccccgttaaaaggggcaaagccatcgcaacgctcctgaacatatcagaaccaccactggagctcaccaggacattgctggaagcagatgcagactcagcattccagccggacagaagagggtccttcccaatccacatcgcggcctcggctgcaggtcggctctcggcggtcatcgccttgctcaccatattccccggttccgccggattgcgcgactccgatgggaggaccttcgttcatgtcgcggccaggaagaagaggtacagtgttgttgcacacgcttgccagacgccggcattgtcagggatcttgaacaagcaagacaacgaagggaacactgctctgcacctagctgtagaagctggggattggtggattttcgcctgcctgttcgtcaacaagcaggtggacttgaacttaccaaacagtagtggacataccccgctggaactctctattaacactatcccgacaggactctactgtctcctgaactcgcggattttgatacaggaaacactgatagccgccaatgctacccgcggcatttctcggatggatgctgctggtacggaagaacacggaccccaatctgaagccgagaatgaggaaaaagggtcagaaatagtactacctctatattatattttaatgtatgacgccattgactttttgttcaacgtttga

SEQ ID NO: 40669 - DNA, 308 bp, Oryza sativa
  Clone ID: PAT_MRT4530_44089C.1
atggggcgcgccgtcggcgcgctggtcgcgtccgcgtccgcctcgccggcgccgctgcgcgcgctgaatgggttcgtggccgccatccgcagcccgctcggcatcggtttcgacctgaacgtgccgccggagacgttcggccactactgcgccgtgctccagtccgagatgctctgcctggagctggagccgacgccttctcctttccctgctccggcggcaagggtgcagggattgcttccaagcaagcagggccccgactgggccatcaacctcgagatatgcgacaccctcaacgccgaccgctg

SEQ ID NO: 40670 - DNA, 353 bp, Oryza sativa
  Clone ID: PAT_MRT4530_4408C.1
acagaatactatggctgctatgacgaccatcatggcatcgtgcctcgtcctcactatctcgtacacaagagaagatgagcctgcacttcattagctggacagctgagctcatagctgactggtatctacggatgaccaacatggaagacaccaatgtcgtttttatcagagtaatcgattgacagcagcatagcagaaggaagatgaacatgaattcacttagtactacgccattgatgatgcaaatgggtagatatgcacaggagagcgcctgaggcgcataggcagttagagcaaggtctcatgtttacgaatggatgctaatcctcacatgcacggctagatgaaacaag

SEQ ID NO: 40671 - DNA, 219 bp, Oryza sativa
  Clone ID: PAT_MRT4530_44090C.1
atgactacactctacaagtgtaatccccatgacttttgtttggttgatgatcacaagaccgcgcaggcggaggtggcggaggatgtgctcaccacaccaggattgatgccagcggaagcagcagaacgaacgacggcgccgtggccctcctcgctcgcgggatggatggggatcgccggaggcggcggcgccgggcaaactgacgactacgacaattga

SEQ ID NO: 40672 - DNA, 667 bp, Oryza sativa
  unsure (1)..(667): unsure at all n locations
  Clone ID: PAT_MRT4530_44091C.1
gcaatccctgcaccctgcttctgcatcagatcaccgactgttcacgcagctaactgatgctgagtgctgctgctgcttgtgtcgtcctcggacaggaagcaatgcgaccttgccgccggagcagggaaaggagaaggcgtcggctccagctccaggcagagcatctcggactggagcacggcgcagtagtggccgaacgtctccggcggcacgttcaggtcgaaaccgatgccgagcgggctgcggatggcggccacgaacccattcagcgcgcgcagcggcgccggcgaggcggacgcggacgcgaccagcgcgccgacggcgcgccccatcagcaccggcccgacgagcacgtcctcgttgaaagcggaccagcgctagcacgcgccgcagcgcgcccgactacctcccccgcacccgccttcgccgcgaggtccgctcggcgcgctacgacgctggccgcgcgcggtggctcgtcgacgccgtcgacctcgccacgggacgcacggagcggtacgcggcgaggcacctcgtcgccgccgcgggcgaaaacgacgagagggtggtggccgggatggacacgttccccgggaaggtcgtccactccgccgactaccgttcagncggcgcgttcaaggggaagttcgtgctcgtcgtcggaccgtac

SEQ ID NO: 40673 - DNA, 349 bp, Oryza sativa
  unsure (1)..(349): unsure at all n locations
  Clone ID: PAT_MRT4530_44092C.1
atgattcaccagtacggtcgntgctagtatggatgaataagcacacgtcctggactatccaagatcgtccaaganttgccccaatctgccgagtntcaatgctatattccgtgtgtttatttaccttcccataattcagataaaccttgtgaacgccaacatctaagtatcaagcgttcacaaagtgtgctagtttcaaccttatttctgtcaaaatgtaattgctgttgtgcaattctttgttcttcgtgttgtacaaattattcattgttcttggcgttgtacaatctactgcctaaccatttgtcagaatattagctctttcgggaaaaaaaaaaaaaaaaaaaaa

SEQ ID NO: 40674 - DNA, 310 bp, Oryza sativa
  Clone ID: PAT_MRT4530_44093C.1
aattgattggggaaggcccttttccaatttttgtgctgagatgatattttttttgtacgggttttgagaaaaacaaattacaggactttgggactacaacttggacagcatggttaatccaaataatacaatttaaagtagagacattgtgacaacaaattgaacaatggggtttttttgggtaaacgaccaaattgaacagcacactaattacctaacaagagcaggccagtgggaggaattgcttccacaccgaagcgggcctggaacgaattcagtttgttgaaatgggaaaggctgacccaaaatt

SEQ ID NO: 40675 - DNA, 2145 bp, Oryza sativa
  Clone ID: PAT_MRT4530_44094C.1
atggccgcggacgatctctcatccccggcgcggaagcgcggccgcgacgaggaggaggaggaggaggaggaggtcatcgacggggaggccgcccagaagcgcgcgcgcggggaggatccggagggcggggcgctgctggggctcgccaactacgaggaggacgaggaggacgaggaggcggcggctgctgcggggaggcgccgcgcgaatggccgacacgaggaagaggaggaggaggacgacgacgacgacgaggtccttgattttgattttgagaagttctgctcaatctccttatcaaacttgaacgtccttgaagcaggccaccatgtgttcattaaccttcaaactgagaaagcttactgtcttcctgatggatatgagataaatgatccatcattggaagatattcgacatgttctcaacccaaggtttacaacagagcaggttcgtaatcttgataggaacaagcagtggtctagagctcttgatggctccaattatctacctggaatggttggtctaaacaacatcaaggagacagattttgtgaatgtcacaatacagtcattaatgagaattactcctttaagaaatttctttctcatccctgaaaattatcggcatagcaaatccccattggttcatcgatttggagaactaactcgcaaaatctggcatgcaaggaacttcaagggccaggttagtccacatgagtttctgcaagcagttatgaaggccagtgataagaggttccagattggcttcccgcgccgccgctcgccgccggtggacgccgacctgctgccgcgccttcgcctcgccgctggccagagttcgccatggcgcgtcctcctccagtccctggccctcgtcgtcacctccggcctctccgcctcggcctcccactcccaccgcggccgcgcgctctcatcccgcctcctcaactccctcctcccccacgccccgcgccgcctcctccccgcgctcctccgcctcctccccggagaccacctcacgcttctcctcctcgtctcctcgaagcaccactcgcactccctgcccgccgcctccgcgctccacgccctcgccgtctcctccggccacctcccgtccgacctccgcatcgccaactccctcctctcgctctacctctccctcggctccccggcgtccgctcgccgcctcctcgccgacatcccccgcccggacgctgtcacctggaacacgctcctccgtgcctgcctccggcttggcctcctccctgccgcccgccgcctgttcgacgaaatgccggagcgggatgtcgtctcgtacaactccatggtggctgggtatgtggctgagggcgacttggccggtgcgaggaatctgttcgatggaatggcgcggagagacgtggtcacgtggaactcgatgatctcggggtattctcggcacggggacatggagaacgccaggaagatgtttgatgcgatgccggagagggatgtcgtgtcatggaactcaatgctggatggatatgcccaggctggggacgtagagatggcgaggttggtgttcgatggcatgccaaagaggagcattgtgtcttggaatgtcattcttgcgttgtatgcaaagctgagggattggcgtgagtgcttggggctttttgatgtgatgatagcagaaggaaacacggagaggtgggataggcttgtgccagatgttctattgcttacgacattgttgacaatgtatgccaagtgtggggtgatggagactgcaagggagatcttcaattcaatgggtgaaaagagtgtcccctcgtggaattcaatgatcatcgggatggtcaggttctacagtattgagccaaagtctgagcattttggctgtatgatggaccttcttggtcgcgccggactgcttgaacaatcagagaatctcattgagaatttgcaagaaggaagatgggatgatgttgagaaagtaaggaaggtgatggaggagaagggggtggagaaggatgcagggttgagcctgggcacattattttgctgtgtgactgtcaaaggagaacacaaagatgggatgtttatgcctcattatcatggtatcacctactatttcttggatgatttcagcgtcaactcaacctag

SEQ ID NO: 40676 - DNA, 1398 bp, Oryza sativa
  Clone ID: PAT_MRT4530_44095C.1
atggccgcggacgatctctcatccccggcgcggaagcgcggccgcgacgaggaggaggaggaggaggaggaggtcatcgacggggaggccgcccagaagcgcgcgcgcggggaggatccggagggcggggcgctgctggggctcgccaactacgaggaggacgaggaggacgaggaggcggcggctgctgcggggaggcgccgcgcgaatggccgacacgaggaagaggaggaggaggacgacgacgacgacgaggttgacaacgacgtgaggagggctccggagcggaggccgaggcaagtggagctgcgccgggactgcccttacctcgacaccgtgaaccgccaggtccttgattttgattttgagaagttctgctcaatctccttatcaaacttgaacgtgtatgcatgtttggtttgtggaaagtattaccaaggaagaggcttgaaatcacatgcatatactcacagccttgaagcaggccaccatgtgttcattaaccttcaaactgagaaagcttactgtcttcctgatggatatgagataaatgatccatcattggaagatattcgacatgttctcaacccaaggtgcttttctatcgtcgcccatgttaactctagtaatgagctcagagctatgcagttttttgattggtgtgctttggcaggtttacaacagagcaggttcgtaatcttgataggaacaagcagtggtctagagctcttgatggctccaattatctacctggaatggtatgtatacgtgaaactaatacaatggttcttaaatgttggtctaaacaacatcaaggagacagattttgtgaatgtcacaatacagtcattaatgagaattactcctttaagaaatttctttctcatccctgaaaattatcggcatagcaaatccccattggttcatcgatttggagaactaactcgcaaaatctggcatgcaaggaacttcaagggccaggttagtccacatgagtttctgcaagcagttatgaaggccagtgataagaggttccagattggtgttcagtctgatccagtggaatttatgtcatggctcttgaacacaatgcactcgaaactaaaaagtaggaagagaaacagaagcatcatacatgattgctttcagggagaacttgaagtagttaaggaatttcacaagaagcatattgtggaaaagaaagaggacggcgatgaacagaatggtgatgcaggttcagatattgttactgaaacatctagggtcccatttttgatgcttggccttgacctaccacctccacctcttttcaaggacgccatggagaaaaatatcattccacagtttgctcagaactttgatagcagtaaaggcttaactctgcagcatgagtcgtaa

SEQ ID NO: 40677 - DNA, 344 bp, Oryza sativa
  unsure (1)..(344): unsure at all n locations
  Clone ID: PAT_MRT4530_44096C.1
cccccccccttgtcctttagccggttttgttttatacccccccccacnancacacataaaccacaaaaaccccccanaacacaacaacactacaaccaacaaaatccaacanaaaccaatccaaaaaaaanncacaaaccaacccaaaaaanncaaacaaaaaaacaaaccaatcaccaaacaccattattntatatataacaaaatcccctctttaataacattaaacttccttttctacacaacattttctctatcccccccaacacaaaaaacataccctttatcattttcactgccattccctcaaaaataacatacttccaaccactacctttttccaa

SEQ ID NO: 40678 - DNA, 2417 bp, Oryza sativa
  Clone ID: PAT_MRT4530_44097C.1
gcccacctctcctccttccccaaaccctagaatctcgccgcgcgggcgcagctccgcccttcgctcgccgtcatttcccggcttccccgcgcaggggctagctagctagctagctagggttccggcgcacgacgacgatggccgcggacgatctctcatccccggcgcggaagcgcggccgcgacgaggaggaggaggaggaggaggaggaggtcgtcgacggggaggccgcccagaagcgcgcgcgcggggaggatccggagggcggggcgctgctggggctcgccaactacgaggaggacgaggaggacgaggaggcggcggctgctgcggggaggcgccgcgcgaatggccgacacgaggaagaggaggaggaggaggacgacgacgacgaggttgacaacgacgtgaggagggctccggagcggaggccgaggcaagtggagctgcgccgggactgcccttacctcgacaccgtgaaccgccaggtccttgattttgattttgagaagttctgctcaatctccttatcaaacttgaacgtccttgaagcaggccaccatgtgttcattaaccttcaaactgagaaagcttactgtcttcctgatggatatgagataaatgatccatcattggaagatattcgacatgttctcaacccaaggtttacaacagagcaggttcgtaatcttgataggaacaagcagtggtctagagctcttgatggctccaattatctacctggaatggttggtctaaacaacatcaaggagacagattttgtgaatgtcacaatacagtcattaatgagaattactcctttaagaaatttctttctcatccctgaaaattatcggcatagcaaatccccattggttcatcgatttggagaactaactcgcaaaatctggcatgcaaggaacttcaagggccaggttagtccacatgagtttctgcaagcagttatgaaggccagtgataagaggttccagattggcttcccgcgccgccgctcgccgccggtggacgccgacctgctgccgcgccttcgcctcgccgctggccagagttcgccatggcgcgtcctcctccagtccctggccctcgtcgtcacctccggcctctccgcctcggcctcccactcccaccgcggccgcgcgctctcatcccgcctcctcaactccctcctcccccacgccccgcgccgcctcctccccgcgctcctccgcctcctccccggagaccacctcacgcttctcctcctcgtctcctcgaagcaccactcgcactccctgcccgccgcctccgcgctccacgccctcgccgtctcctccggccacctcccgtccgacctccgcatcgccaactccctcctctcgctctacctctccctcggctccccggcgtccgctcgccgcctcctcgccgacatcccccgcccggacgctgtcacctggaacacgctcctccgtgcctgcctccggcttggcctcctccctgccgcccgccgcctgttcgacgaaatgccggagcgggatgtcgtctcgtacaactccatggtggctgggtatgtggctgagggcgacttggccggtgcgaggaatctgttcgatggaatggcgcggagagacgtggtcacgtggaactcgatgatctcggggtattctcggcacggggacatggagaacgccaggaagatgtttgatgcgatgccggagagggatgtcgtgtcatggaactcaatgctggatggatatgcccaggctggggacgtagagatggcgaggttggtgttcgatggcatgccaaagaggagcattgtgtcttggaatgtcattcttgcgttgtatgcaaagctgagggattggcgtgagtgcttggggctttttgatgtgatgatagcagaaggaaacacggagaggtgggataggcttgtgccagatgttctattgcttacgacattgttgacaatgtatgccaagtgtggggtgatggagactgcaagggagatcttcaattcaatgggtgaaaagagtgtcccctcgtggaattcaatgatcatcgggatggtcaggttctacagtattgagccaaagtctgagcattttggctgtatgatggaccttcttggtcgcgccggactgcttgaacaatcagagaatctcattgagaatttgcaagaaggaagatgggatgatgttgagaaagtaaggaaggtgatggaggagaagggggtggagaaggatgcagggttgagcctggtaggatcaagggaaggtggtcatttcattaatgaaagtggagcttcagctccaaggaatgatgtgatgctgtgcatgctgggtgagatgagtgtgcatatgaagcaaccatctgaagggtccaactgcaggaaaagaagcccctctgctccttga

SEQ ID NO: 40679 - DNA, 246 bp, Oryza sativa
  Clone ID: PAT_MRT4530_44098C.1
ttcgactttcatttggatttatttggatttttatttgaattctaaccgaattcaaatcaattttcgcacgtaactatagagcccgagggagccgcggatctaggtgaaggccaagactcgcaagacctcgagcaaggcaagtcaacactattctttgaacatgttgatcccaattgcgaaattgttttgtttacaaataaaattgcatgcaattatgaacatcctacttgtgattataccatgcct

SEQ ID NO: 40680 - DNA, 1301 bp, Oryza sativa
  Clone ID: PAT_MRT4530_44099C.1
atggagacattgccaacccgtggaaggagcaacacgaagaaggtgaaggcgagtgggggcagcacggatgaggcgaggcagctggaggcgaagcgcctgtccttgtactcacggagaaatcacaagcgtagaaccacacaagagatcactttctttgggctcatatggaagagaagcaagaatgacctacgtagcagcaagctcaaggcagatgatgttattcttagaagcagggatggcgtaggctcgccgatgaaaccgacctgctttctctgcttcaagccatatcgatcagacttgatgtatatccgctgcgagagttgcagaaattggtttcatggagatgccctggaacttgaggaaggaaggatagctcaattgatttcgtacagatgctgcagatgtcggaggaggccgttgccgaaatgtcctcattcagatttttactattccaaagtgcctgaaccacaacccgtcagtcaagaaaatgcagatgacatgctctcgagcgaggaagctgctggagcagatggagatccaccgctcgattcatctggaggagttgaaccaactgtagaagaaactgttggtgctaatttctcagcgaacatgaaaagctctgtcccaggaagtgttcaagagactatctatatggatggttcttcccatcctactcatcctgtcagcaagggggttgcgatcgaaaccagccccccccccagtatgatggtttccgggcaatagctgcggagacaggctcattgtatgagcatctaaggcaaaaagaccatcagacaagtgatgatatcatgattaccttggacaaacttcagcagattgctttgcatcatatgaaggatattgcctgccatcaagccaacaatgtagttcaaccatctgatcagagtaattctagggctccagtgccagacacagatgctgctccaccatagttaacggtgctaccaagcaattgatggagcgcgaggatgtaatcaagaatcctgtacaaatggttgtgtttagcaggaaatggtaacttcagtcttctggctgcttcgctggatgcacctgatgcggcatttgtgaattgtgatcagcgctgctgcacctgacgaataattttgttttcctgttgcatctgacgaatgattttgattttcttttgccgcatgactcgaactaaactgatccatgtcaatatgctactactgatgtctaatgaacttgggacagatgtgtatagttaatgttgctgtatctgatactacccccatccattaaaaaaaaaaaaaaaaaaa

SEQ ID NO: 40681 - DNA, 649 bp, Oryza sativa
  Clone ID: PAT_MRT4530_4409C.1
atgtgccgaagatgggtgtgcgcagcgggttggcatcgtccgggacacgaggctaccgcccacctccgcccccgctcccgcccgccgccgctgccgctaccgctcgagctacgcggattgaacctttgcggcgacgaggtgcgactgcgtgccctgagtacgattccggcgaccatcgagggagatggggctatcccgtcgcgtgggggcgctactagacaccacggccaacggcggtgcgcggcttttcgtcgtgacccagctcccttgctgccgtcgcctgttgccgcccacagccgtcgccgcttcagtgcctgccgccgctactcccgcatctccgccgctcgtaggccgccgcaccacacccgcgccttcgccgctcgccgcgtgtgggacgccgtcagcgaggagcagggttggaaatatttcagaaatttcgtgaaccctggcgaggagaccgtggagctcagcccggcgccgccgccgccgccgctccagtgcatgccgccgtcactcctaagtcttcgccgctcgccgcgggagagagagagggagcgtcaaagggctggccacccgccggcaccctctgcccatgttcgagcttcgatcgaccgacgaaatccaaggaacgacgtcattggcttcctca

SEQ ID NO: 40682 - DNA, 458 bp, Oryza sativa
  unsure (1)..(458): unsure at all n locations
  Clone ID: PAT_MRT4530_440C.1
ggttgccctacacatgtggagcattgggcctctctgcatgttctttatggcttttgcgccacagtagcttgatgggaagttctgacattgacaactggattcaagatgcaaaagaatcgatggttggtttttgggatgtgcatgttgggcaaccaatcatttccatcagggatgaactttttgagacattcaaacaaagatctaaacgtgaaatggaaaaacaagaggtccaacaaactgaagaatcattgcgcangatgttgcttgacttttgtgggaacacttcaaatgaaaaaccgccacaagatatgtcagagctagcaatgatggaagattgtcatgaagagatatgagaagggaagcaatgcatccatttaaaggtctttccagtggaaaattaacatgtgcattgtctattcagattgagaagcataaactggctcttctggaggcaatgc

SEQ ID NO: 40683 - DNA, 561 bp, Oryza sativa
  Clone ID: PAT_MRT4530_44100C.1
atgaagaggctgacattcggcgcggaaccggagatggtggacagcgcaagcatagctcaggaggtcatgctgctcctcgcgcggagcggcggcggcggcgccggctatgtcgtcggccacggcggcgaggctccgcgcgtcttcgagtgcaagacgtgcaggcgccggttcccgtcgttccaggcgctcggcggccaccgcgcgagccacaagcggccgcggggtggtggcggtggtggcgcggccgccgccgtagccgccgcggcgggcgagggggaggcgggtgtcgcgctctcgctcgcggcggggacgccggccgtgaaggcctcacgcgcgcacgggtgcgcggtgtgcggcgtggagttcgcgctcgggcaggcgctcggcggccacatgcggcggcaccgcatcgccggcgccgaggccgacgaggcggtgagcgcccgcggcggcgagccggcgcccgagcggaatccacgcgaggcgaggggtgtggttggcttggacctgaacgctgctcccgccgacgacacaggcctcctgctggtagactgcctgtaa

SEQ ID NO: 40684 - DNA, 825 bp, Oryza sativa
  Clone ID: PAT_MRT4530_44101C.1
tctcaagacacattggcctttaccatctttcctcggaaaaatgttaggctaatctgcaatgatgagttgagaatcttttatgccatgactaaaaagattaaaatctctcctgtcaaagccatgataaaacaatggttagaacaactcaagatgataggaccaatagattgcaattctttaatcactcgtattgttgttaaagtcgaagctttggagaatggtgcaatcatagacattccccaacctcactccatcattaacgaggattatcttgtgcaagggcaggcattgaaacatggtccaaatgcctctatgttgttttccttccctagatacacaaatgagatttcgttaactaacccaaaatttcatttgtataagtgccaggcgctaaccattcctctcgccgtcgcgaagtagcagcaacaacagttgcaatacccgctcttagattggagccagcctgggtatacacttggctggaaccaaccgctgccaacatatggagtagggagctcggcgtgggcaagtgcgagtagtggtcagtgggaacatcccatcaacagactctagggaaatattcccaatgaagaccagtccaccagctccagtggaatgcccccacagtccaatgcacgtgactttttcatgtcccaaaattttcgtgacttcgggttgaggtgcagatgtcactcggcaactgggagagttgaatctccggaccagcgagatgacaacatgctaaaccagcatgtccaggagacccacacatgacagtagcacatcaacgaccaattagcgaacatcaacaccaccatgcagcaa

SEQ ID NO: 40685 - DNA, 1309 bp, Oryza sativa
  Clone ID: PAT_MRT4530_44102C.1
agaaagtgtatagaattttttttttttttttttctccttttatttttttttttggattaacaacaacaaactgtaccatatgaacatatatccacagccattaatttgtattacaattggagagggtgcatatatatgtctatcttcatcacacctcaagccgaaaatttgtaaacaaaagaaaaaaaaagatatggataatatacacaagctccttatgatcatgaccaacaaacatatgaatataattacacatgtttaatcacccccaaaaaacaagaaaccccacataaattaatttacaaccgatgaggcgaccatatatatatataggagagagatgaaaggatcaaagggtgaaagaattcaataacaaatgttcttgcatgccaagtgtgtgtatcttgatttttacttactttttgtgcagagactgagagagagtagtgtgatcacattaaccttaatcttgattttaattaccatcagctaagcttagctaagctagcttagctttgctttgcttctggagtgatcactactgcttctccggctcagccgccggcgccgccgcctccgctggcttctcctcctccttcttctcctccaccacctccgtcgacggcgccgccgcctccgcggcggcggcggcgggctcggcgggggccgcctcctcctccttcttctcctcctccacggcgacttcccgggaggtggtctccgccgccgcctccgcctccggctcgggcttgggctcctccttgggaacgaaaggcgcgaccttctccaggatgaaggcgatcgccggggagagcggcgtcgtgccggacttggccaccgcgtcgctcaccggcttggctccggggaaatcaatcttagccaattcctcaaggaacttagtgactgcaggaccgttcttcttgattttgctggctgtttttttgtccttcaacaaagccttaatctcaggaggagatgactcaacaacctccacaaccttgggctctagctctgtcttcttgtcatcaatctccttgccaatctcctccttgttgaatgatttcaagaactcagcagcagcagccttctttccatccttgtcaaagagcttgttgagtccagtgagaaccttggtcttccagacacttgtcatttctctccttcaagaaattaatctctagtactccaaatgaagcaaggaggagaaagagaaagaagagagagatgcctattgcttgtgtgatgtgttgtgtagcttgtgatcaccagcacccaatcaatggtccccccgaattcctgcagcccgggg

SEQ ID NO: 40686 - DNA, 1406 bp, Oryza sativa
  Clone ID: PAT_MRT4530_44103C.1
cattacccctcttaatagtacggcgaaactaaactagcagtagaaaatgaatttgataaatatgatttttctaatgcgcaaatgattaaggctgctagtaataagtttacctcttctacattattttggtggatttatgttagtaacaaacctgaaacttgggatgaattcaaaaccatgatgagaaaacttgtgagttcttatttcaaatgtactattcgtgagaaattagaacatctgaaataaggagatagaactgttagggagtacatccatgaatttaaagtttgtatcatctatagtgatctaaaagagtgcgatgaaaacaaaatgcacagatttttcaaggggcttaattttcatattcaggttgtgcttgctaatgtgatatataatcatattggacatctattcatgtttgctcatagcattgagagtgaaatcaaatgcaagaaagcatgaaaggagcaatgtcttgtgcctcctgttactaacattttacaggaggttcagaacattaaacaaaaggagggagaataatgaacatgtgaaaaaagaggagaagcatgaagcacctataatatttgaagaaagtttgcaaggtaaattcaatggtgctgagataattgaagtagagcaaccattagtggaaccaattgctgagatgcctttgtcattagttaatttacttgctgttccttgtgataaagaagggttgtgtgataatgcttcttcacttatatccatgccacaactagtgaatgaacatgttatttctagtgtttctttgtgtgttgattttaagcatgttgtttagattgctaatgaagtagatgaacgtggattgttatcttctttaattactttgggctatgttcggtttgatgttttttgttagctcaaaaatttgaaggagaaattatttgctaaatctaatttgccatgtccaactaatgctatttttcatatctttggtgaatataatgatgttagaatatatttggtgcatagagtttacatatgttcggatttaaaacctcatgtacataaggataaaacctacaagctacataggaatattattgctaaccaaattatctcgagtttgccttcttttgattggaagaaacaagttgttttaaatggactacgcgaagagcaccatatggaaaaaccaaggacggtttttcatgaaggagaggatgatgtgaccatggctactatggatacaaccgtttctcacatcatggatgaacaagaagatatcaagatcaagtcctccatgtgctggaatccaattcggccacgtgctacactgctgacttcaaacggccgccaaatatgcatacgagctccgttttgggtccacgagtacttgatggaaagctctcggagtcgtctttcca

SEQ ID NO: 40687 - DNA, 125 bp, Oryza sativa
  Clone ID: PAT_MRT4530_44104C.1
ctggatactgatgaattagacataaataaagaggctgagggggcaatctaacatgcgaattgtggaggaacacatgatcagaatgggtgccttgtatgccagggacgaatgaagccactctctag

SEQ ID NO: 40688 - DNA, 309 bp, Oryza sativa
  Clone ID: PAT_MRT4530_44105C.1
atgggggccggcggtgcaacggcggccggcgcctggcggcggaagctgcagctgggaaacacgacgacgagggagaaggggagcacggcggcagcctcgattcgttccgactccctcccatcgccgtcttttccttttcctccaaatccaaccccctcctaccccttctccggcgcggcggcggcggtgacgacaccagagggcggaggcgccgacgctccctcggctcgccaaatgctatgggcaacctggggggcggcgccgaagcgcacgcgcgtcttctcgctcaccgacgacgtccttgtttaa

SEQ ID NO: 40689 - DNA, 361 bp, Oryza sativa
  Clone ID: PAT_MRT4530_44106C.1
gtttggtttgagcccttgggctattgcagactcagcacggacgcccttcttcctgtgcgactgtgtcgcactcccggtcagacgccgatcaggcttaatagacctactgtccttgacaatctctatgtccatctatctctatctatcactgtctctgaatgtcattccgcattctaaaacatgagcgctgaattccatttcttttattggcttttgagaacatatggcttcatggcccagcttcgatctaaaagtatggtcgagagtggccttcctttttttggaaaagcaaggaataattcagaatttgagggtgggacaaccaccatcaggtggaaaaggcctgaaccttttatacaac

SEQ ID NO: 40690 - DNA, 1939 bp, Oryza sativa
  Clone ID: PAT_MRT4530_44107C.1
atgccgcagacaagcgttcttcaagtggttccccattatactagggatggtattggagatcatgcacgagtaattctggattatgtcaagcgcatgcaagctgaagacccagctttcttttatgccatgcaatttattgatgggcatccagtaggtaatatcttttgggctgatgcaagagcaaggatggcgtacaaacactttggggatgccgtattcttggatgactactgcaaaaggaacaagtatcagctcccacttgttgcattcaccggagttaatcaccactgccagcccgtcctatttggttgtgcgatcattggggataactcggaggcttcctttgtttggttatttgagacacttctcttggcaatgtctggtcaccatcctgattctcttaccacggagcatgatagtgccatacaattggctgcccttaaggtccttccccgaactaggcaccgtttctgcaggtggcacatcttgaatgaaacacacgataagttatcacacttatctgatgaatttccgtccttacatgaggagcttgtcaattgtatcaacatgcctgagacaattgatgagtttgaagtaaactttaaggcattaatttctaaggttggcccaggaaatagcgagtggctctattcagtgtataattgccgtcaacattgggtccccgtgtacttgagggatacattttttggtgacgagtcatcaaaggaggagtgtgcaagcaggagttcatttttcgatggttatatcagtgcaaaaactgatccacagtcattcatccagcagtatgaaaaggctctggactgttgttatgagaaggaggtgaaggaagaatttgagacaaagtactcacttccagaaatcaagacatcatctcctattgagaaacaaggcgcagacttatacacgaggcacatacttactgtctttggcacacaaggtgtatcttcacttccttcccagtacattgtaaaaaggtggactaaatatgccatggaaagaagtccagacaagaaaattgatgaagttagcaaagtcaatgagcccaaggaggagcaaaaaagtggtgccgaagatggtgagcaatctcagacatggcgctacaacagtttatgtcgcgaagcacttagatatgctgaagaaggagcatcatcagtagaggtttatattgtagcaatgcaggctcttcaagaggctgcaaacaaggtcaatatggcaaaaagaggtatcggacagagtcatgaattgtcccaaggtaatggcaacaagggaaacaacgtgaacatggcaagttctacatcctcgccacagcttgtgacagtcccggttggactgtgcttgccttcaatggacagctcgaagatatctgcagcagcaaaggatgcaatttttggttccacagacagcagtgatgacgatgagtatgatgaagatgatgacactgacgataacgatgaagatgaggggataaccggtgacgaggggtttggtcaaatagccacctcaaatgaaatggtgtgccttgcatggaagtctggaatgacaaaacgggattcggccgacaatgagcaggccgtgacgatttgggctctaaacgccctccctaatttggtccagaacggactagtgcggaaacttaacggctcgctggttatcctcgtcgcgacgtggaagaaacgcgagctgctggagacgggagacgaagttgtgcggtgcctacatgctataagagcaccgtgaaacacttgagcattgttaatcttggtttgttttggctctttcaggggtttggtcaaatggtcagctcaaatgtgaggttatgtacagaatgagttgttctcttgttaaacgctccacagctcaaaattttgtactctcatttttctcttcttggagagatatctaaaaaaaaaaaaaaaaa

SEQ ID NO: 40691 - DNA, 824 bp, Oryza sativa
  Clone ID: PAT_MRT4530_44108C.1
atggcaacgaccagcgcctgctgctaccgcccgctctccgcgccgccgctccaccgccggcgcggcccgccgccgcagcagcagcagctgcgaaccgcagtgggagggccacggccacggccgagcttgcaggttgcggcggcggcggcgaccggcggtgggcagtccgtgaaggcggccacggacgccgagttcttccagacctccgacacaaggcccatcatgctcttcgacggtgtgtgcaacctctgcaacggcggcgtccggttcgtccaggagcatgaccccaacaggttgggccttagcgaatccgggaggaagctccttcagaggtcagggagagcccctgatgacatctcgagtgtggttcttgtcgagaaggacaggtcctacatcaagtctgaagcagtgctgaggataatggggtatctcaacctgccttttcctcagctagccaccttcctcaactttgtccctctgttcctgagggacttcgcgtacgacaatgttgcagacaaccggtacgcagtgtttggtcgctcggagtcagagtcatggatgatcaagatcggccagccttcattgttgcaggtctcttcccatgccgccaggaacgccttctttgcagagaagatgcatgggaaggtaacgaatccaagacaaactgctatttagcatagcagtatgtctaaaaatggtaacagcgtggagcattagctgccaaggtttatgaaaaaacaacttttggaaccaaaaaaaaaaaaaaaaaaaaaaaaaaaaaaaaaaaaaaaaaaaaaaaaaaaaaaaaaaaaaaaaaaaataag

SEQ ID NO: 40692 - DNA, 174 bp, Oryza sativa
  Clone ID: PAT_MRT4530_44109C.1
gagcagagctatacattcagcccaaatactggagtagcaagcaggaggaaagatcgggtgaactcacatggagtcggcctcgagcaccttgatgaaagctttaccacggtcggctcggacggctgggtgtcctcacctgcatccatgctgccattgctctgggatgtgccatag

SEQ ID NO: 40693 - DNA, 669 bp, Oryza sativa
  Clone ID: PAT_MRT4530_4410C.1
atgggcctcaacccctccaagcgcgtggacgccgcgctccggggcgcgccggcgttcgccgccgcttgcgacgacgccttcggccgctgcctcgccgacgcccagtacgccttcgccggcgtccgcccctaccagctcgccgacgcgtccgcgcacctccactcgtcgctccggggctccctcccgctcgtccgccgctgggtgccctcgccgccgccgcgcgcccgcgtcgactccgcgctgcgcgccgcggggctcgaggacgcggcggtgctctcgaggggccagttcagggagttcgccgccgagctgttcagggaggccgtgctcgccggcgcggcccaggcggctctcgtccgcgccccggcaggcgccgccgggctcgtcggtgttggcctcgcgacccgcgccggggccggggtggtagggaggtgtacatttgttcccttcatcaagcttcagctgcagaatatccaaaatttcagggcctctctaagctctcttcctgatacgggcagtaactgcggtgggcgtggcatagtgggcgcgtgtggcctccacgagcagtgcacggttgaaatgtatgatggcctgctcgttgaatgtggcgaccaatcgggctcgcgcatgcatgatggtggcctacgcaaggaggacactcgtccatga

SEQ ID NO: 40694 - DNA, 4623 bp, Oryza sativa
  Clone ID: PAT_MRT4530_44110C.1
atggctgataccggcggtgggggcgaaaaagggaccatcggtgagaaggttacccgcccgaagccgctcgatgtcgtcttggttgatcaacagcttgctttggctggaggctctggtttggcagatgcatcacgtgaagaggatttccgtcagaaaccagtagaatctcagggtggttccaagtctttacaaggtcctgctgcgtttacagaaggtccagttgatgaggaggatgatgacgctgttgaagtgatcctggaagaggaagaagtgcagaaggcagggcaattgactgttttagccagattctactcgatgaggtttcctaatcctgttgctctgtttgaagacatgagaagggcttggagacttcgggcagagatgagctacaagtcactaaaggacaatctgtttatcatcactttctctaatgaaggggattatctgtttgtgctccaaggggggccctggctgcatcgtggtgatgcgattttggtcgctgagtttgacggtttaaccaatccatcaatggtgccattggatactgtacccatctgggtacgtgtttatgaccttcccctagttatgatgaacaaggctagaggtgatttgtatggaagtaagatcgggaaggtccgagaggttgatgttgatgcgttcgggagtaacagacatgacttctttcgtatccgagttgatttaccagtcaacaagcccctaaaaacaaagttggatattaaaatcaagattaatgggaaggaagagacacgcaagttcaatgtgagatatgagagggtccctcatttttgcttctcttgtgggtttattggccactctgacaaggaatgtgcaaagcaggtgtcgaacgaggatgtgcctttccccttctcagctgaccttcgttgttcgcctctaaaaccttttgagaggaaggtgagcagggtcaaagcattgcagaatatgggggtatcgaggaagctggttttcagaggggctggcagtgcaagctcttcttcaaaagggcacaaggttgaaagcgttcatgctacagatctcccttcgcgagttgatgcatttgatgtctttgatcatagggaagggaagggtgatgaaagagtagatgatcttcttgccagccagactaatttgatgcatgtgtcggacatgaatagcttggggcagtgccaacagaaggaagggatgcagcttaagaaggttcaggctggtgcactggattcaattgaggagagctccatggaagatacatgcagtccaatcaagagaaagaacctggacagttcatctgtcagaagggtgggcaaggtgcaacaggcgctgttgcagtacgagcagcacgggggaaaccaagatctggagcagaaaaaggtaggggactcgacaagggcactgaagcgctctaggaaggaggcgggaagagggaccgagaaggatgacatggaagcaaccaacccaggggctgctgatcttggttttaaagggctcccccatacgtatgataactgtagagatggttggagtaatgtgaaagtgaggttggatcttgcagtagcaaacgataggtggagggacatattcacagcagcacaggtaaaggagaaccttcaggttagtagaaaatgtctgcattatgaaatcatctgggaaagagaaccagagattagccaaattgttgaggaggcctggtctattgcgggtggcaaaggtgatctaggggaagctactgatcatatgaatgagctgctatatagagaagaaatgttgtggttacaaggatctagagttaactggcttaaggagggtgatcggaatactcgattcttccacagccgagctgtctggagagcaaaaaagaaccgtatttccaagttgagggatagtgatggaactgttcataacacgacaaaggaaatggagacaatggaaacggattacttcaaaggaatgttcactgccgaccccaatatatctcctgatagagtcactcacttgatccagcagaggattacagatgaaatgaatgacaaattgtgtgtgggatttactgatgaggagattgccacggcggtgtttcagattggacccctgaaggcgctagggcccgacgggttcccagtgcgtttttatcaatgtaattggaatatcgttaagcaggatattatggctgcagttaggagattctttcacactggatctatgccatcgggagttaacgaaacggtcattgtcctcatcccaaaaattgatcaacctgttggattgaaggattttagaccgataagtctttgtaatgtggtatacaaagtggtctccaaatgcttggttaatcggttgaggttatgtttagatgatttagtctcagatgagcaaagtgcattcgtgctagggcgtctgataacagataatgcactgctggcctttgagtgcttccattcaattcagaagaacaagcagccaaataaagctatgtgtgcttacaaacttgatctgtcaaaagcgtacgatagagtggattggcaatttctggaaacagcaatgactagaatgggttttgctcacaagtgggttaactggattatggcatgtgtaaccacggtgagatactctgttaaattcaatggaaccctcatcgagtcatttgcgccctccaggggtctgtgccagggagaccctctctcgcccttcctctttttgttcgtggctgacgggctctctcttgtcttgaaagagaaggtggcgcacaatgatctttctcctctgcatgtttgtcgcaatgcgccgggtatctcacacctgctttttgccgacaatacactcctgtttttcaaggcaaaccagcagcaggcgcaagtgtttaaggaagtgctaagcaactctgcttgtggtacaggtcagttgattaatccatctaaatgctcgattatgatggggtcttcaacaccacaacctgtccaggccactataaaaaatgtccttcaggttgatagggatagttttgaggagaaatacttgggtttcccaacgcctgaggggagaatgaataaagggaagtttcagagtcttcaagaaaaagtgtggaaaagagtaatccaatggggtgaaaattacttatcaagtggaggtaaggaagtcttgatcaaggcagtccttcaggctataccggtgtatgtcatgggaatattcaagctgcctgattctgtttgcgaagagcttaataagctaacaaagaatttttggtggggggctgagagtggtcatcccagctggagaggaattttgcatgggcttgaactgctgaaacagggtttaatttggagaatcgacaatggtaattcagtgcgagtttggcgggacccgtggattttgagagaacacacaaggaggccgatcacggtgaaggcgaactgtcggatcaaatgggtctctgaactcattacagccgctggcacctgggatgtgaataaaattaatcaacattttctgggtattgatactgatgcaattctgaatattcgtttatctcccagagctgatgatgatttcgtagcatggtaccctgacaaactggggaggttttcagttcatagtgcgtatcatcttgcagtcagcttaaagaacaaagaggagggctcgagctcttctgctgccaacagtaagagatcctgggacttaatctggaaatgtaacgtcccccaaaaaataaggatttttgcatggaaagtggcctctaatagtttagcaactctggataataaaagaaaaaggaaattggaggtgaatgatgagtgtgctatatgcgagagggagaaggaggactctgcacatgccttatgcaggtgccctcatgcgaggcaactctggctggcaatgcgtcaagctgggaatattacactcagtatggataatgttcatggaagtggttcatggctatttgattgcctggagcaaatatctgagggagacagaaccatgttcttgatgatactgtggcatatctggtttattcgtaatgaaataatgcatgacaacacctcctggcaaacctggaaaaaggaaaacatgtggttcagtttcctgttctgcatgcagtggctcgtcagaccaccggatgcacactgggagaaaccaagaagtggttggatgaaattaaacgttgatggctcatttgatcctctcctggaacgagggggtattgggatggtattacgaaatgatagtggaaatgtcattttctcttcctgcagggccatcggacgttgcagtggggagttagaagctaagctctgtgccatcgcagaaggagttgtgctggcgatccaatggactctgctccccctgatagttgaaacagattgcctggaggcaagtcagctaattcaatccaaggctggggacctatcagcccatgcttacgtaatcagagagattaaatatctgctgtcggatcagcgggctttcgtcgtcaagaagattcatcggagtcagaatcgggttagccatgcgttagcgaataaagctcggtctgagaatgtttctgatttctggttggaagggtcttgtaactttatatcacagataatctatgatgacgctaaatttgagtaa

SEQ ID NO: 40695 - DNA, 350 bp, Oryza sativa
  Clone ID: PAT_MRT4530_44111C.1
gattgaagctcaatgatagtataccaaacggggggacacactatacacacgaaacatgcttcgagaatgaatcagattacactcacatggctgatgattgctgacacataacatggaagcagagtaccccattctataccaaaaggtacagctaaaccagtcctaactctgcagatggctgaatactaacacccaaagcttctgcattatggacaggatctagagaaaagaattctagtcagtattcggacccacaggatgatcgaactccatggatactacgacttggtcctggaggacccacaggctgaggtggcgccggccccgacgatgttctggtggtagaacgc

SEQ ID NO: 40696 - DNA, 369 bp, Oryza sativa
  Clone ID: PAT_MRT4530_44112C.1
tttttttttttttttttttttttttttttttttttttttttttttttttttttttttttttttttttttttttttttaaaaaaaacccgcgggattgggggcccacgtacggggggccccccccgttttaaacgacgggacacgctcggtttatgggggggtattattattttcctcgaaacaatttaggggggggatatatataggcctttttccgtttaaaattggaagaatttttagcaacggtaaaattcggtaaaaaggtaaggaatttaaacccatatttttggctagatttattaacatctttttgaaattgggcaattcttgaaaggcttacctagggaaacgggggaaggagtttgcctg

SEQ ID NO: 40697 - DNA, 153 bp, Oryza sativa
  Clone ID: PAT_MRT4530_44113C.1
atgatgcaaagttcaggtggcgccaaatccatcgctagggatcttggggtttcaaatccgccacgaccgagcaacaaggacgactacgtggcgctctccatcctccctcgtcgtgaccccaagcaagaggaggtgcagcaggacgctccctaa

SEQ ID NO: 40698 - DNA, 438 bp, Oryza sativa
  Clone ID: PAT_MRT4530_44114C.1
atgctcatcgagttctttcccttcacgatagagctgcgcctggcagagccgacagcggacggcagaggcccggcgctacggctgcagacggcggaggcgcagcccggctacggtggacggcggcggcgccggtgccgacgcgacgagccggcgacggcggaagcgcggcgctgtggccgcggatggcggaggcgtggcccggcgacagtggacggcggtggcgccgacgcggcaagccggcgacggcggaagcgcggcgtggcggccgcggacgacggaggcgcggcccggcgacggtggacgacggtggcgctgacgcggcgagccggcgacgacgcagccacgcaggagagagcgagcagaatcagggcttggggaggcggcgctggtggtgtggactgtggaatttggttcgctcgatgcaggctggggatttga

SEQ ID NO: 40699 - DNA, 402 bp, Oryza sativa
  Clone ID: PAT_MRT4530_44115C.1
ggaaatgcaacctggcagtgatggtagaggggggggtacagggacctctcttagcatatgagctgacattgtgctctccactgaaaatatgattgacatgcacatatcatgtatggcctattgtgtccacgagtcatactctcagatactaccatactctggtcacccatattacatgggggggggcgaattttcaaaatgatgtagagaaaatcgatgtattgtacctctcaggaaaaaaaaatcgatgtattgtcttttaagcttatacaagttactagcattgtacaattttcaaatgttgtagagaaaattgatgtattttacaggatcggtctgttcgataaacaaatgatttcttctgccattctggtatatataaatatttccattgatctatgt

SEQ ID NO: 40700 - DNA, 783 bp, Oryza sativa
  Clone ID: PAT_MRT4530_44116C.1
atgcacaactgccggatccgagccctggaaacgaaggcccgtggaatgcgtatgattctccgcccccaaaagaagatgcaatcaaacaacaaagcacaggagagagggagagaaccgaacatgaggatgttgctgtattacctgagattgctgggtgctagctccgatggaatggcgcaaaagattgagatgagcgcggggagaggagtgattcacgaggcgtcgttgcgctttgggggctctgggacccacctgtcctgtacctcaccacagttgaagccaaaagaggcgtggacctggtccacagagccagaaaccccagttgcctcagccggtggtacatactgccatggacagcgtccagccatcggtaactggtgtgtgcctgacaggtggggccaagcgtgcgcggtaaccgagacggcgacgaacggtcagacgaggagcgcttggctctcctgtgggctgtcgccgcggcagcggagtccatggctcgcggctgcgtccgtccgtccacctgcgctacgcgccccacgtcgtctcgtctgcaagccgagagcgccacgacgcggccgcgccacggtctcgctctcgctctcgcggccgctacactcgttgtcgtcacggggagcggcacccgtggccgtgtgggggaacaagctcgtcacggctcacggccgcgtcgcgctcggtcgcttccgttctggagtaaatttgcgtcggtccgggtcacaggctacagtggaattacccaacgacggggatcatggatcacggctataa

SEQ ID NO: 40701 - DNA, 260 bp, Oryza sativa
  unsure (1)..(260): unsure at all n locations
  Clone ID: PAT_MRT4530_44117C.1
cctctagctctagctctagctcgtcgccgccatgaacgttccaagcaaatgcatggctcctgcaaagtaaaaaaagaagaagaagcagcagctnagcttctcttcagtatcgatctttaactgtatcgantagttaggttagnttagctctctgcataacttgtgctcactgncttagctagctagttcttgctgtgtnctgagtagctctagctcctcgtcgtcgtcgtcgcgtcgtcgtcgcggcgcggtggtggtgt

SEQ ID NO: 40702 - DNA, 1564 bp, Oryza sativa
  Clone ID: PAT_MRT4530_44118C.1
tttgttcgcgtccgcaaagaaactagtctacgccgccgcctcgccaacctccccacgccggccaccgccgcacgggctccggcgacgaacgagggcgctgctctcgagcgcgatggggggccggaagcgcgcgctgctggtgggcatcaactacccgggcaccaaggcggagctcaaggggtgccacaacgacgtggcccgcatgcgccgcgccctcgtcgaccgcttcggcttcgacgaggccgacatccgcgtcctcgccgacgccgaccggtcggcgccgcagcccacgggggccaacatccgccgggagctcgcgcgcctcgtcggcgacgcccgccccggggacttcctcttcttccactacagcggccacgggacgcggctgccggcggagaccggccaggacgacgacaccggctacgacgagtgcatcgtgccctccgacatgaacctcatcacagaccaagatttcacagaactcgttcaaaaggtcccagatgactgcttattcaccatagtatctgactcctgccacagcggtggtctacttgacaagaccaaggagcagattgggcacagcaccaagcagaaccaggcccagcagatcaagcgagaagaacgttctgactctggcaccggcggtttccgatccttcctcaaagaaaccctcaaagaaacagtccgggacgcgttcgagtctcgaggagttcacatccctcaccagagcagccgccgcaacgacgacgaggatgaggagccacacatgggctcatcctcccatggtggcgatcgcatcaagaaccggtcattgcccctctcgacgttgattgagatgctcaaggagaagaccggcaaggacgacattgacgttggctcgatccggatgacgctgttcagcctcttcggtgacgacgcgagccccaagatcaagaagttcatgaaggtcatgctgaccaagctccaggagggccagcacggcggcgtgatgggcttggtgggcgccctggcgcaggagttcatgaaggctaagctggagggcaaccaggaggcggacgccctcgagccggccatgaaacaggaggtgcacagcgtccacgaggcgtacgccggcacgacggcgagggtgagcaatggcgtgctgattagcgggtgccagaccgaccagacatcggcggacgccacgacgcccaagggcgtgtcctacggcgcgctcagcaacgccatccagaccatcctgtcggagaagagcggcagggtgacgaacaaggagctcgtgctgagagcgcgcgagttgttgtccaagcaagggtacacccagcagcctggcctttactgcagtgacaagcacaccagtgtggccttcatatgctgagagcctggaacatcagctgtgctgcgtggattgctacatatgcgagaatcttccctttcccctttgatgttttacattgttatggagtatggagtctatttgttttttaaatgaaagacaacatggagagtggtcgactgttaatatcaagagaagatgttacaaaatgacaaaaaaaaaaaaaaaaag

SEQ ID NO: 40703 - DNA, 292 bp, Oryza sativa
  Clone ID: PAT_MRT4530_44119C.1
cccacgcgtccgctgatccacaattcccaattctctctctcattcctcatcctaatttttcggatctagcaattcgcatccacagcagcggtgagaggagcaacaccagtgacatcgacggtctccggtgagcaggcaacgacggccgacggaagcctccaatacacaagcggcgggatccaggcactaggcgaggacttgctggcgtggagcaagtagtgcccacgggatctgatcggcggtggcctccggctacttcgctttccgcctaaaccgccggtgcccaatgtct

SEQ ID NO: 40704 - DNA, 447 bp, Oryza sativa
  Clone ID: PAT_MRT4530_4411C.1
atggggaacatcctcaagtgcttcatcagttgcttcgacggagaagacgaagatggtggtagtggccatggtcgcttccccaacagctatcctccggtctcaagtctccattaccagcctctgcatttggatgaccttcaagtgccattatcgcctccaccaccatcaactaggcagcagcagccgccaccgcgaccggcgctctcaagactccattaccagcctctacgtttggctgaccttcaagtgccattatcacctccaccaccatcaactaggcagcagcagctgccaccgcgaccggcacgtcctcttggttaccatcatggagtcctctggccgacgatagagatcaccccatgcgatgacttcctcaacttagaattcacaactaagggttgtcacccgatgactttggagtgcatagttttatttagcaagtcataa

SEQ ID NO: 40705 - DNA, 493 bp, Oryza sativa
  Clone ID: PAT_MRT4530_44120C.1
aggggcgcttggatttccccttaaaattggaaccggttcccgggggcggggggcgtcccctaaaatggggcccgttaccgggggggggacccatggtcctaaatgggggctgggaaaaaatgggggccgataacaaggccaaaccttttccggggggaaaatttaaagcgtaaaaaatggggcgccaaaaaagggccggaaccaaaaaaaataaagccggggggcccgaccggtttcccccccccaaacttgtgggggcggccccattgacgaatttcccaacggaaaagggggggggccctgtgaattaaaaaacccgccccccccccgtgaaaccggggatactgattaggccccaaggggtttttccttttggcccggaaagagggaaaaaaggggtgccccttaccgtggggccccaagaaaaaatcctaaggggggccgttttgggtggcccaaaaaagaaaaatcctttgggtgggggggaaccccg

SEQ ID NO: 40706 - DNA, 305 bp, Oryza sativa
  Clone ID: PAT_MRT4530_44121C.1
tttttgccgtttttcccttttcggttttttttttttttctcttttttttttttttgtccaataattttttatcccatcccatgaccggaccatttacacgaagcggtttaagattttgataaaccgcctatgtgaagagtctcagcactcttgatgctcttccctatcccgggagagacaaaatcaacgtggaacaagggggctttggtcccatgctgtggtctcagggggccatgtccccctggaagaaaatgccacgggggcacgtgaacttgcactatatgatggccaaggggtccatagaa

SEQ ID NO: 40707 - DNA, 1840 bp, Oryza sativa
  Clone ID: PAT_MRT4530_44122C.1
ctccccaacctcccgccgccgccgccgccgcatccgcatggagcccgacgccgcagcggccgcggccgccggcgagagggaggcggagatcgagaaggccttccgcgcccgcctccccgacttcaggaagcaggccgactccttaaccctcgaaggtgtaaggagagcactggagaaggacatgggcttggagaaacattcacttgacgcccataaaaagttcataaagcaatgtgtagacaaggttttttctggttctgatgatgacaatacgaataataatgcaccagagaaggatgaagctaaagatgaccgttcttctaaagaagaatcagaagatgcccaaccaacatctgactcgaacaaaatttcctccaatgctgatgagccggtggcaaaatccagtgagacagatagagatcaggagggagacaaagatcatagttctggcagtgacattagtgaagctacgataaaaaatgctattgtcaaaagggcctcatattttagagagaactcagaaactattactttacaaggagttcgccggactttagaagaagatctcaagcttcagaagaaagctttggatgcttacaagtcttttatttcgacggaattagacaatattcttcaagaacctgcaaatgggacaaagaaaactagtaaaactgaatctcataaggattctggccagaagacaagcaaaaactctaagagagctcgtcaagactctgatacttctgaaataaatgatagccattgtgagaggggagacagtgatgaggatgcaaggccaaaaaagaaaaaggctgaaaagggcaaagctgtaaaaaggcagaaaaaaactacagtggagaaacaactgtcaaattcaaaggctaaaaaggttgccaaaaaagatttagataaaagtaaagagcggagtggatcagaagaagataattcaaattcatcagctgaagaagataataagaaaaaacgacaagtagctccagcttacgggaaacgggtggaacggctgaagtcaataatcaaatcttgtggaatgagtatcgcacctactgtgtatcggaaggcaaagatggctcctgagagcaagcgtgaagcctgtttgataaaggagttggaggatatacttgaaaaagaaggattgtcaacaaacccctctgaaaaagaaattaaagcagtcaagaaaagaaaggaaagagcaaaggaactcgagggcatagatatgagcaacattatcacaagttctcgtcggagaagtacatcgaatttcatacccctgccaacgcctaaaatagtagctgatagtgatgaagatgacgaagaagacccacgcgtccgcaatgatgaggaggtgaatgtggagggtggagatgaaggtgacaatgatgttggaaaagctggcgatggatctgctgatgatgctgagcacgacagtgattgattcttgcggtttctaaggtggaagcaggcaattctgaccatgcaagttcatctcatgttgatttggcctagacgcctagttggctgtccgtgcgtggatggaggcagttgttcagaagtttaacttatgagtttattctgtttattcgaaacatattctttagctctagcgttggtgaaacattagcgcagatgattcttgtagctcccatctcattattatgtataatatatatcaggtttgttatctgaattttcgatcgtgtattcctgtagactctagtttgaaagcggcgtgacattcctgtatcggacagttattttattagttcatcacttatagtgttattttagaggaggaaaaaaaaaaaaaaatttactatttcaa

SEQ ID NO: 40708 - DNA, 558 bp, Oryza sativa
  Clone ID: PAT_MRT4530_44123C.1
aacgggcccaaccaaaaggcaaaataaacgaacccatggggggaaacattcttggctaaaaaaaaataaaaaggctaaaaataaaaaacaaacttggagggtaaaaacttgaaaaaaaactttaaactttgcagggaaagggaaagaggcttaaaaaaaaaggctcatgcccaggtcaccatgggaccccccctggggctcttccttttttttttccccctggggagccgagggaacaacaacaccactggggggggaaacgggggcaaaaacaaaaaactgggggggggctttaaaaaaccccttgatcttaaaaaaaggggggaacaaatattgggtccccaaaaaaaaaaaaagcacatttttggacccatggaggaacagggggggggcaaaaaaaaaagttgggaacaaaattgccagggaaactggggcacccataaaaaccccaaaagcaaacttctccataagggcatcctcagggagggcaagcccctcagggctgaaaaccgacccactggcaaaaacattggaaaaaaccagcccaaatgaaaaggg

SEQ ID NO: 40709 - DNA, 1163 bp, Oryza sativa
  unsure (1)..(1163): unsure at all n locations
  Clone ID: PAT_MRT4530_44124C.1
aaccaatccccgactcccacgcctctctctgctgctctcccttgcccccgaatggcgatactgccgccggctgcggctgcggctgcggcggaggacgtcctctcgctgtacgacgcgtgctggttccgccgcctcgtgctcctctcgccctcttctcctgctgctgttgctgcggacgtcgcgcctgcctctccgccggtggcgtcgcagcgggaggaggaggaggaggaggaggaggaggaggagagggaggtgaagagatctccgccggggacgctgcggcaccggcggacgcggagcgacgaggcggcgacggcggcgttggacggcctcgagccgctcaggatcccgaacggccaccgggccaggctcgagacgatcctgtccgggaaggacgggctggcggccgccttgccgcagcctcagccgatggcggagcggaggagggcggcggtgcggcggcccggggggaggcggcggcggcagcggcgcgggcggagcatgtcggagctggagttcgaggaggtgaaggggctgcaagacctcgggttcaccttctccgaggacgacgtcgacgccgagctcgcctccatcgtgcctgggctccggcggcggcgctccgacgaggacgacgccagagaggccccggctgccgcggcggcgtccgccgaggaggaagcagccagcagtcgccggatcggctctgctccggccggcacctcatcgtcgttctcctcggcgccgaggaggccgtacctgtcggaggcgtgggacgatgaggaggaggagatgaggaggatgctgcgcaactggaggatcccgccggccggcgacggcgacggcgccgacctcaaggagcaactccgcctctgggcccacaccgttgcctctgccgtccggtgaatggtttcccctttcgtcagttntgaccaaccactccgacactctgttcattaattactcaaaatatcacaactgtaaatattcttcgatgttataaactcaaaatgtatagtgtaaatatcacgagttagtgtaatttctttgcttttggttcatatatatcacgaaatgtatgtaattcattgagaaaaaagataaagaaggtcctgtttagttctaaagtttttttttaaacttctaacttttcatcgcatcaaatc

SEQ ID NO: 40710 - DNA, 468 bp, Oryza sativa
  Clone ID: PAT_MRT4530_44125C.1
atggcgacggcgaggtggatccagcacccggaggaggatctggccactagggacaaggacgaggcccgtcgcggcggtggtggtgcggagctcacggtggcggtggcaagctggcaggcagcggcggagatcggcgtggggaccgcggcgcgaggaggcacggaggaccggcacggatggaggctgcgtaggccggcaaggcacaggcagtggtggcgacggggttggctgcggcatgaggaggcttggccggtggcggcagtggtggtgccgcaggagtgtcgtggtgcgatcggcaaaggtagtgaccagcgcagcgataggctacaaggtgcggtcggtggtggtaggcagaggctagccggcgagggtcgccggtgcagcgttgcccttgcgccgacagaggttagatggcagtggagcatcggtgcgtcaacaggggataagctggtagtggatggcgggtga

SEQ ID NO: 40711 - DNA, 227 bp, Oryza sativa
  Clone ID: PAT_MRT4530_44126C.1
ggtctacaccctccgtcagaaaagaaaatccaatgtttaaatatacactggattttctttttgacagagggagaaacttttaaatttagctttaaaagtttggtgtggactgaagctgtgaagtaacttgtaaaagcgttctacccatatccgtttctatcttcggtggagataaaactgtttgactaaaaaaaaaaaaaaaaaaaaaaaaaaaaaaaaaaaaaaaa

SEQ ID NO: 40712 - DNA, 564 bp, Oryza sativa
  Clone ID: PAT_MRT4530_44127C.1
atgatccccataccatgcgaataccggaatcgcgacatcaaacgtcgacaggagggcaggagccagcgtgggtcaagctgtcaagttgtatgctctctcaccagcacgagtatctcgcttgtggtcaaggtggcctcgacatatcctcgctcatcaacgacctcaccgtcaaaaataccggaggcttgtgtcatccatccaactgcaactgtacctgggattcccacgccggagaggaagaagagaagatatgagaggggcagtgaggtaaggaaaaaaatatttacagcatcacggtcgggaatctctgctaggtgtttggctccagccatagcccaagatttcgcctcttcctttatcttcgcgattagggccaccgtgtttatcagcatgatgggttcacaggcaacccaagtagcaatggcatcccagattttccttgtatatctgcaatccgccagcagatgtagggatgtctcatctgtgcaccggcaaaggggacaaacgccgttgttttgccagcccctgatcgccagccggtccgaggtccagacccaattttag

SEQ ID NO: 40713 - DNA, 314 bp, Oryza sativa
  unsure (1)..(314): unsure at all n locations
  Clone ID: PAT_MRT4530_44128C.1
attacattatttttacanttannnnnaaaaccaccccaataccccattgattaatttcactgaaaatagcacgggttcttctaataaaacaaattttttctttttttcacccatttttgccaaaacgaccaactttttaattaatttataacacactgttttaatttatcaatatttagcacacacacaaaccacactcatttgggtggtttttattggggactaattaaaataagttactctccccccgcaaatgttccgttttttcttaactttacttgccaaaattacaaggggggcaaaaacaatttttt

SEQ ID NO: 40714 - DNA, 554 bp, Oryza sativa
  Clone ID: PAT_MRT4530_44129C.1
gaaatctctgcatccatatcatctttccatacagcgttgggtttcagcattaccaagtactgctagggcaagcaacatttcagagaatcggcgatgagacaagaaatacaatacaatcagccattatttgttttttccttttacaacaaaacctacaggctagtccccctaaacacgattctactgataaattttattcttctgttagaacgaacattacctacatatgattggaacaaataaacaaaattgtaaatgtgcttctgatcatttctattattttgttagaactgtacagcttgtctccaggaacatttcttaagtatcaatcgctctgttagatgaataactgcagaggacagaatgctgaatgggccattcactttgcgactttcttgccacagctggttcacttcaatccatcatccagcgcaacatatccagctgacatcagctagagagggtgactgataggagcaggcaccatgaacaggtttcctttattgggcaaagctagtggtggttggctcatctgtcaagaagagttatatcat

SEQ ID NO: 40715 - DNA, 501 bp, Oryza sativa
  Clone ID: PAT_MRT4530_4412C.1
atggcgattttgattttgggttttggcgggttagggttccggcgaatggtggtcggctcggctggtctggactcgggatcgacggccggcgatgaaggcggcgactgtagagggcccgcgacggaggaggcgtcggtggagggcgcaccagctgaccacacgggtggagcaggggtgggcattaacggcggcgccgtcgatggcgagcggcgcggtgccgtggatggcgcgtggcggtgctggagcaccaggtggcaatccggtgaccacgtcgccggcggccgcgccctcctctcgccgagcgggtcttcttccccagcccgcgccggaatcgccgacggccacctcctcctcacggctcaggcgcttaaccttgttcctctttggatgggaaaggtggacgaaaggtatcccgtctcgacggcgcaggcgcgcacaggcacagcgcaaggacgcaggaggaggaacagcatgggagcaggcgccgcggggggaagctaa

SEQ ID NO: 40716 - DNA, 376 bp, Oryza sativa
  Clone ID: PAT_MRT4530_44130C.1
ttaacaaccaaatttggtaatttcagtatcggagatggagataaaactgaggcggaatccaagatggaaatcgtttcggaaacagagtaaggatcggctaaagtccgaatcggatgtgaccaggatcggcggaatccgagttggacaaggttagccgattgagccgagtctgacaatgtgatatgtttgggcaaaagtctgccacaaagacttatggtatcttagagtttgttagagataagagtcatgtccgacacggacatattttgaacaaatcaactggcatgctcacgaacctaaaggcaagcttttggacctgcactggagttaagcagatctcccaggcctcgtgtttttacatcaacaatattacgca

SEQ ID NO: 40717 - DNA, 452 bp, Oryza sativa
  Clone ID: PAT_MRT4530_44131C.1
ttggttttttttttttttttgtttttttttttttttttttttttttttttttaaacaacaaagctggggaaggaaattatcctcctccagtccttaagtatactaaaagcttggtttaaaatttaaatgctgggggggcagacccccaaatgattccgggaaagctcactccaggggtggcaaatcaatcaatccctccgggggggggggacccaagtttttgcccagttttgacaaaacctaactttcctttttaacacaaattcccccaaccaaaaacctttctagaacgggataaactaatatttataagcccagatttagcaataaaccccccccccatttaactaatcaaccgggcccatgggctaaaccagggttaggggggcagggaccccaatgtagacctagggggggggggttttaatcatggggtaaaaaaaagggaggaa

SEQ ID NO: 40718 - DNA, 456 bp, Oryza sativa
  Clone ID: PAT_MRT4530_44132C.1
taatcttggatatcaaaagagaacagtgtgttaacaaccaaatttggtaatttcagtatcggagatggagataaaactgacgcagaatccaagatggaaatcatttcggaaacagagaaaggatcggctaaagtccgaatcggctgtgaccaggatcggcggaatccgaggtggacaaggtttgccgattgagccgagtccgacaatgtgatatgtttgggcaaaagtctgccgcaaagacttatagtatcttagagtttgttagagataagagtcgtgtccgacacggacatattttgatcaaatcaactggtacactcatagatccaaaagcaagatttcttggacctgcactggagttaagcagatctcccaggcctcgtgtttttctcatcaacaatattagaagtataggaatagattttctttctattttgcccagcacactcgaagata

SEQ ID NO: 40719 - DNA, 1267 bp, Oryza sativa
  unsure (1)..(1267): unsure at all n locations
  Clone ID: PAT_MRT4530_44133C.1
ttccgctttcgaaaaaaaaaaaaaaaagggcggccgcccttttttttttttttttttttttcactcaggaagtatcaggttcaactattatagcatcaagccatcaacaaacttctgataatacagacattaacggcactttcagttcatctgatcctctcgggagaaaaagtcaaaaagaaaaaaaagcaaccacaggtggctgcatgctctatggaacgatatggagttcactgacttcgagatataacaaagcaagctggtcaaacatgtcatcaacttaaaattggcagcattaactcctacgatcatctggttgcaacccagaacactaagcagaagacttgacggtagcagacttgattatgtccacaaattcaggcttcaatgaagctcctccaacaaggaatccatcaacatcaggtttagcagcaagttctttgcagtttgctccatttacggagcctccgtaaataatcctggttgattcagcaactgcaggactaacattagtcacaagccactttctcagaccatcatgaacctcctgagcctgagcaggggttgcaaccttgccggttccaatggcccaaactggttcatatgccaaaacaacattggtccaatcggatatcttctctgcaatagctttagtttgcgctgcaacaacttccatcgttgttcctgcttctctctgttcaagggtctcaccaatgcaagcaattaccttgataccttgggaaagtgcgtacgcaattttgtcagcaacaaaatcacttgattagcatggaccctctacacgatatcatccaggaacaaacttcactacaaagtacaggtacagcctctctctcagacacagcataaataactgaatttagctccaatttaagccatcccgccactagttgccgtcctgattatctggaacaaggatgatccaatgacgacaaaaatgaagaacccaagcaccatgggtccaacagggtagtcattccccttcttcacagtagtctcaggcactgaacccctcttcgtgatattcttctggaactttgcgctcttcctgtcagcaagacgccttgaggtagtcatcctcgtgaacgccggtgatgaactcgccggagtcgagaggcgttcgcggcggcggagaagccggaggggagagagagagaggcagcaggagcagtgtggggcgatgcgggagtttttttttttttttttttttttttttttttttcgggccggcctcgagnngggtacccaa

SEQ ID NO: 40720 - DNA, 245 bp, Oryza sativa
  Clone ID: PAT_MRT4530_44134C.1
catcatgcccaccactaccaccgtagcattggtgtgctacgggccggtcaacaaggaggtcccgctcaactggtgcgcggcggtcaacgatatttccggctttcacatctactaggtgaagtacatggtggcgcatttacgccagccattggtcaagatccatggcatcacacctccgcgtttgccaggcggtcgtcatagtccatcccaaggactccggcgacttacacgtggagctctattag

SEQ ID NO: 40721 - DNA, 110 bp, Oryza sativa
  Clone ID: PAT_MRT4530_44135C.1
ggcgcggcacggcacggcaacccaacccaccggggtccggagaccggacggggcggaatacggtggcggccgcgcgaaattacgcggctgcccacgctgcgctgcgcgcg

SEQ ID NO: 40722 - DNA, 285 bp, Oryza sativa
  unsure (1)..(285): unsure at all n locations
  Clone ID: PAT_MRT4530_44136C.1
aattatatccaaccaanttcgcataaaggggtattttttaaaaaaagcaaacacccccccacatatacattcatccaatgactcaatcacaatctaacaaccataacacagatcccttccttatataatctaaaatcacactcaaacttacaccatatctagtactcatcacaccaaatttcaaattaaaataaacatacttctgtcataatacaaactctattcaacacttttacatcatccacttaccgatgacatcttagaaatcactttcatagtacaatc

SEQ ID NO: 40723 - DNA, 1195 bp, Oryza sativa
  Clone ID: PAT_MRT4530_44137C.1
atgccgtcgtcgcacggggatctggaccggcagatcgcgcagctgcgggagtgcaagcacctggcggagggggaggtgagggcgctgtgcgagcaggcgaaggccatcctcatggaggagtggaacgtgcagccggtgcggtgccccgtcacggtctgcggcgacatccacggccagttctacgacctcatcgagctcttccgcatcggcggcgaggcgcccgacaccaactacctcttcatgggcgactacgtcgaccgtggctactactcagtggagactgtttcgttgttggtggctttgaaagtacgctacagagatcgaattacaatattgagaggaaatcatgagagcagacaaatcactcaagtgtacggcttctacgatgaatgcttgagaaagtatggaaatgcaaatgtatggaaatactttacagacttgtttgattatttgcctctcacagctcttatagaaaaccaggtgttctgccttcacggtggtctctctccatcattggatactttagataacatccgtgctcttgatcgtatacaagaggttcctcatgaaggacccatgtgtgatcttttgtggtctgacccagatgacagatgcgggtggggaatttcaccgagaggagcaggttatacatttgggcaagatatcgctcaacagtttaaccatacaaatggtctatctctcatctcaagggcacatcaacttgtaatggaaggatttaattggtgtcaggacaagaatgttgtgacggtcttcagtgcaccaaactactgttatcgctgtggtaacatggctgcaattcttgagattggcgaaaacatggatcagaacttcctccaatttgatccagctcctcggcaaattgaaccagacacaacacgcaagactcccgactactttttgtaatttgtggtgttgacaattttaactcacctgtgttgatgctcctctcctccgcggtgtcggggtctgtagatcttctgtccttagatacgggttccacgagcccggctgtatgtctctcaattcttttgtttggagattttgttgctgcttctcaacctttatacaagacgttaaaagttacatgcactggatttttttctccttatgtacttccattttgtattattggtagacagtgaagggaagctgcattaggatcgcccctattaat

SEQ ID NO: 40724 - DNA, 507 bp, Oryza sativa
  Clone ID: PAT_MRT4530_44138C.1
atggcagaggcggcacagagacagtcagcgacggtggagacctccctccctcccatatccggctggaggggggagggtggtagcggcggcggtgtggccctcctctccctctggccggatctttcgctgcatgcagttgcagaggatgccgccggcagcacggcactgcgttgcgacgacgatgacgttgtttttaggatgtgtgctgcctcaccaagtgccgccacctcccctgctccaacgtgctaccagaaggcgctaatgactctcgtgaggctccgttggccgtccacctctcctcgtctccatgtcgagcagtggcaagatgcttccatcccgtcgtcactactgcctcttaatcactccagatctagtgcccccgcctccaccgatggtcccactgccctactccaacccgcggcttcagaggagccattgccgcctcccaacccacatgtgtccattgcccagtactggttcgactaccacccgcagccatccctctaa

SEQ ID NO: 40725 - DNA, 688 bp, Oryza sativa
  Clone ID: PAT_MRT4530_44139C.1
ggtatggtcttcccattcttttacatctcctttttctgagtacacatttaaaagaactagagagttctttaagatgaaactatctttggcaaccatgctgatattcacatctagcttgttttggcattaaaaataatataggaactctatcaagaataaaatctacaaaatgattttacaaacaatatgatgaaaactattgctgttgaaaaagtgcacaaggtaaaactattactcatcgcaaaacaacaggatgggcacactgccacaatgaccttccacattgatccattacaaatatatttgaatgatggcggcttaaaaattgcataatatgactgtcgctctgcaacatataatatatctgttgcgtcaaaaaataagatctgaacaggtttgaagtgactcttaagccagaaagaacaaaagagattctactcctaatccagcacaaatgcttatgtaacaatggcagtaagatttgtttttcacttacaccaatctgttctaagaagtcctgacaaactatttcaggaaatgagatagtcagctatgaaagtccaaagccaacagcgggaatacatcgctttgtctttgtgcttttccgtcaatctgtccaacagaccatttatgcacctggatggcgacaaaattttaacacaagggatttctcggcactttacaacct

SEQ ID NO: 40726 - DNA, 427 bp, Oryza sativa
  Clone ID: PAT_MRT4530_4413C.1
cccacgcgtccgacgagccatttttttgctgtccatctcatcaatcaaacaggtcggaatcaagatagcttgagagaatcacattatggtgagcaaaaataaactaaaaaagaaataacgagaaagatgtaagaagcatcgcatttaagtcgacatggatggaacagggatacaagggagccctcctcactgattgcatgtttgaaactcaggacactccagcccagcaggcttacctgtcaggagcccactacccatatatatatcaaacatatgcatatttccaaattattcccccataccatacagtaatccaaatccaccaagaagatcaagtcaaattgcccacacatatgttataacgacagagggaagaaattaaaagggaaaggacatgatcagcattcaacatataggaaactaggat

SEQ ID NO: 40727 - DNA, 503 bp, Oryza sativa
  Clone ID: PAT_MRT4530_44140C.1
tctttttgatgatatccccttttttttgacgaccagcatcgggggagctccataaaatgacagctgatccaaaaaagaaactctcgcgatctccatccaagactacaagctttagcattctttctttcagggaagatcaccaaaacattatttttgggaacctaaatatcaaaacctttgaataatgccctactttatgttcaaattaatatcctggccatgtgcgagagacctgaaagggctggtcaccccccatttatacccctatacaaagcccatctactagcgttttggtggtaccatggatgcaggcgattgcggctgtaccataaacttgagcggcaaccagcccttgaacaggccgggatcagccttccctgtgctggttcttatggcggcttttaaccaactgtcgctaagttggtcgctcttagccgcattcctgatgctctacttagagcccgggagttataatagcccactgttatcccccactacaggga

SEQ ID NO: 40728 - DNA, 312 bp, Oryza sativa
  Clone ID: PAT_MRT4530_44141C.1
atggagaacagagaacttaagatgcagaataaagcattgtcgaagcaaaacaaagtgctgatggagcagagcagagagctgatggagctacctgttcttcggcaaaagcacgaagaactgaccaggaggtatgagagcctgactaagaagcgaaacgaagatcagccaagcttaagaagatctggcaagctcaagaaagagaaggaagatcagcaggtcgatttcagaaagagaaggaaaatctggagagggaagatacgagaactcaaggagaagatcaaacagctagagtgctgttgtgtcatactatga

SEQ ID NO: 40729 - DNA, 176 bp, Oryza sativa
  Clone ID: PAT_MRT4530_44142C.1
agttcttcttgtgacacaggaactggtactcaagtgggccactccacacaaggtgagatgggacacctattaatcttggctaaaatgagtaagtaacctgatttctctctttgcgtgggcacattgtgaatctgctgcttaatgtatcacacagatgggctttaattacagtcgat

SEQ ID NO: 40730 - DNA, 787 bp, Oryza sativa
  Clone ID: PAT_MRT4530_44143C.1
cccgaatccgcagcgcgaatttcaaagcagcctcccccccaacctccgatctcccgctccctcgcgtctctctctctctctctcgcgcgcgcgcgcgccatctagggttagggtttcgagaggatcccgctgcttgcgagtcccgaccatgagggtgcacccggcgccgcggaagcgcaccatcgccgtgcagcggcggtgcggggtggccgcggcggcggcggggatggccggcgggaagaagctgaggcggctcccgcacatcttcgccaaggtgctcgagctcccgttcgccgcggacgccgacgtctccgtggagggagacgccgcggcgctccggttcgtggccgcggcggacgggttcaccccgtccggcggcgccagcgcccacgccgtcgagatccacccgggggtcaccaaggttgtcgtgcgggacctctccgccgggctcgacggcgacgacggcgccgtgttcgagctcgatcggtggcggttccgcctccccccgtgcacgctccccgccatggccaccgccacctacgccgacggcgagctcgtcgtcaccgtccccaagggcgccgcccctgacgacgacggcgatggcgccgccgccgccgtgcttggaggctccggcgtcgtcgagagcgtcctgctgcttgtatagtatacttgagcaccagtaatttccactgtttttgctcactcttgcatgtttttaatatttgtatggtaataacatatggcagtaagggtaacaaataatgtatatgaatcactatttgctctg

SEQ ID NO: 40731 - DNA, 188 bp, Oryza sativa
  Clone ID: PAT_MRT4530_44144C.1
gccctgcctccgtctcgccgatcgcggacctgaagcgccgtatgcccctagcgatcagtatgccaggcggatctggctctgattcgcactggcacagactatcacacgtaagctgagcatgacagggcatcaggcccatggatctcttaaaccggtgcaccgttatccaaactgctggctgtagaagc

SEQ ID NO: 40732 - DNA, 1219 bp, Oryza sativa
  Clone ID: PAT_MRT4530_44145C.1
ggaagaacattcaatctatttccctttttggtaaaaatgtgtctggttacaatcggatataatcaattgtacaacaaacaaaaaatacatcaactagaatacgcttgacgatatgtatatatccctttctcagatgatgaaaacatgggggaacatctgtgtctgttttccaatgcagcgctgttctattctgcatcaacgaaaatctctatgtctgacaaaggttcgtaaagcttcttttcctgcacggcatacagtgtaattccagaaattttttgcacgcctacttgagtagctaccatactcaagtcaaagttgatggattcaaaagcctcaactagtggcaaaaccaacttctgtaatccattgaccagaacatatttctcttcattaagtacgcttggtgctaaaaatacttcaaaagggccaactgtcttgtctgattggtttgtaaggcataaattaaccataaatggtctttccagaaatatcacaggtggaactttcacagcacgaagatcaacatctttgcttgcagtgggcagacgatggtctgagttgatataggtaattgtatattcctcctccagctctgatgagaatcggttgcttgcacaaatctattaaagttagcaatcgtgaaacaatagggttcataccttgacggtgcgaaccttcgttctaacagaaagtggaattgaatcattgaactgatagaattgaggaagatattcccgaaatcgatcaccctgaataattacaggaggacagacaagcccgagagattgagggagtaggcgggggccgggaggcgcaagggcgtcgacggggtcgcggaggaggaagcggtcgcggaaggtgaagtcgccggggacggtggtggccggcgagtcgagcgggtggaggaggccctggaggaaggcggcggcgtcggcggcggaggaggcggaggggtcgggccccgtgagggcgtcctcggggaggaagacgtcgcgcgggtcgaagcggagcgcggcggcctggtcgggctgcagcgaggggcgggacagccgcatcacgcggaacgccagcgagtggttctgctgcagcagcgcctgcgccggcggcggcggctggtgcgcccccgccggatacggcggctgcgcgccggtgtagggcgacgccatctcgctctcgcgggcagtcgagtcgagactagttgtcctcgtgccgattcctg

SEQ ID NO: 40733 - DNA, 1593 bp, Oryza sativa
  Clone ID: PAT_MRT4530_44146C.1
atgccactgaagaaggtcgcaaaggaaaaggttgcaagacgaaaggagagtgaagcaggagtggagatggcagccgaagaggaagcagagccttcggcgctcgacgccgaagatggtgtggcaccatcgacttcggcccctgcgccgcaacaaccacctttggctcctgccacttcggtggggcaggcgctaaacacagttgatgcggcgaaggcagctgcggcagcaagggcgctccagaccagggcggagaccctttcaacatgtcaactggtggccccccaggctgcttcgccgcagcaggctacatcttcgaccgcgctcaccgccatacaagtcaactccaacctcgaagcgcaagctaaagccgacatgggggccatgcgtcaaaacatggcgcgactccaggacatgcttcgtcagatgcaagagcagcagcaggcatacgaagcggcccggcaagccaaggttgcctcggcccccattctccagtattcgacaggctacatcccaacccaggcctacccacaggcaccgattcaagcccttccgtcacaagtcatgcaagcaccagcgaacttcgccgggcagccttcggccgcaacagtacatccaacccctcatgtacagctacaagttcgaccggtcgctacccaagccttcgcagcaaggtgccgtgagcaaggcggggagcgaaaaagggccgccgctgagtgggggaatcaagattcgcctaatcccacccagttcaagttcccacccgttccgcgatactcgggcgaaacagacccaaaaaagttcctgtccatatacaagtccgcgatcgaagccgctcatggcgacaaaaataccaaggcaaaggtaatctatctcgctctagatggcatcgcccgttcttggtacttcaatttaccagctaataacatttactcatgggagcaattgcgcgatgtttttgtccttaattttcgaggcacctatgaggagccgaagacgcagcaacatctactcggcattcgccagaggccgggggagtcgataagggagtacatgcgtcgcttctcgcaagcccgatgccaagttcaggacataaccgaggcgtctgtcatcaacgccgctttggctgggctgctcgaggtcgaactcacaaggaaaatcgccaacaaggagccgcagacactcgagcacctgcttcgcatcatcgatggatacgcaaggggcgaagaggattccaagcgacggcaagcaatccaagccgagtacaatatggcctctgttgccgctgctcaagcccaagtacaagcacaggtcgccgaaccggcttctctcgccattcgccagcctcagccggtgaaccaaggacaaccaccaaggccaggtcaagctcccatgacttggaggaaattcaaaaccgaccgtgcaggcaaggccgtgatggctgtcgaagaagttcaagccctccgcaaggagttcgacgctcaacaattagcagccatcaacagcccgttcacaagaaggtcagaaaagacctttactgcgcctttcacggacgctcttcgcacaccactgagcaatgccgaaacattcgtgtaa

SEQ ID NO: 40734 - DNA, 236 bp, Oryza sativa
  Clone ID: PAT_MRT4530_44147C.1
gtctattttcaacaagcccaaacccggagagagcgggaggagatccgtacgatgcggcatgctcaccgagcgccggcgatggagaatagcaagggccttgcccgccgctgggcggtggagcttcacgacgccttctactgcttcttctcccactcctgcatccccgacccggccggcttcaccagatccgaccccgacgcggacgacgcccccggcgcgcggtaatggaagaattt

SEQ ID NO: 40735 - DNA, 1682 bp, Oryza sativa
  Clone ID: PAT_MRT4530_44148C.1
cagcaggatggtcatttttttttttttcatgaaccagaattattattatgccacagatcacaatgatacattcagaaagcttcgaatctacgttcctctgttacattaccacagctacaagcataccgtgttacactgtcgggattacaagaaaatgaatataaagtgactagtcacaccctaagcattaaccctaaacctctgagctgaggcaaaaagggatggaaaaaaacataattcacaagctgcctagaaagaacatgaacgatcaaatttttacaaggtaagactgaatctcgagcataagatttcacataggctcaaatccttgtgctattcacttgtgctgaacactaccttgttttcttgatgattgttgaagtgcgcatctcagcgtcttccttggcaaatttccaccagagatatgtgaggggaatagaaatagcaacacaaaatacacggccatcaacatatccccaacgtggtggtatgtcataggtttccaagactattgagaatacgtttccaataatgacaaacaagatcttaaaacatgaaggatgttttgtcatgacagcccataatgcccataggaggaactgagcaaggctagcagcagtgcaaacctttgtgtttaggcctttatcaagttcatagaaattgagatacaaaatatgagttgttgtgaatgccagaattggagctgccaccatcactctggaagcttcatccttcagatttagagttcgcaatattgccaagataagggagtacccaataaaagcagcaaatgatgaataatacaacttttctgtccaaactgtatcacaactgtgatagatggcacgccaaaaccatgcattcatggccagaagaccataaatgtgccataggccagtgtattcatagtatgtcatttgagtttcaggcctaagaggcagcttgtaagaaagcaggaggaaaaaagatagccacccattaaattgtacaaggagagagagcgcggaaagagcagcagaaataggctcctgaaacacagatgcacgcttcataggccatttgccatgatacttaactgaccctaatccaagttgctccctttcactttccctctccatcatacagtggtatctgcattcactcttgcagttccattctttccactgcaagtacaatggttcatgtgcgtaccatgatttatcagcaggatggtcatcagttggaacttggcagtgcctcacggaggtctctcggagggaacccgtcttttcgcattcgtcaacacaggctctgtagagcggatcggcgtcgccctcggacgcacccaacgtcgccaccacggccgctgccgcgaggccgacaagcagcgccacccagcgcgcccggccaatccccatcacctccccctcccctccccccctccgccccccaaactcaggtagacctacacgggcagtggcgggaggagctcgacgaggaggaggagatccgagtccgggagcagaatccggaaggagcgatcgaatcgcgcgcggcgcgggggttcgtcgtgggcggccaccaccggggagcaaatcgacaggggaggggggaggaggggatcgcgagccaacgcggcgtgggattttttttttttctcttcttctcttctttttttgctcctcttttttttcctcgtgccg

SEQ ID NO: 40736 - DNA, 2587 bp, Oryza sativa
  Clone ID: PAT_MRT4530_44149C.1
atggccatcgacactacggctgatcatggcggcggcgccggcgccggcggcgtggacattcccatgcaaatactagtgcagccgccgccgttgccgccgccgacggcgacggcgacggcgaggcaccggagaacgcacaccggcgactcgacggcgtcgtcgtacgagccgcagcggcggccggtggagcaccaggtctcgtccatgcacgccgccaccgcctccgacgacggcggcggcgtcgacgacgtggtgccggagcgcaaggtgacggcgttcgcgctccacgtcgcggtgctcgagaaggccgcgtcgcacgtcggcgccgtctgcttcgtgtgggcgacggtggtcatcctcggcgggttcgccgccgacctcgacgcccgggacttctggctcgtcaccgccatcctcctcgtcgaggggacgagggtgttcagccggagcaacgagctcgatctgcaggagcagccgatgcacctcccggacgccgccgccgccgccgccggagacgacgacgacgacccgccgccgccgcacaaggcggcggcggcggcctcgcccatccacctcctccccctcggcggctggctcgtcgaggcgaggaacgtgagctacgtcctctactggctccagctcctctcggcgtcggcgtgcgtcgcgctgtcgctgctgcgcctcgccacgctccgcttcgccggcgacaatggcggcggcggcaacaagaacgcgtactacgcgctgatgctgttctacgtgctcgcgctgtcggaggcggtgatcttcctggtggagcgcgcgtactgggagtgggtgctcagctatcggcgcctggtcgaggcggtgagcggcgagtgcgacctcggcgacgccggcgtggtgccgatcaagcggttcttctaccgcgccttctcgaggtcggtcgagggcggcatcctcgacgccacgcggatggacctcgtctccttcgccgtcgagctcctctcatcggactccggcgacgagcagctcatcggcgcgcacatcctccggggctccatcgccaaccgcgactcggcgaggcgggcggtgcgcaagatcggcacgtcggcggccaccgtcgagcggctggtggagatggtgagctggaagagccccagcaagcgccgcgtcaggtcgctcgccgccgaggtcgtcctccgcctcgccggcaagcgccgcaacctcatccgcgtcgccaccatccccggcgccatcgagtccatctccaccttactcgagacccccaccaccgacgccgccgccggcgacctcgccatgaacgagatggggctccacatcatgaagaagctggcgcgcgagcacggcaacgcggcgaagatctcgagcacaaggggtgtcctctccaggatcatacacttcacccggacgagcagggcggcgctgcagatctgcgccggcggcgaggggagcctgccggcgaagacggtgctccggtcgctgcaggtggtgaagaacctctcgagcacgccggggcacaccggcgaggcgatcaggagggagatctccgacaacgtgttcgtcctcggcaacatccgcaaggtgctccagcacggcggcgagcgccacggcaagatgcagctgacggcgatcggcgtcctcgccgacctcgccatcgacggcgacgccaaggagaagatcggctgcacgggcgacatgatcgcgcatctgctggacatgttcgccggctcgccggagtcggctccggcggtcgcctacgcggcgcagggggcggcgcacatcaggctgcaggccggcgaggtggtggcgctgctcgccctcgagagcgccgccaactgcgaccggatactccgggaagccgccgtcgtcgagaggctggtgatgacgctgcaccaccccgggctgcagatcacgtcatccagaatcctactgaacctgtgcaggtacagcaggagcgaccacttcttgcagctcagcagcctcactgcagctgtcccaatagtgttcaaagcaattatggttgagaagagcagcttgcttgaggtgtctataggattggcaatacagattacaaggcttgcaacacctgaatttcacaaggaaatctttggaaaggcaggtgtaccagatacagacattgcagggaggctagtggagattctgaaagagcacaggacacccagggtgaaggttccgaggatgagaaggttcgtcatcgagctcgccatcgccatgatgagaggcgacgccgagctcgtccccttcttcaggagcatggagctggagaaggagctcaggagcgtcgtcaggtcgacgtccgagctcgagagcttcaacatgttctctggcagcattgggctgagcaggcacagctcaactctggcctcacttgtagatgatgccatggagatcatgcaggctctgcaagacagttaacaaatgaccacaggacagactgaaaatggtaaatgcctgtgattggttgtatgttgggatatgcgatgaatctaattgtaaattcagaaataatctattcaattgatcagtcaaaactgtaaataacaaaaaaaaaaaaaaaaaaaaa

SEQ ID NO: 40737 - DNA, 257 bp, Oryza sativa
  Clone ID: PAT_MRT4530_4414C.1
aacacgaagaacattgagattggagactttcacgaattcagttagggtcggcctgatcacagacacactaaatacatgtctttgactgcaatccagcacaaacaaagtgataaagtaactataatatttggcagagctcatgtggaaagccaggtaccaatggattccactaactggccagtaacgtaatatcacgccattactgtttcaagtttcagcctcagttggtgttttggcgggcagacgggagagggagg

SEQ ID NO: 40738 - DNA, 1815 bp, Oryza sativa
  Clone ID: PAT_MRT4530_44150C.1
atggcgagcgcagaggcgaaggacggggaggaggtcatgggggagggacgcgagggtgatccagtggacaagataaggaggttactccgtattgctatctacaacattggatatgttgaaggattttttccagatgcctacttcagtgacattgtagttcgagaagatggtttgtgtgatgcactgaagaagaagtatttgaaaacactggtcttttccatctgtgaaaaatacgaaggcccggtgcttcaggaattcattttctcgtttagctaccccagcacaggtcctgatgaagttgtgatgatgatgactcgcacaggaagcaaagtgattacaaagttcgaagcaagtgctgtcaaagtaactcctaatcaaatgaggagctctgcttgtaagatgattcggttgatagttcagcagacaaggacatacccggtacaagaggagcatgctattgaaatgaagctatcgttctacgaggatacaactcctgaagattatgagccaccttttcccaagtattgtgttaacagtgaggatgtagccatatggaacaacaacatcttgaagatggaagtagggaatataaacaacaagcacgttgtgttaacattgaaggttaagagtgcccagtcctactgcaagaacagtatagttgatgattgttctgactatgagatgtgcgaatgcgaaacatatggttacacttcagctcccaatgatgatactgaagaagactatcacacgggaatgctagcatcaccaattaaagcatggtacccacaagacactggaactcaaatgacgcgtaaaaggaaaactggatttgtgctggtatcttcttcaaaaaagatcaagttccttttggattcaggtgcctctcaccatatttgtaatgataaagccatcatgcgcaatttgaaggacgtgaagaaggagtaccaagtttcacttgcttcatgtggtgggttagagctgaaagcggaaatgatgggaactgtggtcacaaaagatatgaaactcagccaagtgggctatatacctgaaatggaattcaatgtcgtatccattggacaattggcagtccaaggtttgataacaacaggcggggatggtcggttcagtgtcattgatgcaaaggaagcgagagtggttggtgaagggcatttacaaagaaaaacagagaaagttgatggcagagtataccatgaatatgtattcaaatcattgatccgggagattgaaggtgatgatgagaagttaattgaacccttgcgggcagatgatgatgaaatcgatgaggaagaggagaagaaatgctgggtaattgacacagggtgcgggagacacatgattccagatattagtatactaacccaagtcaagcgtgaggaggtcacattccaagcagcatgtggaatcgtgtcatcaacccataaaggattggtcaaggagggaaatctcatattgagggatgtgttgtgctgcccaaaagtcacaagaaaaatgatatcaggcccaatgttggatttaagcggccataggttcacttttaacgataagaaatgctgcatagtgcacaaggatgggttggagctgagaggggttggcaaactggatagggcgactagaacgtacttgttgaaacccggtgaagacagtagagcagcagcagcagcaaaagaggagccaaagatgttggcagcagcagcagaaggatatggtggaccaaaacaagaagccgacacgaagaatatgaggggcaaaggcaagaagactgcccaagcaactaagaggctgcgacttagttag

SEQ ID NO: 40739 - DNA, 297 bp, Oryza sativa
  Clone ID: PAT_MRT4530_44151C.1
ccatttttgaagcccaaaacgcttgcctacgaagagatgacaagctactgccgacatttgtagggcattctttaagggtacatcaatctaacattgatttcagaggtagttttgatttgttggtgctctttaactcctgtgtgaccatcctgttagattgtggggcctagttcggcgatttcgtgtaaatttcatcgccggtagatttgatgtaaattcgagtgggtaggcattcatgatcatttgttacagaaaaccacttaatagacaaaatttattcagaaaaaaaaaaaaaaa

SEQ ID NO: 40740 - DNA, 769 bp, Oryza sativa
  Clone ID: PAT_MRT4530_44152C.1
gagattcgctggtggggtttcacgtctatggagtatggacaaggttcaccgaaatttattctggacgtgacggttcgaggcttttgggccgggctggaacttgagagtacagttgttggttcgggccgaaacttagttcggagcaaaacaggtattcaccgcaaactaaataggcatacaaattcaaatcagaagcacgaggattcgtgtaaagcaatttgcttaacgttttgctaaaatcaatcgtgagtgacaaacatgggcaccttttgagtcaattttactaccaacgccaccacgaattgaaagcacccaaaatcatgttctagtatgtatatgtatctatgtataggttcttctgtaagtatttacaaagttcttcttgatgtttggctttatgcacttcaggcgggactagtatgtacacctcccttcaggaactgttaaatcatgttctttttctttgcccggaacatgaaaagctgatctctgtattgagcagcatctttgtagcgttcctcaacagcagcgaccagcatattgcggaccaaatcaaactcttgggcctcaaagcaaggttgatcgtcaggcctgtcaagtcttgtgtattggaattggtctgagcttacatagctctcagatggtgttggttgtacaactttcaatccattgttatacgctatacgcctattcacttgtataggaaccttacaccggaaagcaatgttgatggcatctcatggcttgagatctaagctaatagtctaaa

SEQ ID NO: 40741 - DNA, 3103 bp, Oryza sativa
  unsure (1)..(3103): unsure at all n locations
  Clone ID: PAT_MRT4530_44153C.1
ttttctttgttttctttcttttttccttgggttttttttttaaagcaatttgcttaacgttttgctaaaatcaatcgtgagtgacaaacatgggcaccttttgagtcaattttacaaccaacgccaccacgaattgaaagcacccaaaatcatgttctagtatgtatatgtatctatgtataggttcttctgtaagtatttacaaagttcttcttgatgtttggctttatgcacttcaggcgggactagtatgtacacctcccttaaggaactgttaaatcatgttctttttctttgcccggaacatgaaaagctgatctctgtaggaacatgaaaagctgatctctgtattgagttagaagcagaacctctttttccgaaattgaatattcttttgctggtcggcgtatgcaagcagttcgtccagcctcatcaatgcatcataaagcatcttctttgtagatattagctcggcttccaatgcatcaacacggtgaatggctccattgagcaattcctctctatccggtggcatttgagattgctttgcttcaagctcctgtaatttctcctccaattcaccaagacgtctcaatacagacgaatgtgtactgttttcacgggaaatggcctggcttgatagacttgcagtcactctgcttgggacagaacgaagcacggcaacaaagctcacgattaagactatcaaccacgcagtaattcgatttcgaagtcctcccagttccatcgttatgtttctcaacgagaacgaatctgaattaaaagccattgagctggttgatggaccggcgcatgtgtccacagccttgtcaacaacagggatgtcctctactctgggaggggcaccagatgtggaagtatttcccggcaatttggaagttaagtgtctagggttaatataacatattttcttcccatcaacgcttgatatagcaagaattttccgtccatagtttgcttcaccattaaggaccctctttattatgtcaggatccttccaaggacctttatctgattttatgcaacctccatgttcttcacacctgcatttgccacccagaaaatctggaagttcactctcatcaatagtttcaagtagcttattttggtatttgcttccaaggacatgaatcttcgaagcagtttgtggatcaagaaatgattttattgtaccccataacatcttgaagccttggccagcatttataatgtacaatcggtgcaaggtctctggatagttgtcattgttgatcttctgaagtcgcatgattagctctcttgcatcttttgagaagttcttcaaacccactccttgcacatccaagatagtactgcacgaatctatgtgcctttttgcagcaatggagcaagctggaaacctcatctgcaagcacttctcggactccttgacatgatactttacatatctgtcaatagttgtgacttgtactaatttgttgggatcaacttttccaattagttctatgtagacaggccttccctctttatccacaccatggtaaaattgtggatagcactccagaacatcatctaattcgctatagtcaaattcctctatgttgtcagccccgaactccttcctccatctaagcatttccgaccacatatgttttgctttatcaatatcaaattttcgcgctttcaggaacctcaacatcacgtgataatcatcatgacgttctggcaacaagccctcatcatgtaagcactggtgaaatctttggacagcttccagctccttgacatcccttatgtcctctatagaggctacatggtcgccgaccctccttcttctcttccttctcaaggaacgcctaaatttatttccagcactgatagctcggttcttgaaggagactgccttggcctttttgtcaccttctgagttgtcctcatcggatttccactctttcttatcatcatcatgcacaatgccttcaaaacctgcaccagcatctttgtagcgttcctcaacagcagcgaccagcatattgcggaccaaatcaaactcttgggcctcaaagcaaggttgatcgtcaggcctgtcaagtcttgtgtattggaattggtctgagcttacatagctctcagatggtgttggttgtacaactttcaatccattgttatacgctatacgcctattcacttgtataggaaccttacaccggaaagcaatgttgatggcatctgatggcttgagatctaagctaatagtctcctcttcattgccaatcttagcaagatacaatcgagaatagtatgcatcatggaccatttctgtaatccgcaccaaacgtaccgcatatcccatcctttcggtcatctcctttaccacattataaatagttggccttggaattcgaatgttccgaagggcagccagcaacataatacttggtgtttccatgacgataattggaagcaaaagatcacttccatcttccatcttcagaacaatagcatggtgaggtgcagaatcccgcaatcttaatacccgcgggttgttttggacacatctaaggtttttgccatcacgcattttaatcacaaatccatcggatacacttctgagctcaacagcctccatcacgctggagttgacgaactcctcgccgctggcgtcgtaatccgcggcagcggcgccgtccccgtcggaagacgagccgtaactgcaacaaacaggccagacccagccgcttcgcgcatgccgctcggacgggaaaccgaagaacctgcgcgccgcccggtagtggtctccctgcaacccacaggctcgtctcctcaggtgcacgcgcctaagcagctgcccgctgatcttcgcgtcggaggtcagggcgccggtcgccggagcagcatagcgcgggagaaccggcccgttgatgatctccatccaccgatcctggcggggagaagggcctgaatgcctgatccgagctgaaagacgcaggaatttcggaggattttggtaaagtttttggctcgcaaggtttcagcccgggctcgaaaattttttcccacgcgtccgcggacgcgtgggcgnacgcgtgggcgnacgcgtggg

SEQ ID NO: 40742 - DNA, 229 bp, Oryza sativa
  Clone ID: PAT_MRT4530_44154C.1
acaacacggttgatgtacaggtgaccgctgtcacaagggcagcatccagtggtggatcacccgtggtaggagtgtctttgatggtgagcttcaccaacagcaagatcttgttgatcccccagagactttgcagtggtggtgaaggctcgacgtgaaggatttggcatgggtatccttgcaagaccaatcacacatggctgtcgatagtcagatctccagggaaggcctc

SEQ ID NO: 40743 - DNA, 147 bp, Oryza sativa
  Clone ID: PAT_MRT4530_44155C.1
atggccgcaatctgggagtcccatttctccgccttcctcttcatgctcatcgtcccctcaactccatccacggggaagaaacggggcagagaaaggcgacaacggctatggggttaccggctggcgacgcatccaaagctcaggtag

SEQ ID NO: 40744 - DNA, 1661 bp, Oryza sativa
  Clone ID: PAT_MRT4530_44156C.1
cgattagccacgcctcgctcgctccccctcacccaaaagcccatccagaacctcccccgacatctagggttttcgccgccatgggttcggccgcctccgccgccgcgcctcccccgccgcccacagcgcagccccacatggccgcgccgccgtacggggccggcctcgcggggatcctcccgccgaagccggacggcgaggaggaggggaagaagaaggaggtggagaaggtggactacctcaacctcccctgccccgtgcccttcgaggagatccagcgcgaggccctcatgtcgttgaaacctgaactttttgaaggattgaggtttgacttcactaaaggattaaatcagaagttctcactcagccacagtgtttttatgggttccttagaagttccatctcagtcaactgaaactataaaagttccaacatcacattacgaattcggtgccaattttatagatccaaagttaattcttgtaggaagggtgatgacagatggaagactgaatgctcgtgtgaaatgtgatctgacagatgatcttactctgaaaataaatgcacagcttactcatgagccgcattactcccaaggaatgtttaactttgactacaaggggacagactaccgagctcaatttcaaattggaaataatgcgttctatggggcaaattatattcagagtgttacgccgaacttgtcaatgggaactgaaatattctggcttggccaccaaaggaagtcaggaattggttttgcttctcgatataattcagataaaatggtgggtactctacaggttgccagtactggtatagttgccttgagctatgtccagaaagtttccgagaaggtttcccttgcgtctgacttcatgtataatcacatgtcaagggacgttacttccagctttggttatgactatatgcttaggcagtgccgactaaggggaaaatttgactcaaatggtgttgttgctgcatatttggaagagagattgaacatgggagttaattttcttctttctgcagagattgaccattcaaagaagaactacaagtttggttttggaatgaccgtaggagacatgtatgaaatgaaatcactcacggcaaatcggcaccaccggtggctgtctcgcagaggtttatcaagagctacatcgacactctactccaaatcaagcaacaccctcaagcagatatggagaaggcgaagcatgtggaccggttcagaagtgggagaaaccaagaacaaggtggatgaagctgaaattgatgggtcttttgaagctcaggatgatcggggaggaattggaatgatcctaagagatagtgctggccaagttatttttacatcatggcactctctggattattgcaccgaggtgctggaagctgagtttttagcatccaaagaaggtttatccctaaggatccaatggatgcgcctgctaattgtcgtagagacggactgcagtacggtggtacaacttcttcaggccaaaaccagcgataagtcgggactagcttatatagtcaaagaggcaaaggagctcatgacgggacatagggaaatagtgctcaacaaagttcaccgaagcaagaataatattagttctaatagggctcgttgtgagtccttgttggtattctag

SEQ ID NO: 40745 - DNA, 234 bp, Oryza sativa
  Clone ID: PAT_MRT4530_44157C.1
atggccgagaaattcagatccgtcagagagaagcggctctgcaagccacgaggttcagacgccggcctagctgagatcgtaaaactacgattttactacgtgttggccgtcggaaatctgatcaaggaacgtgttaggctgcaaggtcgcaacgtagcttgtcatgtcacattgtcaaaacaggcctcatgtcttgaagagaccagcaagaggcggcggcaaaatcttcagtaa

SEQ ID NO: 40746 - DNA, 642 bp, Oryza sativa
  Clone ID: PAT_MRT4530_44158C.1
atgaggagaaagggcagtgagtgcacaagaattaccccggagaccaccggcggaggcaagcccacgatctcgctgcaggcgtccagctggtccagccggatggaaccgtcggacccggaccggcggtcgaggctagcgcgcggcgcctgcggctctcgtctgctgaggagcgcgcggtggacggctacgaggttctaccggcgcgcgagggcaagcgtcgcccgggcgttccggccggcgtcgaccaagaaaggccctgccagctgtgccgcgtcgcgttcgccggactgtacgccggcgaggaatagcagtaggcggcattccttggcgccggtggtcgccgatgactcccacaagagcgaagctgtggaggagtgcatcaggttcatgaactcctcgtcaaggaagtaccgggcagatagaaagcggcgcggcgtggcactctccagggcggccgggagaagcagcgacggcggcgtccagggctggtgggggaagcgacggcgtccagggcggggtggggaagcggtggcggcgacgacggcggcgtccagggcgggcgggggaagcggcggcgcccgccgcggctggcaagggaagcggcggcagcgggcgctcgtgctcctcctccgtggcgcctga

SEQ ID NO: 40747 - DNA, 2265 bp, Oryza sativa
  Clone ID: PAT_MRT4530_44159C.1
atgaagctgaagcagctggagggtctcctcggagacctgcagcagttcaccgcacccaaggcggagaatagttttgatgacataactggcaaagtggtggctgactttggctgcgggtgtggcaccctgtctgtggcaagctctctgctggatgctgagcatgttgttggaattgatattgacccgcaatcccttgaacttgctcaagaaaatgctgcagatctagagctggatatcgacttaattcagtgtgatataaagaatttaaatttgagagtaggccttcttgttgacactgttgtcatgaatcctccctttgggacaagcagaaaaggagctgacatggaattcatttctatgggcatgaaggttgccactcgagctgtctattcgctacacaagacttctaccagagaacacatcaagaaggtagccttgcgcaactgcaatgccataagtgccgaggttctatgtgagctccgctacaacctaccacggacatacaagtttcacaaacaaaacgaggttgatatcgccgtcgatttttggcggttcgtgccacgagcccgagacgaagacaaaccaatggatggaacatgcctgcctacatgtatccagcaagcagttcaagtactaactttgaaacgtgttgtgcaatcttcagttactgggtggaataagcagccactgatgcaggaattgacaaaagctctgaaatcagtctcttcagatctgctggaccgattcatcgactccgtgtacaagttttctgagcagccttatctgaatgaggggaattttggacctgtaaacgaaattggtgatgaggttttcattgacgatctcaatggagaggttccaaaagattttcctgagggtgtctatataagaaatggtccaaaccctcttaatgcatcacagacagctgcagagtccatctttggcccaacatcatacatgtattatgaaggacatggaatgttgcatgctatctaccttagcaagagcaatttaggagaatggaggatttcgtacaagaacaaatatgtggacacagacacttttgaattagagagaaagaagaacaaaatagctttccttccatctgctgaaggcgagccatgtgcaacactggttgcttttcttcttaataccgtgagatttggaaagcctgtgaaggacagtgcaaatacttccatatttcagcatgctggacgagcttttgctgccacagaaaatcatctaccttacgaaattgacatcaataatctccgcaccctaggaccttacaacattaatggagcttgggaccaacctttcactagccacccaaagaagatttgtggaagtggagaactcgtgacgatgggaactaatattgaaaaaccccactatgtgcttggagtaatttcctctgatggtgagaggcttcttcacaaggtcgatctcaaattcgaggaaggaaaactcattcatgacatcggagtaactgcacaattcatccaaaatgatatgggcgggatatcacgcattggagtgatgcctaggtttggtgatgctgattccatcatctggtttgatgtggagaatcattgcagttaccatttatttaattgctttgaggatggaaatgaggttgttatcagaggttgtcgaacacttgattcggtactctctagtgcaagtcatgatgacgacaagtcaaaatgttctggaagagcatttctccagccagataagaattcagaaggttttgatccatcagtagatggcactctcttttctcgtccatatgaatggaggctaaacttgaaaagcggaactacaaaagaaggttatcttacagatgagaaagttgcaatggattttcctgttatcaatgaagactttgttggggtcaaaaacaactacggatatgcacaggttgttgactcagtagcaaccagtgaaataggtttattcaagtataataggatagcaaaggtacacttcgacaggcaagataaggaaaacaaacaactgaaatcagtggagtaccacgttttaaaagagaaaaccttctgctctggagttcagtttgttgcaaaggaaaatggaatagatgaagatgatggatggataataacatatgtccatgatgaattaactaatgtgtctcaggtttacattattgatgcaaagagatttgcagaagaaccggtattgaaaatcactttacctcaaagagttccatatgggtttcatggaaattttttctacaagtga

SEQ ID NO: 40748 - DNA, 659 bp, Oryza sativa
  Clone ID: PAT_MRT4530_4415C.1
ggaattcggcacgaggcatcatctcctttacctctgtacgcatataatcagagaaggagctagctcctggatgtatggaacaaaaacacatcactccaccctctgttgctgctgcactactgaattctcatcgctagtttctgcacgtacagaaccagcgagagcaggcctccgaaaccatgccccgctgcgacgtttgcacggacgggcgagcgatcaggattttagggagcgcaaggcgtgactgctcactgttcgtttgcttcatcttcttcttggtaccgtcagtgagagcaaggactgcatccacaatagcaaccaatggcgagaaaggtggcaccgatggagcggagaacatcaacaccaacggtggcaactacaacaataatgcctcatcctcaggagcgttctctaggtcgagggaggttctagcgccaatttggtgtagaagaagaaccctcatgcatcccacaacaacaacaacaatgtcaaacctgacatcaaacccaaggctacaaccaattttaagaagaaaggcaagagaaaggcaaagggcaactgctttgtgtgtggtaagcctgggcattaggccaaggattgtcctgagcgcaaggacaaaaagtctgcaaacatggtcattatcgagggcggaggaacat

SEQ ID NO: 40749 - DNA, 273 bp, Oryza sativa
  Clone ID: PAT_MRT4530_44160C.1
atggagggtgtggaggaaggcacgcagccgatggcagaggcagcgatgcggctcgatggcgatggagggaggggatactgccggcagatgcgtctcttgacacgccgttgtcgttccatgcaaccccctatcagaaacttcaaagtgcctataagtgaccctgccatagcagtgaagaagcctagcaccatgctgttaagtgacatccataggaagtgcatcgagatcatgaagcctacccatgaacggttagactgggaggctcttccatag

SEQ ID NO: 40750 - DNA, 687 bp, Oryza sativa
  Clone ID: PAT_MRT4530_44161C.1
atgaggacgacctcggcgccggtgacgtgctgaccttcaggttccactccctcgccgtcttgaaattattcgaccgcatccgcgagtaccgtctgcacgattaccggtaccaggcaacgcgaggctggtacagctccgggacggcgccggaggatgctcttcttccctgtgcggttgctcgaccaccgaggatgtatgggtgcgtgatcggggtgcagcgcggtcggacggtggaggtcgtcgacacctccgacatcttgctcgacaccgaccccggaaccctcgaccgcgacttgttgaagaagaagctcgagacctacaagaaggcgttccctggcttggccattcttgggtggtactccattgacactcatgtgacgaacaccgatatggaaaccaaccaggctttgatggatgctagtggaacaaccttttatcttctattcaatcctgcaatgaacctttccctgaaggatctcccagtgactatttatgaaaaagtgcactctaccaataggagtcccactccgttaatctttgtccaggcaaatataaaactgagactgtagaggcagagaggatatctttagaccatacgtgtcctgtagtttctgatgttagtgtgccacctcttgttggaaaaggcaacatgcaaatattatgcagacttctggattaagctgatgc

SEQ ID NO: 40751 - DNA, 600 bp, Oryza sativa
  unsure (1)..(600): unsure at all n locations
  Clone ID: PAT_MRT4530_44162C.1
ccggcgggcaatggctccccccggcgccagcggcttcaggttcccagactaccacctactgcccacgtcgaggtctagctaagctagttatgttatgatctactactgtgcccaccgcccgcccgccggaatctgctatcctcccgctagtcnccggcgaggtaggtttgatttcttggaggtggtggtgttcttgtgcgtccatagtgaaaaagagatgatggtggtaataatcgcaattatctatgtgggttacaaaatgtaaaggaggtggagaggcaatttaagtaggattaatggtatggttaattataatgctctcttgattattagcttaattgttaataatcctttttttgtcttaattaaggagaaatgcatgtttagttatttgtcaaattctgtatttttattttaattctacctctctccttttttcatgtggtcatgcatttctttttggagtgatgttggtgatagctcattttgatcatgcaaattaggggtgttggatcaactggcttttttggaattatgtatgcatgtttgtttgttggcaaaaaaaaaaaaaaaaaaaaaaaaaaaaaaaaaaaaaaaaaa

SEQ ID NO: 40752 - DNA, 227 bp, Oryza sativa
  Clone ID: PAT_MRT4530_44163C.1
aaaaaaagtgggacccctttatttagcactgatatcaaacaaaatcacccccaagggacacacgtggggggttatattatactccaccccgacactagttcaaaaacacaacactgtgggggctcgctttgggacacattaaaaaacccgggggagtattggtggaaaaatctaggagggagggccccgcgcttttcccccctggtgttctaggggcttcgccccac

SEQ ID NO: 40753 - DNA, 436 bp, Oryza sativa
  Clone ID: PAT_MRT4530_44164C.1
tcgtttccactaagcaaggcaatgtctaagcagataaaagaatatggattcaaaatctcgccacgagagggaattgtaccaagagatgagagatacactagagcagagattatggagttcattgacttcataattgcagctcctgaaaacagaagccggacgctatcgttcctgcggcgcatcgaggcagcttctattgatgattcttcttcaccgccttcactgccaggagggatgggtgtttcgttgttgaagcgtcttcgtttggattggataactgtttgttgactaggatgtgcagttgctctttaccctttctaccgcagagtatgaatgactttgttataaaaattcactatgttttgaggacaaatacatattctctgacctgcttgattagtaccaaattaatccttaatcaaagaccattttatgt

SEQ ID NO: 40754 - DNA, 2126 bp, Oryza sativa
  Clone ID: PAT_MRT4530_44165C.1
cttgaagtcctcttcaaaacccctcaataatcccaggcaatggcgcagcaagtacggagatcggccaccgtcttcttcacctccggtcgccgtcgccattgtcgattccgcctcctccgatcttggagtcttttgagctgtcgccgtcaacccgaaggagtttgccgccgccggacctgttcgcgagctattacggatgaccaagcttcgccaaccttttctagaatctcgctttccctccggtgaagcggccgcatgaggacgacctcggcgccggtgacgtgctgaccttcaggttccactccctcgccgtcttgaaattattcgaccgcatccgcgagtaccgtctgcacgattaccggtaccaggcaacgcgaggctggtacagctccgggacggcgccggaggatgctcttcttccctgtgcggttgctcgaccaccgaggatgtatgggtgcgtgatcggggtgcagcgcggtcggacggtggaggtcgtcgacacctccgacatcttgctcgacaccgaccccggaaccctcgaccgcgacttgttgaagaagaagctcgagacctacaagaaggcgttccctggcttggccattcttgggtggtactccattgacactcatgtgacgaacaccgatatggaaaccaaccaggctactgtcatttggcttagtgtttggtcatattatgaagaaatgttgctgttgttgatggatgctagtggaacaaccttttatcttctattcaatcctgcaatgaacctttccctgaaggatctcccagtgactatttatgaaaaagtgcactctaccaataggagtcccactccgttaatctttgtccaaggcaaatataaaactgagactgtagaggcagagaggatatctttagaccatacgtgtcctgtagtttctgatgttagtgtgccacctcttgttggaaaagggcaacatgcaaatattatgcagacttctggatttaagctgatgctgtttgaaattccttctggtttcgcgatgtttgaagtttcacaggaactgattgcacgccctaaggacatatgggcacgatttgcttatcaggatgacattacaaatgttattgttaccctgggttctattcagatccataacaaatctgttgctagggatattattgttggtcctggtgacgaactgaaagaatttatcctaagcttttgcactcacaactacttaattgttcaagatgtagagcttaaagatgttatcgagaagaaacttaatatctattgttactgtaatccaactgttgtcggtgaattgacatggggactgaactatgtcctacataagttgttacctcaagagcaaagtttaactcatgagccttatcttccactaagcaaggcaatgtctaagcagataaaagaatatggattcaaaatctcgccacgagagattgacagagagttcctaagagctatgagttttttaaattatttggggtatatgtcagagcgttattcactgctgctagatcatttgtttggacaatatcgtaagaataatatgtccgacattgaatttgctaaatcaattgcatctcatcttcattcctctgagggaattgtaccaagagatgagagatacactagagcagagattatggagttcattgacttcataattgcagctcctgaaaacagaagccggacgctatcgttcctgcggcgcatcgaggcagcttctattgatgattctcctccaccgccttcactgccaggagggatgggtgtttcgttgttgaagcgtcttcgtttggattggataactgtttgttgtctaggatgtgcagttgctctttaccctttctaccgcagagtatgaatgactttgttataaaattcactatgttttgaggacaaatacatattctctgacctgcttgattagtaccaaattaatccttaatcaaagaccattttatgtagattgcatttttttattctggccctagtattaattaatttggtgctccaaagcatgatcaccgtttgcattcaggctaaaaaaaaaaaaaaaaaaaaaaaaaaaaaaaaaaaaaaaaaaaaaaaaaaaaaaaaaaaaaaaaaaggggag

SEQ ID NO: 40755 - DNA, 561 bp, Oryza sativa
  Clone ID: PAT_MRT4530_44166C.1
atggcgccgccacggccacacctcacagcgcctgctgaagaaaaatacatcctcccccagcacgttttcagtgacccagacaactcctctgctcacattgagtctcttcatctgggttatgtctgcctgaacacagttgctaccactggttttgctggctttgccaacactcatcttatgttgcaaggatttgccaaaacctcagcgagattcgtcaatttgaggcgccagctgcggcacccacggcatgaacgtgtcgtacaacaccaccgtcgccggcctcccctgctccgcctcttcccagaccagctcgtccagcgccaccgacccgacctcctccagccgctcgaagtacgggccacggtggccgccgagatccgctgggccgccctcgtcgcagccgtcggagaacaccacgacgtgcaccgacgacgaaccaaggcagggcttggtcaagccgacgacgaaccgcgtcacagcgacggtgcaccggacgccgccatgaccgcgaagacgagcagcggcggcggcgccggtgggatgggaggccacgagcgctga

SEQ ID NO: 40756 - DNA, 639 bp, Oryza sativa
  Clone ID: PAT_MRT4530_44167C.1
atggcgaagcggcgggcagagtccgagcttgagcaggtggaggccgaggcggaggcggaggcggaggcggagaagaatgggaggcgagcagctggtagtcaggacgggatattctcgctcaagttatccaatatcactgctactgttgatggcccagttcacttgtatggatactttgcagtacgggatcatttggacccgctacgcaactacatcttcaaccgcaccagagatgatcctttcatcatggggcaagacaatggtgttgattcagataattccttgataccaatgcctggccccaagagaggcattggaaaccaagctcgtgtgctcattgagtttgacatgaagatcaagaatggagagacacgagatgatgattttcagctcatagatgctcgtatggaggcaatgatgctgtcaaacccaaccaattgccggccacacatgtgggcttgcaaggcgcacagtgtgcaattcatgatgcagatattctcgctcaagctatccaatatcactgctgctgttgatggcccagttcacttgtatggatactttgctgtccgggatcatttggacccgctacgcaactacatcttcaaccgcaccagggatgaccctttcatcatgggataa

SEQ ID NO: 40757 - DNA, 184 bp, Oryza sativa
  Clone ID: PAT_MRT4530_44168C.1
gtgatcgaaagcttgagcctaatataggaggtcaggaaccgaccgcacagggatcttgaaccggaatcactcatggcggtggaactctgatttgcggcgaggaaggtcaatagtcgcgcccttcaacaggcgacgggtttagtgccggcgagataaatgtttttatgagttacatctttttttt

SEQ ID NO: 40758 - DNA, 1477 bp, Oryza sativa
  Clone ID: PAT_MRT4530_44169C.1
ggctgcaggcttttattttggttttgggagggcgctccggcatactccattcagtttcgacatcttcttgttggaattctaaacttgtaaatttgtacatcgtaaggaaatttggactgaggggtctttggtcagcacggcaaaataataataataataataaacgcttttgtggccgcgtgtatcctcagtactcccgggcggaggtcgagggagaccctgttgctcacgacagagctcgcgcgcgtggccgcgtggtttcgccttgcgttaccatggcgaagcggcgggcagagtccgagcttgagctggtggaggcggaagcggaagcggaggcggaggcggaggcggagaagaatgggaggcgagcagcaggtagtcaggacggggtgaatcgcgcgttcatcctcgagtgcagcaaacatagcgatggatcgatctacagcggcgacgatttttggcacagattttacaaggtcgccgatacccgagagactcgtatggaggcaatgatgctgtcaaacccaaccaattgccggccacacatgtgggcttgcaaggcgcacagtgtgcaattcatgatgcagatattctcgctcaagctatccaatatcactgctgctgttgatggcccagttcacttgtatggatactttgcagtacgggatcatttggacccgctacgcaactacatcttcaaccgcaccagggatgatcctttcatcatggggcaagacaatggtgttgattcggataattccttgataccaatgtctggccccaagagaggcattggaaaccaagttcgtgtgctcatcgagttcgacatgaagatcaagaacggagagacacaagacgatgattttcagctcatcgatggtgccatcatctgcagcgaattcgtgcttcccgatagagtgtttacgcaacggattgagggtgattgtggtgcggtcgacattagtcgagcccttttccacgaagcagtggaggccacaatacaagttagcatatcacaagtgcatgtcaatggcttgagcttatctttatattcttataccagtcgaatccctgaaaagattcggctctttgatggtgtcatttccaagccatgtgacctgaatagggtagttgctgtggtggagaatacacctttgtttttaatcttcagggctgttcatagggatggctcggattatgatatccctaaatactgtccattggtcttcaaggttgatcagggggatggctcgtatcgtgtctctgaatattgtccattcaaagctagaagacatggatatgacatgaaagagcttaaacttggtggcgcccgtgtactgttgaaggtgtcttggtcaactttgaagtgattttgaaaataacgatatttctgtgtgttgggtagttgtcaaatgtttgaccctatgttcggtacatatttaacttttgagtgaaatgcatgagcggttcctaacct

SEQ ID NO: 40759 - DNA, 126 bp, Oryza sativa
  Clone ID: PAT_MRT4530_4416C.1
gttagctgaacatggtcctgatgggaagggaagaacacgctatcgaacttgtgaggtgaatggaacagtgaagagtgtaatgtctaagtcgggacagtattttaaagcccataaaattctcttctt

SEQ ID NO: 40760 - DNA, 988 bp, Oryza sativa
  Clone ID: PAT_MRT4530_44170C.1
ctgcaggctcggcaagtttggcatagcaggcagaaagcaatcaataaatagcacgcatttactggggggttaatataggcagggattgatacaggacacacccgtaatatcctccaccgctcgacgcactttctgtatctatatatacgtaagcacgtcctgattcttgttgcatttctcgtcctgatttgcgtcctgcagctctctctcatcacagtttcgcaatggccaaaaaaacaatactgcaggtggtttgcgcggtggcgctggtggcgctgtgcgcgtgcggcgtcgcggcgtcaccgtcgtcgccggcgggagcggggtgccggaagcacgtcgcgaggatcacggagtacggcggcgtcggggacgggaggaggtccaacacggcggcgttcgccaaggcggtggcggacctgtcgctgcgcgccggcgacggcggcgcggcgctggtggtgccggcgggaagtggctgacggggcccttcaacctcaccagccacttcaccctcttcctcgaccacggcgccgagatcctcgcgtctcagaacttggaagattggcctctgatagctcctctgccatcctacggaagaggaagggacgaaccaggcccaagatacagcaatttcattgctggatccaatctcacagatgtcatcatcactggtaggaatggaacgatcaacggtcagggccaagtctggtgggacaagttccacgccaaggaactcacctacactcgcggttacctgctcgagctcctctactctaacaatatcatcatctctaatgtcaccttcgtcgactcgccgtcatggaatctccatcccacctactgcaccaatgtgaccatcagcggcatcaccattctagcacctctcaactcgcccaacaccgatggaatcgacccagatttcttctcccatgtaaagatccgggacagctacattgtgtccggcgacgactgcatcggcctgaagagc

SEQ ID NO: 40761 - DNA, 274 bp, Oryza sativa
  unsure (1)..(274): unsure at all n locations
  Clone ID: PAT_MRT4530_44171C.1
gagacgagacgagcgtagcgcgcgaagtgtgttcctctctggtcatcgtcgtcgtcgtcgcgatgccgacgccgtcgcacttgaagaacccgctctgcttcgacttccgggcggcgaaagcgggtgccggagacncncgcgtggccggggctggacnaccncccggtggtggacngcggcggccgcngcagctaagacncngtgcccgtggtggacattcncggcnggcgaatcngcgctcnggttgcccgggcngcggaacanttggggcgcg

SEQ ID NO: 40762 - DNA, 842 bp, Oryza sativa
  unsure (1)..(842): unsure at all n locations
  Clone ID: PAT_MRT4530_44172C.1
atgggttggcgttggcacgacgacggcgatgacggcggccgcggcctgggcgacatccccgacctcgccggcggcggcggaggcggagatggggagcgctgcgccacgcgccgggtggtgcagtctcggtgccacacggaggaggtggagcccggccgcttcgtccgcaagtgcgagaagaccgagcagctcctccgcgactgcgtcggcaggccctctgaactggtggaatcaaaaactgaaaatactgaagaagacgtcacagatgaaatgaaaagcgggtcactatctcttggttttccgaccaatgagccctttgcatttcctggacttcgcagtgacatagaagctcttgagaaaggccttttcgggagcattggtagctttctggatgatgctgagaggatgaccaatgatttcttgaagtcttttggtgtcccttccatcaatgaaagggagtcgagctcatttgatggacaacctacaggcaggcacattggtggacaacctgcaggcaggcacattgaggaaggtactgcaaaggacactaaacagaacgactacgcagaattcagcagcaagattacagatgtgtaaggatctacagttagctgacgcacctttgggagcagcttgccaattttgtattttgaacatctccatggttgtaattggaaggggaaggatcagtttgactgttttataagcagagtcgtctgaagtctgaagtgttgcgcttataagaacaattgtgtatattactgttttagataagcctgtttgtgttcctcaacaatgagatcaannnacaaaaanaaaaaaaaaaaaataatattattaat

SEQ ID NO: 40763 - DNA, 382 bp, Oryza sativa
  Clone ID: PAT_MRT4530_44173C.1
ccaaaaaggttggggaagccgctaaaaggcacaaaatggggatgggggcccccccaaaggggggcccaagcacggggggtgggcaaacccgggaaacggggggcccccccaagcgcaggaaccccctgcctgcgggggcccccccaacaggtcgaccgggaccctccaattcttgggtcccggctgtaaacaaaggggggtcgggggaaagggcagccgcgaaccgggaccgggcagccccccctttccaagccccggccccggaaaaactggaatgagccgcctggggggcccactcggggagggagaccccccgggggaaaagggggtgggggggggggaccccttatgcccaccccctggcccgggggttgccccgggg

SEQ ID NO: 40764 - DNA, 474 bp, Oryza sativa
  Clone ID: PAT_MRT4530_44174C.1
atgtcgtcacgggttccatcccttgtttatcaacctcctgcggcgaggcagccgctcggagttacgaggatggtggacagtttcgcaccgcgcctccgcctccgcctccgccgccaccgccccagcgtgccgtcccccggcctcgccggctggccagaaggccttaacggcgccggcgagggccccccggccgacctcctcctccctccctctcccctttcctccctcctcggcgagatgcccccgccgccaacgccgcccactgccatcctccataccccgcggcttcggcgccgctgccggcgccttaccgtccgcccgatcccgccgcccaccgccgggccgccgcctcccatggccatccctctaagcccggccacctcccctttcttcccccctcccaccccaaccccaacccgccccgggaccctaattcgccggcgccagagaagaagaggaggtcgccggagttag

SEQ ID NO: 40765 - DNA, 1411 bp, Oryza sativa
  Clone ID: PAT_MRT4530_44175C.1
atgaggaagccggattgcggcggcgggggaggggcggcgaagggcggcggcgttctgggtgtggcgggagggaacaatgcggcggtggtgggggggaaggttcggaaggggctgtggtcgccggaggaggacgagaagctggtggcgtacatgctgcggagcgggcaggggtcgtggagcgacgtggcgaggaacgccgggctgcagcgctgcggcaagagctgccgcctccggtggatcaactacctccgccccgacctcaagcgcggcgccttctcgccgcaggaggaggacctcatcgtcaacctccacgccatcctcggcaacaggtggtctcagatcgctgcccggctaccggggcgcaccgacaacgagatcaagaacttctggaactccaccatcaagaagcgcctcaagatctcctcctcctcggcgtctccggccaccaccaccgactgcgcctccccgccggagcacaagctcggcgccgtcgtcgacctcgccggcggcggcggcgccacggacgacgtcgttgtcgggacagctaatgctgccatgaagagcatgtgggtggattcctcgtcgtcgtcgtcgtcgtcttcctcgtcgatgcagagccggccgtcgataatggcggcggcggcggcggggaggagctacggcggcctcctcccactccccgaccaggtctgcggcgtcgacacctcgccgccaccgccgttcttccacgaccactccatctccatcaagcaagcatactacggatcaaccggcgcccaccaccaccaccacgcgatcgccaccatggacggatcaagcttaataggagatcatcaccatcacagcagcagcatcctctttggcggcgcatcagtgccacctctcctagaccaccaaaccattctcgacgacgacgacgaccaccctaacaaaaccggcagcaacacgaccgcggccacactgagcagcaacatcacagacaacagcaacagcaacaagaacaacagtgataataacaacaacatcagcagcagctgctgcattagcctaatgaacagcagcagcaacatgatctattgggagggtcaccaccaacaacagcagcagcagcatcagatgctgcagcagcagcagcagcacatgagcaggaatgtcatgggagagtgggacttggaggagctgatgaaagatgtgtcatccttgcctttccttgatttccaagttgaatgattgagagggaggggccccatctatagctgccaaaggagtacattgcatatatatccaattatacatatatatacatacatacacattgaaggtagtatttttttccattgacacatatattctctcttccaaatgtacaagatttctcacaccaactccacccccgatcttgcatatatat

SEQ ID NO: 40766 - DNA, 413 bp, Oryza sativa
  Clone ID: PAT_MRT4530_44176C.1
ggtattgtgatagccaaacgcaaatgttgcagttaatgccaaagatctccctctgcgatggatgctgcacaatgggtatgaagttccacgggatatgctgcagagtggttctgatgcagaatcgtcgtttaggggaggaggggatcttacccctggcggtgacactgggcagtctattgctggtgaagtgtggggcaatgtcaaggacatagttgggcagaagaaggatgagtatgattacaccaaactttttaaaacctattttattcattcccttccggcattcttaagccggacaaggactacctgtggaggtgtggcaagcaaaggctccgtgaagctagaatacaaggcgttgactatctgatcctgggccttgctggtttatgtctagggacattagctaaagtgag

SEQ ID NO: 40767 - DNA, 280 bp, Oryza sativa
  Clone ID: PAT_MRT4530_44177C.1
gcttctcctaggagaggagaaaactcaaactgctgtgtgccagtgactgaggaaaattaatgaaagaaaaaaaaaaaaaaaaaaaaaaaaaaaaaaaaaaaaaaaaaacaaacaataaaaaaaaaaacaaacatacgcttgcatgcctacaggctccctgcgctctgccccatgacacctcaaatcaacctcccggccgttcccacccaacggactcccctgccccgccctgtcccaaccccaatcacctcccaacctgcgccaccccaacttaccaccc

SEQ ID NO: 40768 - DNA, 924 bp, Oryza sativa
  Clone ID: PAT_MRT4530_44178C.1
atggagattgggctgacgttggcagatcatcacgaaggtgagactgacggtgggctcgccgccgccgccgccgccgccgcagccgccacgggcggagggagagaagggcgggtggaccttgcggtggtggtgattcatggggaccgcggcggctcggtcgcgcgcgacgccgctcctggttccatggcgatggcggtggtggaggcaggccggcggataagtgggaaaacaagtgttcctgcttctagtccgaacaggctgcatgcaacccaatcgaattttcgtggtagtggctcatcagcacggtcattgatgatatctcttggtctgaaggatcattcccaggtgaacacgtcacttgtagttagcgttataactaaggcaacggacatgggcggacacggacaatggcgagggcggcggctgcggcggacacaggtgatggcgtgtatgtcactacggtggatgcagacgaaggtggcggccgctgtggacaagggcaagggcgacgacgacggctgcggtggacgaggacgacgaacacgggtgtggacggtgggacggacgtgggcctccgccgcggaggacgaggacagtgggatggaagcgagcaacggcaacggatacgagcgaggatggcaggacggatgtgagggacaaggacgtcgaccacaggcgaggatggccggacggccgcggacgacaacggcggtcgtagtggatgaggacaacgaccgtggcggacacgggtgtggatgtgggatgaatgtaccctgccgtgcggaggatgaggacggcgggacgaatgcaagcaatggttgtggacgcgaaggacgaggatggcgactgcaggcgagggtggtgggatggccgcgggcaacgtcggtagcaaccaaggacgagaacgaccgcggaagatggtga

SEQ ID NO: 40769 - DNA, 2065 bp, Oryza sativa
  Clone ID: PAT_MRT4530_44179C.1
atggcgtcgatttcgccgacgtcttcatcggtcgccgccctccgcggccacccggtgcagttcgtgaaaggcggtgcagtctccaaggaagcaaagggatcaatttccttctcacccgttgcgaattcaaataatgccaatgtgaaatttacgggcttgagggtagcagcatcattgaaaagggatggtgcttttccaggcgacggttactcagggaatgataacacggtgttaccaaagagcacttctgttcgtggccaggactatccaactgctgactctgtactcccaacggaatccatcatcgtgccagaaatcagtaatgctggtttgaaatgtgttgcggacatgttctcagatgaggacaaagacactgaacaagatttggatagcccaactgagggcttctcgtctatttccgaggccatcaaagatattcaacaaggaaaacttgtgattgttgttgacgatgaatcaagagaaaatgagggagatcttataatggctgcttctttggttaccccagaggccatggcgtttgttgtaagatatggcacaggaatagtgtgtgttagcatgaaagaagaggatcttgaaagattgaaccttcctttgatggttgcaacaaaggaaaatgaggagaagctctgtactgcattcactgttacagtggatgctaaagagggaacaacaactggggtatctgcaaaggatagggcaaagacagttatgactcttgcatcccctgactctaagcctgaagacttcaatcggcctggtcatattttccctctgaaatacagagagggtggtgttctgaaacgagctggacatactgaagcatctgtagatcttgctatgttagctgggttacctcctgctgcggtcttatgtgagattgtggatgaggatgggtccatggctcgcctaccaaagctgcgcgtgtttgctgaaagggagaatttgaagattgtatccattgctgacttgattagatataggagaaaaagagacaggctagttgaacgttcatctgttgcacgcttacctttgagatggggtaatgtccgcgcttactgctacagatctgttattgatgggatagagcatattgcaatggtgaaaggggagattggagatggtcaaggcgttttagtgagggtgcactccgaatgcctcacaggggacatttttggatcagcaagatgtgattgtggtgatcagcttgccatggcaatggagatgattgagaaggctggaaggggtgtactagtttatcttcgtggacatgaagggaggggtattggtctcggtcacaagctccgtgcttataacctgcaagatgacgggcgcgacactgtggaggctaatgaagacctaggactgcctgtggattcacgggaatatggcattggtgcacagatattacgtgatctgggggtccgttcaatgaagttgatgactaataacccagcaaagtatggtggtctcaagggttatggattgagcattgtgggcagggttcccttggtaactccaatcacctcagagaatcggagatacctggaaacaaagagaacaaagatggggcatgtatatggattggccaatggccaagctagccatcagacgggcagcaatggtgccaaaggggagcattaggccaatcggactcaggttcacattctaatccacgacaatcttatgtgatggagtttgtcaaattatgctacaacatatgttcgtggtgaaccaatttttttttagctgacagtaggttgaaagatgggcgtaataaaagtatccctttatttgttgtaatccacagccacacaactgggttattactgtaaatatatacacacacataaactgctccctagcgggtacagactccagccttacctgaattgagaagactggcgataaaaatatcgactgagatccaaggcaatactagtatgaatctaactcccaatattgaaagaatttttgttctgggaagcctttggatccctacattatttcttgcactacgcatatgctgccaaaaaaaaaaaaaaaa

SEQ ID NO: 40770 - DNA, 376 bp, Oryza sativa
  Clone ID: PAT_MRT4530_4417C.1
ccacgtttccgttttaccgtttaagaaacactagagattcccggagcgactacttcgctacccatactgctccaatggcctctttcttacctggagggcgagctgagctatatgatgctcatgcatatatgcgccgacatatgttagacatacggcagcatagaggcctaaagctaccaacactgacaaaaacccctagaggagtatttatgggggaaaaatttaagagctggacagcttatagcctggatcaaatcaaattccattctatacaagcagctggcactatattaaaggataccacaattgtgccctatagaggtcgttcctgtgttaagaacgaaatgctaccgagctagtcaaccaatgctggcct

SEQ ID NO: 40771 - DNA, 873 bp, Oryza sativa
  Clone ID: PAT_MRT4530_44180C.1
atggatggcgcgggaatctctctggtcagctcagctcagcttgctgctctgctcttacactacacgcaagtgagcacagcacttgttaataaagttattacggccatttgcatggagagaacagcagacgagaacttaaaccatgtttattggagatggagtagtacgtactacgtagtagcaagagtgcaatactatcaagtaccaaccggtgctcaagttgagcaatttagcaagtactccacttcagatgaagacaacagtgctacgactaccatgaacaagcaaagctccttactcttctctattctgaactcttctaatcaatcaatttactataccgatacgagtagtatatgctgcttgctcgcactgaccgatctctgcaggagacatgttctgtccggtgtccggaaacgccatggatctagctcggacagcgcgcctacatgcatgtgtgcagttaaatactgctatatggtggaggggcggcgtcagtgcgctcgagcaggcggagcggcggtgtctccgggtgagcgcggctgcggcgacggcaagcggcgggcgagcgtgacggcaggcaagcggcagctccgagtgtgggcgcctcatcttccccaactccgtccgctcccgctgctgcggcgcgccaccacgctgggctccttcgatgagtgcgacggcggcggcgggaaccagcggcaagaacgactgctcatcggctcgcccgacgcccgccgtccgctctgcccgcagctcgccgcgcttgccttccgctcgcccgccgccgtccaacgccgctccgcgtgccgccatgccgcccgcctccgttctgcccacaggccgcgctcggtggacagcgctgctcaagga

SEQ ID NO: 40772 - DNA, 1676 bp, Oryza sativa
  Clone ID: PAT_MRT4530_44181C.1
atgccgccgccgccgtcggccacggcggggcggaggtccccattctccgccctcctcctctacgtcaccttcgcgctcgtcatcctgctcctcctcacctcctactcacccagcatcccgcaccggggccgcagcctccaccgccgcctcaagctccaccccaggaacccctccctctccggggccggcgcgggggcacccaccggaggaaacggggctccgcagaagcagcagaaccaccaccacgcggcgcccttcgacccggagatcgcggagctggagcggcggctggaggacaaggagtgggagcgcgagcactaccgcatcctgcacggcgacggcggcggaggggaggcggacgagcacatgagggaatgggaggagttcctcagggaggacgaggacttcatcaacgacgacgagcggttcaacctcggcgaccgcatccgcgcgctcttccccaagatcgacctcgccccgcgcgacggcttcgcctccctcgacgagctcaccaggtggaacctcgagcagtccagagccgaccagctccaccgctccgctcgggagatggagctctacgacaagaatggcgacggggttgtctcctacggggacttccgggctcagcacaacgaatcgagtggagaggttaattcgctggggttcccatggtggaaagaggagcatttcaatgcttcggatgcagatggccatggtttccttaataaaaccgagtttaatgacttccttaatcccagcgattcagagaatccccaaattatcaatttgctctgcaaacaagaaataagacagagagacaaggatggtgatggaaagctaaactttgaagaatattttcatgggctacatgaccatatacatggttatgattacgagaacgcagatatttcccatattgggaacaatacagtagctaaggagcggttttccaaacttgacaaagacagtgatgggtttatttcagagcacgaactagaacctgttcttgataagctccatctttcagaacgttattatgctagacaacaagctgcccatgctatttcagaggctgacaaagatcatgatggaagactaactttggatgagatgattgagaacccgtatgcattttatggcagcgtcttccttagcgacgacgaagactattttcatgatgaattccgctgaggtgtctgcagattgttggtgttgcaagtatggtttgcggatcgatccaagatgctttcaccatcagactgaatgatctaggagctgctaaccacaccaaaagagaacttcagctgtttggtaccctagagttctttctatcaggtactcaggtggagcaccaagctggctaatgccagcgatattaggttacatacatgccaacttgcctgcctttatttagggtgagccgctaacctgacctgacatatgttgtgtattatctcatcagttttgtaaaatgcaatggatggagtctaggagagcaatcatagtagaatggacatgaccagaccagtgagctaattgtgcctttcttctttctttttttctgaagtgtgagctaaattatcccttccttgcttgaaaaaaaaaaaaaaaaaaactcgagactagttctctctctctctctccgagaggggcctctgccgaattcctgcagcccg

SEQ ID NO: 40773 - DNA, 1231 bp, Oryza sativa
  Clone ID: PAT_MRT4530_44182C.1
atcgaacgccatggccggcgccggcgccggtgaaggcggcaccgtcctggtgggcgtccgaggctacgacagcggccaccgcgagaaggagggaggcagcacggccacctccagaacaagcaacgggcgtcccatcgagatgacattctggaacgaggcccctcccgcgctctcccacttctccgcccacggctccgatctgccgcccgccgcccatggcgatctgctcctggcgcccaaagtcatcgccgccgcctacggcttgctcctcctcagagtccccgtcaaccccgtgcccggcggcaagagtctcttccgtcaggacgactacttcgtctaccatcaccatcaacccgccaggctagatctgctccccaggccgtgccagcaatattgcttacgcgacgacgatttcgccatcgttagcatctgcggcgacaagcagcagtacgtcgttgccgccctcgagatgatcaacctgcccagtcaattcgcgctgcaccggtacaaatcttcttctggtggtggcgatggtgatgagatcgccggaaattggacgtgcgaggaggtgtttgtggaggaggcggtgagggacagggtgtgcccgatccctgactcagctgagaggcccgtgtaccacatcaccaccaagaccatcgcgctcggaggcgcgaagggcaccgtcggctgggtcgatctctggcgtggcatcctcctctgcgacctgctcgacgaaatgtctcccccaaagctccgcgacatgccgctgccatggccggccaagggcaactggacaagatacctcagtgacagcgagtccttctatcgggacatcaccgtcagccaacacaaggacttcatcaagtacgccgagatggaaatcaccatgccaagagttgtgaccaaaaccataatatcctccggtgatcgcaccatgcctgcagatgatcctcctgattcgttcctcgaatgggttcgccggagcagagaacctcagcctcagccgacgacacggcagcgctcctccgtccggcggcctggccagtggaggctcactacatggaccatgcctatcccggtcacttcatgggaggactggcgccctgactgcacagctaacttgcatgatttccatgtcgtcgacaacacagcccatcatgggttgctggataagctcattgtcgaaacaaattttcggcaatatgaaaagggggtagcatacgagacctaa

SEQ ID NO: 40774 - DNA, 105 bp, Oryza sativa
  Clone ID: PAT_MRT4530_44183C.1
tcgctttaccaggtccagacatagcaaagaaattcttgagtgcaaatactgctgctccaatttcagctgaaccactatatactgatctcccttccagcagcacca

SEQ ID NO: 40775 - DNA, 151 bp, Oryza sativa
  Clone ID: PAT_MRT4530_44184C.1
gatagcgcgtgcatgcacgactcgctatcggcacggagtgctgccgatagaacagccttggcgatgctggtcagcctaagactacgtagtgctgtacgacagaggtccttctcagcatccactactttattgtgggcgtacatgcttacca

SEQ ID NO: 40776 - DNA, 375 bp, Oryza sativa
  Clone ID: PAT_MRT4530_44185C.1
tggtgctctccacacggaggcgaagacggcggggggggtgattaactttctcgtgagggtcgacaaccagacgccctacacggtcacccaatgcctccagggcacgagctggcttctgcccgaggcggtgcacctgatctacatggacagctaggccacccttgcggcacatccggccccatcgccggctgctgcagcagacgccacggcagcggctgcggcagcagttgacgaggaggcggacacgactaggatacctgaccccactcttgctatactgagcgatggaatgctacagggacttggggtggaagaggaagcgcggggaccagtacgcacaaagcggtagagtctctgctgcgatgcccccatggg

SEQ ID NO: 40777 - DNA, 1593 bp, Oryza sativa
  Clone ID: PAT_MRT4530_44186C.1
atggcaatagagtcagctccggcgcgaaatgagcggcgcggtcagcacgtcgtgctgctggcgagccccggcgccggccaccttctgccggtggccgagctcgcccggcgcatcgtcgagtacgacggcttcacggccacgatcgtcacccacaccaacttctcctcggcggagcactcctccaccttctcctccctcccgccgtccatctccatcgccgcgctccccgaggtgtccgtcgacgacctccccgccgacgcgcgcgtcgagacccgcatcctcaccgtcgtccgccgcgcgctcccgcacctccgcgacctcctccgctccctcctcgactcccccgcgggcgtcgccgtcttcctctccgacctcctcagcccgcgggcgctcgccgtggccgccgagctcggcatcccgcgatacgtcttctgcacctccaacctcatgtgcctcacctccttcctccacaacccggtgctcgaccggacgaccacctgcgagttccgcgacctcccgggccccgtcctcctcccggggtgcgtgccgctgcacggctccgacctcgtcgaccccgtgcaggaccgggccaaccccgtgtaccggctcgtgatcgagatggggctcgactacctccgcgccgacggcttcctcgtcaacaccttcgacgccatggagcacgacaccgctgtggcgttcaaggagctctccgacaaaggcgtgtaccctccggcctacgcggttggcccgttcgtccggtcgccctccggcaaggcggcgaacgacgcctgcatacggtggctcgacgaccagccggacgggtctgtgctgtacgtgtgtctgggcagcggcggcacgctgtccaccgagcagacggccgaggtggcggcggggctggaggcgagcgggcagaggttcctatgggtggtgcgctaccccagcgacaaggacaagacggccagctacttcagcgttagcggcgacggcgacggcgaggacagcccgacgaactacctgccggaggggttcctcgagaggaccaaaggcaccgggctcgccgtgccgatgtgggcgccgcaggtggagatcctgaaccaccgcgccgtcggcgggttcgtgtcgcactgcgggtggaactcgacgctggagaccgtggcggcgggcgtgccgatggtggcgtggccgctctacgccgagcagaggatgaacgccgtgatgctgtcgtcgtcgcgcgcggggctggcgctgcggccgagcaacgcccgggaggacggggtggtgacgcgggacgaggtggcggcggtggcgagggagctcatcacgggggagaagggcgccgcggcgcggaggaaggcgcgggagctgcgggaggcggcggccaaggccacgcgggcgccgggcggcccgtcgcgccaggcgttcgaggccgtcgtcggtggcgcgtggaagaaggccgccgccgctgcacgtggcggtcgtgccggcgagcccgacgacaacggaacagcagtgacggcccaatgatttgtgtctcggggttgggcgaatcgatctgggttcgttcccctcccgcccgcgccggggtttggggcc

SEQ ID NO: 40778 - DNA, 549 bp, Oryza sativa
  Clone ID: PAT_MRT4530_44187C.1
gtgtattctatagtgataaaaaaatatcctgtagaatttaacaattacaaagttcctcccattcaaacatccactagagggtgtttacaatccctaaatacaacaatcaacaatgaagcaagcaaggtggaataccactgcgatttacaatatatggctggaggcacaaacgccacctaaaaacctatgctttgcttttcatataattatcattcacaaattcacaggttgatatttcgtcagtattgtaggaacactcttgtgttgaaggcaagcaaagacagcatattgaacggtgccttacacattatgttcaatgaacttcgcctcaccttccttcatccgatatgcttgagcttaccccacgtcacagcggacgcgtgggttaacaagtttatatatctgactaaaatttgatcgacctgcttccaactgacagaatcgagcatcatgattcatgaatatgatgaatgtttgtttgatgcatggcgcgcgtgccgtttccaggtggaataccactgcgactttacatatatggctgcctcgtgc

SEQ ID NO: 40779 - DNA, 192 bp, Oryza sativa
  Clone ID: PAT_MRT4530_44188C.1
atggagacagagaagcctatatcatcaaaaacacaatttcttggaactatagctgatgcaagtgcaacacatggaagtgcaaagagaacactgaaactaattcagaacaccaagccacctacacttctcatggctaataatgatgatgatgccaagaacacaaactcagagaaatcaaccaaaccaaggtaa

SEQ ID NO: 40780 - DNA, 1189 bp, Oryza sativa
  unsure (1)..(1189): unsure at all n locations
  Clone ID: PAT_MRT4530_44189C.1
cntncttncaaggccnttttaagtttgggnnacccccngggttttccccaggtcccgncnttttnaancggcnggcccctttgnnccccctttaatnccgactncncnattggggccgaattgggntcccgggnnccccccttcggggtcgacccnanngcgttccgcagaagaaacatcttctgcccatcgcaccaccagatcaacaaaatcttctgcccatcgcaccaccagatcaacaagggcatgcgaaggagaatgacagaaaagttgatggggtaaaagagataagcaatcctctcgacattgagatcagagcaagcttgcttcagcaaatcagggataagtcaggtcagcagaagctgaatggacatgaaaagtcaaaagcagtaggcaatgatactaaaaacttggatgaaagggaggagttgcttcaacaaatcaggagcaagacattcaatttaagacgaacaaatgcatctaagacaaacacctcatcaccaaccactgccaactccagcgttgtagcaatcttggaaaaggcaaatgcaatccgccaggctgtggccagtgatgagggaggtgatgatgatagttggagtgatatatgaatactcaactggaacgcgtatgaaactctttttctgtatattcagctagtacaagatgaagtgaaaaaatgtgaataacatccttttcttcattgtaattagattttccaggtctgttttgtacctctttttagttcacattagtgtattctctcataggcccatgcggttgtggaaatggttagatcattttcacattatgtaaattaactttattatttatttttgatagtgaaattaactggtaaaataagcatgttaaactgtttttttctagcaatgtattgaaataatatctctttgcattaaaaaaaaaaaaaaaaaaaaaaaaaaaaaaaaaaaaaaaaaaaaaaaaaaaaaaaaaaaaaaaaaaaaaaaaaaaaaaaaaaaaaaaaaaaaaaaaaaaaaaaaaaaaaaaaaaaaataaataaaaaaaaaggggggggccgttttaggggaccaaatttttctccggggggcttggaagtatttactttttttttgggggccctaaatttaaattcggggggggggttttaacacccgggggcggggaaaaacctggggttccccaaatt

SEQ ID NO: 40781 - DNA, 653 bp, Oryza sativa
  unsure (1)..(653): unsure at all n locations
  Clone ID: PAT_MRT4530_4418C.1
attttcccaatcgatgaccaaatgaacatgaaatctgtcgtagagtatttcaaggaaatgtatggcttcaccattcagcatccccatcttccctgccttcaggtgggaaaccaaaagaaggcaaactatctaccaatggaggcctgtaagattgttgagggtcagagatatacaaagaggttgaatgaaaagcagatcacatcattactcaaggttacttgccgtaggcctagagaacaggagatggatattctacaggtctagttttttctcctaatcggattataacattttgaaatatatggattacatgtttgtcaggagtaaatgtttcaagtattttgtcttactaaattggatgataaatccaaacaccaaatcagtgcattagaatttagaagatacgcatgctaatgtacgttaattgttctatgctgaagtctttgttttcattacccacttccaagtggtccaagcattccatgcaattgatgttcaatagctacccacccaataagtgctactagggtttctcttcacttgatcagcactcttgttataatggttcaagactaaaaaaatttctttccagacagttcaacanaatggatatgagcaagacccttatgcanaagaatntggaatcaacatta

SEQ ID NO: 40782 - DNA, 1642 bp, Oryza sativa
  Clone ID: PAT_MRT4530_44190C.1
aacagcgccgttcgtcgcgcggccggggcagcagctacgcgcaaaggcgacagctcgcggaatggtcggaaagcgcgatagaatcggaccaatggcgactcggcttctgctgctgctgctgctcttgctcggcatgtcgctgaaaggatcagagggggcgtggtgcgtgtgcaggccggacgtggcggaggcggcgctgcagaaggcgctggactacgcgtgcgggcacggcgcggactgcgccccggtgacgccgagcgggtcgtgctacagcccaaacaacgtggcggcgcactgctcctacgccgccaacagctacttccagcggaattcccaggccaagggcgccacctgcgacttcggcggcgccgccaccctctcctccaccgaccccagctcaggaacctgcaaataccctgcaaccgcaagggacaagcaccggaaccggcacggcgggtgcaggcacaggcaccggtacaagcacgagcacgagcacgagcacttcttccccgggctcttcaactgcagccacggctctggcggctgcgcgcgcgggtgttctcttcgtggcgagatcggcgttgatgcgcggcgcggcgtggcggtggtgggcgtgcgtgcgatgaggaagctgtgcccgaacctggaccgcgacgactcgctggacaccgtgctggaggtgcccatccccgatgagatgctcatcaacgcgccaggcaccgacaagcgccgcggcgccggcggcgccaacatgcgcgcgtggctcaagaaccaggcgttcgaccgcgccaccgtcggcggccccgccaacgcaaccgccgagctccagctcttcctcaacgtcgtcggctcgccgctcatcccctgccccgtcccccacgaccgcgccttcagccgctccatccgcgactcctccatccaagcgtcgacggccaagtacatcatgcagcagtacatcgcggcgacgggcgggcaggcggcgttgcaggggctgcagagcatgtacgccgtgggaaaggtgcggatgtgcgcgtcggagttccacctcggcgaccagaacgtgaccgccgcgcagggccgcgccgaggtcggcgggttcgtgctctggcagaagtgccccgaggtctggggctggacccgaggtcgaatcgcgaacctgttctccgacgcggtgtgcatcggcgagaagatcatcaccggggaggagtgcttcatcctgaagctggaggcgagcgcggcgacgctgcgcgcccggagcgcggcggcgttcgacatcatccaccacacggtgtggggctacttcagccagcgcacgggcctgctcatccagttggaggactcgcacctcctccgcatgaagtccggcaagggcgcccgccgcagcgagaacatcttctgggagaccaccatggagtccaccatctccgactaccgccacatcgatggcatcaacatcgcccacggcggccacaccgccgtcacgctcttccgctacggcgagggctccgtcaaccacaagcggaagctggaggagacgtggacggtggaggaggccgacttcaacctgtacggtctcaccaccgactacttcctgccgccctccgacctcaagaaggacatcgacgagaagcgcgccggctga

SEQ ID NO: 40783 - DNA, 832 bp, Oryza sativa
  Clone ID: PAT_MRT4530_44191C.1
ccacgcgtccggcgagatcggcgttgatgcgcggcgcggcgtggcggtggtgggcgtgcgtgcgatgaggaagctgtgcccgaacctggaccgcgacgactcgctggacaccgtgctggaggtgcccatccccgatgagatgctcatcaacgcgccaggcaccgacaagcgccgcggcgccggcggcgccaacatgcgcgcgtggctcaagaaccaggcgttcgaccgcgccaccgtcggcggccccgccaacgcaaccgccgagctccagctcttcctcaacgtcgtcggctcgccgctcatcccctgccccgtcccccacgaccgcgccttcagccgctccatccgcgactcctccatccaagcgtcgacggccaagtacatcatgcagcagtacatcgcggcgacgggcgggcaggcggcgttgcaggggctgcagagcatgtacgccgtgggaaaggtgcggatgtgcgcgtcggagttccatctcggcgaccagaacgtgaccgccgcgcagggccgcgccgaggtcggcgggttcgtgctctggcagaagtgccccgaggtctggtacttcgagctcatcatggccggccacaagatgagcgccggcagcgacggcaaggtcgcctggcgccagtccgccgccgagaactcccacgcctcccgcggacctccccgccccctccgccgctccctccaggggctggacccgaggtcgatcgcgaacctgttctccgacgcggtgtgcatcggcgagaagatcataccgggagggagtgcttcatcctgaagctggaggcgagcgcggcgaagctgcgcgcccggagcg

SEQ ID NO: 40784 - DNA, 780 bp, Oryza sativa
  Clone ID: PAT_MRT4530_44192C.1
ccggccaaccagcagcgcagttacacccaaaccagcagcatcgacgattcgccgagctaggggcagaggcagaagtgcagaacgtacacgcgtggtgagcagaggagcaatggcgactcggcttctgctgctgctgctgctcttgctcggcatgtcgctgaaaggatcagagggggcgtggtgcgtgtgcaggccggacgtggcggaggcggcgctgcagaaggcgctggactacgcgtgcgggcacggcgcggactgcgccccggtgacgccgagcgggtcgtgctacagcccaaacaacgtggcggcgcactgctcctacgccgccaacagctacttccagcggaattcccaggccaagggcgccacctgcgacttcggcggcgccgccaccctctcctccaccgaccccagctcaggaacctgcaaataccctgcaaccgcaagtgctgcagggacaagcaccggaaccggcacggcgggtgcaggcacaggcaccggtacaagcacgagcacgagcacgagcacttcttccccgggctcttcaactgcagccacgggtacgccgatcatgggagggaccttcgctacgccgatcggcggcggcgcgtctgggccgacgactagcgccttgaatcctgacagcagcgaagcaccgtccccgtcctttggacgtcatcttctcctcacgtgcattgcctccatgctgctctctaattttcttttggcgtagtaatttggccggaaagttacgtgaactgaagcagcatactgtgggag

SEQ ID NO: 40785 - DNA, 286 bp, Oryza sativa
  Clone ID: PAT_MRT4530_44193C.1
gggccaaaaacaaaattaactttgataagccctgtttccccccccaatttacatgatctttacatggcccataaaacaggcccttatggtttgtttccccaaaggggttttgtttcgggggaccagcttaataaatttgattagccgatgttttggtccaggaccccctttttttttgggccggggaccacccccccccccttgttggggcccacggggccctatgccaaggtgtgggggagggtcaacccgggggggttcccggttttaaagccggagtttcccc

SEQ ID NO: 40786 - DNA, 187 bp, Oryza sativa
  Clone ID: PAT_MRT4530_44194C.1
gaacatggtttctattttttttatatattgaactatggttttagtgtagaagcttttattcttgcttgccatcaaaagccacagcaaaaacgcagtttcatgactaagtgaggtagttgttgaactcgacaggtgttgcaacagagaaaaagggggaggcaataaaagatgatcgcgccctaggggc

SEQ ID NO: 40787 - DNA, 176 bp, Oryza sativa
  Clone ID: PAT_MRT4530_44195C.1
cagcacgaccaaataaaattgcagaccggactaccgggcaggagggcggcatgggcgcgctggcgcgactgaccttgagcaagataaaatagtctggcctcatccgggtgaggcagagacggggggggggtgaggcgacgtcatggagccggtcgcagatagagctagacgaaaaa

SEQ ID NO: 40788 - DNA, 374 bp, Oryza sativa
  Clone ID: PAT_MRT4530_44196C.1
ctgagtaccgattttactttatacttgtgccgatatagttgtgtaactagcttaccagagaggtgtaatggtatgggtttaatgtccaagtattcggttactctatgtcggatgcatggatgtagagtagaatttaataatgtagacttggtgtctagattattaagtatcattaattggggttatatgttgcggatacgtcggggtgggccgctgatggtgacagctcagtacgggtattcctccgcgcgtgtatataatcctaagtgcaatttcctggggagggtactcttccgtatttagccccggttggatggccatgacaggttgtcgtaaggaactcggcaaccaggggtggtctctcaaaacagagg

SEQ ID NO: 40789 - DNA, 252 bp, Oryza sativa
  Clone ID: PAT_MRT4530_44197C.1
atgaaccccaccaggcgaccccggcgacgggagcggagccgagctgccgaggtcgagcagaccctgccggaggcctgtggaggcacggatgaagccacggagggggctcgggccgtaccagagaagagggccatggagaacaagcacaatttgatttcagagccaacaagacctgtccctctcactagtcaccacctagctaaatggtttcaagttctacgcgccttacattttggtgttccaatatgttaa

SEQ ID NO: 40790 - DNA, 333 bp, Oryza sativa
  Clone ID: PAT_MRT4530_44198C.1
atggcccacaaaccaccacaaagaaaagatcggccgcatcgggccatcgccgcatcgatcgccttccgcgccgccacgccgcagcggcggactgacgacgccgtccgccgcgctccggcgtcccgctcgccgccggccttctaccatgacgatccgcaggataatttcagtggctgtcattctcatgaaagggaaagggtgaaaacaataatgtttgattccttttcacaaattactactagtagtactagcataacatatttagaagaaaaaatatacagaaaaggatgtgataaacacaagatgaaccttatccgggaccatgataattaa

SEQ ID NO: 40791 - DNA, 253 bp, Oryza sativa
  Clone ID: PAT_MRT4530_44199C.1
tttaaatcattttaaaattatatatccaatttgtgatctagttgtaaagtccatcaccggtccctaaacttgtaccgctgtgtcatcccggtccctaaactcgcaaatcgaccgttaagatcctcaaacttgttcgactgtgtcatctcggtccctaaacttgtatatcactcgtttagatcctccaacttgttcagttgtgtcacccccggtccctaaacttcagatccgctatcacgtgggacccacctgt

SEQ ID NO: 40792 - DNA, 2171 bp, Oryza sativa
  Clone ID: PAT_MRT4530_4419C.1
atgagtaataagttacacaatagtagtagacattcatttctactggcttggcattcctccaacctcgcgattttacacgaagcaatcagaataatcccgagatatatcgtcgccattgtcgtggaaattctgcgaggcctcctcgtgatcctcctcctgggcttcgtcctccacctcgccggcggcgaccgccacccgccgccggggccgatcgcctgcgcgcgcggcggaacatccggcggctgcacggtcacgaacatctacggctccttccccgaccgcgccgcctgccgcgcggccggcgtcgcgtacccgcgcaccgaggaggagctcgtggcggccgtggcggcggcggcggcggcggggcggaaggcgaaggccgccaccaggtactccaacagcttcccgcggctggcgtgccccggcggcgtcgagggcgagggcggcgtcgccatcagcacgcggtggctgaaccgcacggtgcgcgtcgacgcggcgaggcggctgatgacggtggagggcggcatggtgctgcgtgacctgattagggaggccgccgcggcggggctcgcgctgccgcactcgccgtactggtcgggcgtcacggtcggcggcgcgctggcgacgggcgcgcacgggagctcgctgtgggggaaggggagcgccgtgcacgagtacgtggtcgggatgaggatcgtgacgccggcggcggcgagcgaggggttcgctgtggtgagggagctcgccgccgacgaccctgacctcgacgcggccaaggtctccctcggcgtcctcggcattatctctcaggtaaccctggccttggagccacagttcaagcggtcggtaaaattcgtgaagcgcgacgacgcagacatcgctgagaaggtagcggtttggggccgcctccatgaattcggtgatatggtatggttgccggggcagcggcaggtgatctaccgtgaggacaaccgtgtcaatatttcgacgcctggagatggtctcaacgactacttcggcttccgggcgcaaccgacgctaagcatggtcggcgcaagggtcatagatgagtgtctagaagagaatccaatgtacactgacactgcccgatgcctagcatcccgtgctgtcaccaagatgttcgacctcctggcgtacggcttcaccaacgacggcgccaccttcaccgggtacccggtggtgggctaccagcaccgcatccagtcctccggctcgtgcatgggcagcctggaggagaaggacgacggcctcctcctcaccaccacctgcccatgggaccgccgcacgcggggcgtcttcgcctacaacgtcgccttcaccgtcccgctctcccgcgcgccggcgttcgtggccgacgtgtccaggctccgcgacctcgacccggcggcgttctgccagatcgacgccaagatgggcgtgctcgtgcgctacgtcgcggcgtcgtcggcgtacctcggcaaggcggaggactcggtggacttcgacgtcacctactaccggagccgagcccgcggcgcgccgcgcgcgcacgctgacgtgttcgacgaggtggagcagatggcgctgcgcgggcacggcggcgtcccgcactgggggaagaaccggaacgccgcgttcgacggcgccatcgccaggtacccgaacgccggcgagttcttgagggtgaaggacaggttcgaccccgagggcgtcttctccagcgagtggagcgaccgggtgctcggcgtcggcggggcgagcccggccatcgtcggcgacggctgcgccatggaggggctctgcgtgtgctccgacgactcgcactgcgcgccggagctgggctacttctgccggccggggaaggtgttcaccgaggcgagggtctgctcgttgttgcgagacgctgccgatggctaccttcgcgatcgtcatggcaatgtcagggttaatgcaactagtacagggaagcattcactattgcacgaatgattttcctaaaaaaaacaataggttggacacggattataactggtcgtgtctgtaaaaattgactcgcaccatatatgaaaatcttttatagatgtatcttaagaagctatatgtaaaaatagggcttttttccagaaaagcctcttaggcggccacagggaaatataaaaaaaaaaaaaaaa

SEQ ID NO: 40793 - DNA, 462 bp, Oryza sativa
  Clone ID: PAT_MRT4530_441C.1
atgtcgagaaggagggaagaggaagaaggcgatgacgaggccgaggaggcgcggccgcgcggcgaggtccggtggtgggaggcagatgcgacaggccataggggtggtggtgaggaggaggtgggcggtgctggggtcgggcgggagtcgggcggcggtgtggggtggagtctctttggcctttgctctgcggaggccaaaaagaaccgcaaagcacggaatgaggtgaagaagatggttaggcgcgtcaaacacatgcatgcgcagctcaacgagcatcttcacgtgaatgttccttcctccccaccgggctttgaggctgagcccgatgagcccgaggaggagatagaggatccttttgctgggttgcctccggattttgacttctttgggtttagccatggcgatggctatccccctcctcctcctccagaggatcctcctcaggccccgttcgcttga

SEQ ID NO: 40794 - DNA, 387 bp, Oryza sativa
  Clone ID: PAT_MRT4530_44200C.1
gaaggctgttcggagcacaccaccgcacgggcacaggaccaaagactgagactagctagcctagctgacatggctccaacgtgcgcgaccctggcggaggcggcggtgcctggcgcccgtcccccgccggctaccgccgacgtgggggcgcgcgcttatctactgcctctcggtggacaacacgctgatgccgtgcctgccgtacgtgcagtcggcgggcacggggcccagggcgagctgcggcggcatacagagcctgctcatcgccgccaacaacagccccgagcgccggacaataatgcaggtgcctgaagaacgtcgccaacggcgactcctggggcccctacatcagccgagaccgcgcgctccgctgcaagtgcaacatgt

SEQ ID NO: 40795 - DNA, 753 bp, Oryza sativa
  unsure (1)..(753): unsure at all n locations
  Clone ID: PAT_MRT4530_44201C.1
gcgaggaagggagaaggcgggagttctccatgggtccgaagcggaagccgccggcgagggcggcggcggcgaagttggaccccgacggcatgttccgcggcgtctccgccttcgtcgtcccccacgccgtccagtctcgccgcctcgaggtgtggaagcagaggctggcgcagatggggggacgcgtgcaggagaagctcgccgccaagggcggcggcggcgcggtcacccacgtcctggccgccgacgccaaggcgctgctccgggagctcgacgccgcctggctccaccgctttcgcgggagcgtggtgtcattcgagtggctggaggagtgcctcaaatccggggagaggctaccggagcacaagtttgctatcaactacgaagaggaatttaagccgaagaaggaaggtggtgctgcaggttcaggtgtgttgcagtctgcaaagaggagcaaaatatcatcagacggtcctgagaatcggaaggaaactgctgggggtaatcgagaatctcgagatgcaattgcacatccaaatgaagattcggatgttgtaaaggggcctagcacgtgtacaagtagccaaagtgcctctggagattctaaggaaaccatagcttctcaaaatgcattcanagctgaggaagcctcttctggagaatcctcaacgtatgctcctccagacttgaacaggaacataactgagatttttgggaagctgatcaatatatatagagccctgggagatgacc

SEQ ID NO: 40796 - DNA, 358 bp, Oryza sativa
  Clone ID: PAT_MRT4530_44202C.1
ctcaaatgacaaaatcctttcttgatttatttcatagtcctttaaaccacgccaagagcctgttctgttgaatgtccctgctttacctgttgacaggatgcttttgttggattctgattttactatcgtcatattccatgggcagaccatggcccaatgtcgaaaggctgcgtacccagatcatatatggcttgatggatgtgctcatttgatgaccgctccacctcaggatcctgattccttaattctggagcgctttactgtaccttgtttgatctagagtgataattttagatctcaggctcatactttactagccttgcttataccgactgttaaatataactctgacagttct

SEQ ID NO: 40797 - DNA, 5406 bp, Oryza sativa
  Clone ID: PAT_MRT4530_44203C.1
atggcggcggcggcgtggggcggcacgacgcagaagtgcgactcgtgcgggaggacggtctaccccgtcgaggagctcgccgccgacggccgcgtctaccaccgcccgtgcttccgctgcacccactgcaaggccaccctccagtttagtaactattcttctgtcgaaggtgtcctatattgcaaacctcactatgaccagatattgaaatcaaccggcagtttggagaaaagttttgaagggacatcaaaatcagctaaagcagaaaaatcgaatggaaacaaggggcaaccgaacagattctctagcatgtttgttggcacacaagacaagtgcgtagtttgtaacaagactgtgtaccctcttgaaaaggttaatcttaacgggagctcatatcataaatcatgcttccgttgcacccatggaggctgtactcttagcccatccaacaatgtcacacatgaaggcaaactttattgcaagacccatcactctcaattatttatggttaagggaaacttcagcaattttgaggatagtactccaaatgcaaaagtggatatcgagaagcaaccagaacatgaagatgctaccaagaatccaggaggcccaggtcaaggtgatgggctcactgagaaacctttagaaagtgaactcactcctgagaaaccgtcacaagacgatattgtggctgaaaagcaatcacaaagtagcgttgatgtcccaaaacaatcagaaagcagcacaacagttcagaggtcagaagaaggggaaagggttaccaagggtgagtcaaatagtcatgtagtcagcaagaagccattggaaagcagtgtagaaaagccattccagagcagtgcagttaacttacagccatcaggaagtagtgcagccgtaagaaaaccatggcagcgcaatcttcccacagataagccattgctgagtaacacaaccactgaaaagtcaactccaagcagtgctgccattgaggaatcattgccaagtaatggggttgatgcaaaacagccagaaagcagcactgccagcacagtggtaaaaaggccatggcaacggagggtagctacggagaatctaccgcagagcatttcgccatcagataagccatcatcaaccagtgcagatgatgtgaagccatcagaaaacagcaaattgatcagaaaaccatggcaacgtgctgtggctgctgaggcgcagatacagaacagtggaccaactgagaagtcatcattgacaaatgatacaaagccatcagaaagcaccacatcaattaaaaggccatgggagcacaaagtggtcaatgagaagccactgcagaacaatatagacacggagaagccactgcagaacaatacagacactgagaagtcatctagcagtgctatcgatgtgaagctggcagaaaccagtacaacacccactgtgccacaggaacacagtggaatcacggagaaaccttcacagaccagtgcagatgatgtaaagccatcagagagcactgcagcagtggttaaaaagcaatggcaacgtaacatcggattccagaaacagccccagagcagtgtaactgatgcaaagacacctgaaagcaggggaatgggcaaaagattgtggcagcgcaatgttccaactgaaaagcaatcgcaaagcggtgcgtcggttgtgacaccatcacaagttagtgtggctagcaccaacccgctccaaagcagcgtggttgtgaaaaagccatggcaaagaagcgtgtctagagaaaaagagccagagaaggatatatctagcaacaaaccgttacaaaaccgtgtacttgctgaagaagcagagaaaaccaatgtgactgctgataacaaatcacagatcattcaagataaaaagaacaatggtgctaccacagagaattcatcacaaataagtgaaagtgccaaaaaactaccacttactgcaaataaatcgcaagctgatacttccacagaaaaattgtcagaaagtgacatacttgctgtagcatcatctcagatcactgaaccatctaagaagccatcagaaaacactgctgaaaatgagaagccatcacagactgatattgctactgacgagctacccctgacccaaagtgtagaagccatgtcagaaccatctccaagtgatgcagctcatcaggaaatctccgagagggagatactgacagataaattaccagaaagtaccatggctgttgagaagctatctcaaactgctactctaaccgaaaagccatctaaagaagatgctgcagagaagctaccgcaaaccaatgaaccttctgagcagccacacgagagtgaagagactgctgagaagccacttcaaaatgaagctaatgctgaaagcacaacaaaacaaagtgatctcagtcttgagaagccacctcaggttgatgccaatgttgggaatcctaccgagcctgaaagtgatgccacttctggtgtgaactcatcagatgctcaaatcaggccaactgctgagcagttagtaggacctcaaggcattgtatctgccgagaagacatctgaccagatattagaagctaacaccgatccagctgctgaccagtcatcagagtcccaagatgttgcacctgctaaagttgcaacggagcaaccattagaaaatcaaaaggctgcagcttcagagcagccattggaacctcaacacgaagcatatgaagagaatccacaagagcataatagtgatgcaactgccaaggagtcatcagaacctgaaagagatactgcttctgatcagttggctgagcagccatcagaatctcgaactgcaggtgagaaggcaacactgcgtgaaagtgatgtggttaccgaggatccagcagaacctcaaattgatgcagctgctgaaaggtcagctgaggtgttatcagaatctcaaactggagttgagacaccagtgctgcatcaaagtgatagaactaacgaggttccatcagaacctcaaactgatgaagcttctgacaagtcaactgagcagccattggagcctgaaaatgatgcatctgtcgaggatgagaagccaccggaaatcgaaagtgatgatgtgcatgataaaccatcagaaagcaccccagatactgaaaccctgcctcataacactccaaagagtagcataagcattagcgaagctgcagacggcaacgtttctgaggaggcaccacctcagagcagtgcatccatagaaacgccatcagaaagtgccatagctgtcgaggaaccaaaacacgacgacgaggccagcataaagccatccgaagacagcagtgctcttgaggagccgccgcaggacgatagcgccagcgtggagccatcagagaacactataactcttgagaaggcatcagaggaagatgagggaagtgtaaagccatcagaaggcaatgatgctcttgagaaaacattggaggaggatgaggcgagtgccaagctaccagaagacagtacgacctttgagaagccatcggagaaagatgatgctggcaccaagcagacagaggaccctgtaactcttgagaaggaaccagaggaagacaagggaagtgtggagccaacacaggacaatgctggtcttgagaaaccgttggaggaagacgaggcgagtgcgaagccatcagaggacagtgtggttcttgataagccatcagtggaagatgatgacagcgccaagccatcagaggatagcatggaccttgaaaagccagaggctcacaaaccatcagaggaagaagatggcgcgaccaagtcatcaccggaggatgctgccgttgaggaggcgccattgcaagtcagcgaggaagggagaaggcgggagttctccatggctccgaagcggaagccgccggcgagggcggcggcggcgaagttggaccccgacggcatgttccgcggcgtctccgccttcgtcgtcccccacgccgtccagtctcgccgcctcgaggtcgcggctccaccgagcaatccatcccaacccccaccaactctctctcctgtgcttagggtttcctggctttcgtcgtcggtgcaggtgtggaagcagaggctggcgcagatggggggacgcgtccaggagaagctcgccgccaagggcggcggcggcgcggtcacccacgtcctggccgccgacgccaaggcgctgctccgggagctcgacgccgcctggctccaccgctttcgcgggagcgtggtgtcattcgagtggctggaggagtgcctcaaatccggggagaggctaccggagcacaagtttgctatcaactacgaagaggaatttaagccgaagaaggaaggtggtgctgcaggttcaggaagcctcttctggagaatcctcaacgtatgctctccagacttgaacaggaacataactgagatttttggaaagctgatcaatatatatagagccctgggagatgaccgaagatcatttagctattacaaggctattccagtgattgagaaattgccattcaaaatagaaagcgctgatcaagttaaagacctccctgctattgggaaatcattgaaagaccatattaatgagatagtaaatacaggaaagctttccaagctagagcactttgagaatgatgagaaggttcgaactgtcagcctatttggcgaagtttggggtgttggtcctgcaactgctctcaagttatatgataaaggacatcgtacactggatgaccttcaaaaagacgattcacttacaagtgctcagaggattggcctgaagttctttgacgatatcaaacaaagaataccccgacatgaggttagtgagatggagaagcttttgcaagaagttgggactgatatcttgcctggggtgataattgtatgtgggggatcatacagacgtggaaaatcttcttgtggtgacatggatattattatcactcatcctgatggtgaaagtcatgtaggctttttaccaaaatttgttcagcgcttgaagggcatcaattttttgagggaggatcttattttcagcatacacagcattgagggaactgattgtggagttgacacatattttggtctttgcacatatcctgggcgtgagctgcgccatcgcatcgacctcaagaaggtatacccaaggaacagacatgcatttgggctgcttgcttggactggcaatgatgttctgaatcgacgattaagaatactagcagattccaaaggctacattcttgacgacactggtttgtatcttgctacaccgggcagtggtggaaagcgtgggggaagatcagatgctataattaattgtgacaccgagaaggatgtgttcgatacacttggattcccctggttggaacctcacgaacgtaatctctag

SEQ ID NO: 40798 - DNA, 678 bp, Oryza sativa
  Clone ID: PAT_MRT4530_44204C.1
ctacggtggggcagccattggtaggacagcgaagcgggtgtctacaatggtatcgccatcggtaggattcctgagagacaggaaggtggacgtcctcagaaaaccatgacgactcaatggcgggaagctatccttgggatcacaatggatggtggacagaaccgtcgttgtttaatgtgaacactggtcttgttccccagtcgactgcctgtggcatgttaatcgggcccttatattactttgtcttccgctgttgttctctgatagttgttggcctacctggccctaatggattggtacggataaacacagaagatttccgatttccaaaatcgggggtctacacggaggggagcgcggatccggcggccggccgccctccctcgcgggatccagctcccctcctctccccgtccttccctcccctgatccggcggaggggaggggcgtcagcggcggtgcggccgaaggggagcacagatgccgatggcggatggcgtgaaggccggcggcgcggaggccgccgtcgccgacgatgagggcgggagcagcgtcctcggtcgccgccgccgacgacgacgagaaggacggacctaaaatagtcttatttccgtcccatgccggtcggcccacggccttatcaaaaccctaaccctaaccctaaccttccccacccct

SEQ ID NO: 40799 - DNA, 5941 bp, Oryza sativa
  Clone ID: PAT_MRT4530_44205C.1
gcaaaccattgtgatgtctgagagttttttagaaatggatttacaacagagttatatatatactgttgtctgcagttagtacatgccagcaaaagagagtttgaccattgcggcaagtgtcaaagacaaaaacaacattgcttttctgcagtacgagaaaacaaaactataaaaatctagcaaactacatctacatttttcctaatttctacaatcaggtttggaaacagcgttcctactctcaatagaaagtaggggaaatacaaaaggtatatagctctagcaaactgcattttctacagaagggtttcgacaaaggctagagattacgttcgtgaggttccaaccaggggaatccaagtgtatcgaacacatccttctcggtgtcacaattaattatagcatctgatcttcccccacgctttccaccactgcccggtgtagcaagatacaaaccagtgtcgtcaagaatgtagcctttggaatctgctagtattcttaatcgtcgattcagaacatcattgccagtccaagcaagcagcccaaatgcatgtctgttccttgggtataccttcttgaggtcgatgcgatggcgcagctcacgcccaggatatgtgcaaagaccaaaatatgtgtcaactccacaatcagttccctcaatgctgtgtatgctgaaaataagatcctccctcaaaaaattgatgcccttcaagcgctgaacaaattttggtaaaaagcctacatgactttcaccatcaggatgagtgataataatatccatgtcaccacaagaagattttccacgtctgtatgatcccccacatacaattatcaccccaggcaagatatcagtcccaacttcttgcaaaagcttctccatctcactaacctcatgtcggggtattctttgtttgatatcgtcaaagaacttcaggccaatcctctgagcacttgtaagtgaatcgtctttttgaaggtcatccagtgtacgatgtcctttatcatataacttgagagcagttgcaggaccaacaccccaaacttcgccaaataggctgacagttcgaaccttctcatcattctcaaagtgctctagcttggaaagctttcctgtatttactatctcattaatatggtctttcaatgatttcccaatagcagggaggtctttaacttgatcagcgctttctattttgaatggcaatttctcaatcactggaatagccttgtaatagctaaatgatcttcggtcatctcccagggctctatatatattgatcagctttccaaaaatctcagttatgttcctgttcaagtctggaggagcatacgttgaggattctccagaagaggcttcctcagctttgaatgcattttgagaagctatggtttccttagaatctccagaggcactttggctacttgtacacgtgctaggcccctttacaacatccgaatcttcatttggatgtgcaattgcatctcgagattctcgattacccccagcagtttccttccgattctcaggaccgtctgatgatattttgctcctctttgcagactgcaacacacctgaacctgcagcaccaccttccttcttcggcttaaattcctcttcgtagttgatagcaaacttgtgctccggtagcctctccccggatttgaggcactcctccagccactcgaatgacaccacgctcccgcgaaagcggtggagccaggcggcgtcgagctcccggagcagcgccttggcgtcggcggccaggacgtgggtgaccgcgccgccgccgcccttggcggcgagcttctcctggacgcgtccccccatctgcgccagcctctgcttccacacctgcaccgacgacgaaagccaggaaaccctaagcacaggagagagagttggtgggggttgggatggattgctcggtggagccgcgacctcgaggcggcgagactggacggcgtgggggacgacgaaggcggagacgccgcggaacatgccgtcggggtccaacttcgccgccgccgccctcgccggcggcttccgcttcggagccatggagaactcccgccttctcccttcctcgctgacttgcaatggcgcctcctcaacggcagcatcctccggtgatgacttggtcgcgccatcttcttcctctgatggtttgtgagcctctggcttttcaaggtccatgctatcctctgatggcttggcgctgtcatcatcttccactgatggcttatcaagaaccacactgtcctctgatggcttcgcactcgcctcgtcttcctccaacggtttctcaagaccagcattgtcctgtgttggctccacacttcccttgtcttcctctggttccttctcaagagttacagggtcctctgtctgcttggtgccagcatcatctttctccgatggcttctcaaaggtcgtactgtcttctggtagcttggcactcgcctcatcctcctccaatgttttctcaagagcatcattgccttctgatggctttacacttccctcatcttcctctgatgccttctcaagagttatagtgttctctgatggctccacgctggcgctatcgtcctgcggcggctcctcaagagcactgctgtcttcggatggctttatgctggcctcgtcgtcgtgttttggttcctcgacagctatggcactttctgatggcgtttctatggatgcactgctctgaggtggtgcctcctcagaaacgttgccgtctgcagcttcgctaatgcttatgctactctttggagtgttatgaggcagggtttcagtatctggggtgctttctgatggtttatcatgcacatcatcactttcgatttccggtggcttctcatcctcgacagatgcatcattttcaggctccaatggctgctcagttgacttgtcagaagcttcatcagtttgaggttctgatggaacctcgttagttctatcactttgatgcagcactggtgtctcaactccagtttgagattctgataacacctcagctgacctttcagcagctgcatcaatttgaggttctgctggatcctcggtaaccacatcactttcacgcagtgttgccttctcacctgcagttcgagattctgatggctgctcagccaactgatcagaagcagtatctctttcaggttctgatgactccttggcagttgcatcactattatgctcttgtggattctcttcatatgcttcgtgttgaggttccaatggctgctctgaagctgcagccttttgattttctaatggttgctccgttgcaactttagcaggtgcaacatcttgggactctgatgactggtcagcagctggatcggtgttagcttctaatatctggtcagatgtcttctcggcagatacaatgccttgaggtcctactaactgctcagcagttggcctgatttgagcatctgatgagttcacaccagaagtggcatcactttcaggctcggtaggattcccaacattggcatcaacctgaggtggcttctcaagactgagatcactttgttttgttgtgctttcagcattagcttcattttgaagtggcttctcagcagtctcttcactctcgtgtggctgctcagaaggttcattggtttgcggtagcttctctgcagcatcttctttagatggcttttcggttagagtagcagtttgagatagcttctcaacagccatggtactttctggtaatttatctgtcagtatctccctctcggagatttcctgatgagctgcatcacttggagatggttctgacatggcttctacactttgggtcaggggtagctcgtcagtagcaatatcagtctgtgatggcttctcattttcagcagtgttttctgatggcttcttagatggttcagtgatctgagatgatgctacagcaagtatgtcactttctgacaatttttctgtggaagtatcagcttgcgatttatttgcagtaagtggtagttttttggcactttcacttatttgtgatgaattctctgtggtagcaccattgttctttttatcttgaatgatctgtgatttgttatcagcagtcacattggttttctctgcttcttcagcaagtacacggttttgtaacggtttgttgctagatatatccttctctggctctttttctctagacacgcttctttgccatggctttttcacaaccacgctgctttggagcgggttggtgctagccacactaacttgtgatggtgtcacaaccgacgcaccgctttgcgattgcttttcagttggaacattgcgctgccacaatcttttgcccattcccctgctttcaggtgtctttgcatcagttacactgctctggggctgtttctggaatccgatgttacgttgccattgctttttaaccactgctgcagtgctctctgatggctttacatcatctgcactggtctgtgaaggtttctccgtgattccactgtgttcctgtggcacagtgggtgttgtactggtttctgccagcttcacatcgatagcactgctagatgacttctcagtgtctgtattgttctgcagtggcttctccgtgtctatattgttctgcagtggcttctcattgaccactttgtgctcccatggccttttaattgatgtggtgctttctgatggctttgtatcatttgtcaatgatgacttctcagttggtccactgttctgtatctgcgcctcagcagccacagcacgttgccatggttttctgatcaatttgctgttttctgatggcttcacatcatctgcactggttgatgatggcttatctgatggcgaaatgctctgcggtagattctccgtagctaccctccgttgccatggcctttttaccactgtgctggcagtgctgctttctggctgttttgcatcaaccccattacttggcaatgattcctcaatggcagcactgcttggagttgacttttcagtggttgtgttactcagcaatggcttatctgtgggaagattgcgctgccatggttttcttacggctgcactacttcctgatggctgtaagttaactgcactgctctggaatggcttttctacactgctttccaatggcttcttgctgactacatgactatttgactcacccttggtaaccctttccccttcttctgacctctgaactgttgtgctgctttctgattgttttgggacatcaacgctactttgtgattgcttttcagccacaatatcgtcttgtgacggtttctcaggagtgagttcactttctaaaggtttctcagtgagcccatcaccttgacctgggcctcctggattcttggtagcatcttcatgttctggttgcttctcgatatccacttttgcatttggagtactatcctcaaaattgctgaagtttcccttaaccataaataattgagagtgatgggtcttgcaataaagtttgccttcatgtgtgacattgttggatgggctaagagtacagcctccatgggtgcaacggaagcatgatttatgatatgagctcccgttaagattaaccttttcaagagggtacacagtcttgttacaaactacgcacttgtcttgtgtgccaacaaacatgctagagaatctgttcggttgccccttgtttccattcgatttttctgctttagctgattttgatgtcccttcaaaacttttctccaaactgccggttgatttcaatatctggtcatagtgaggtttgcaatataggacaccttcgacagaagaatagttactaaactggagggtggccttgcagtgggtgcagcggaagcacgggcggtggtagacgcggccgtcggcggcgagctcctcgacggggtagaccgtcctcccgcacgagtcgcacttctgcgtcgtgccgccccacgccgccgccgccat

SEQ ID NO: 40800 - DNA, 167 bp, Oryza sativa
  unsure (1)..(167): unsure at all n locations
  Clone ID: PAT_MRT4530_44206C.1
gntaataaaacaacaatttgaagcctcttgcagggccaatttccagtggatggagtgacttacgtcaatttcacaacaatcgatacaacttacaagacaccaacatgaaacacagagtctaaccacacatctacacaacgcttataagggaatttcgctaacacctt

SEQ ID NO: 40801 - DNA, 187 bp, Oryza sativa
  Clone ID: PAT_MRT4530_44207C.1
agatgtctccgcgacgagttcagagctcaccatggcgctcacggcttgcacctccgctctgcaagacatcaccccgcaaccaacagtcatcaccgaggccgacaagctcggccatcatgccgttctcgccttgtaaacaaacaaacgacggcagaacttgtcgccggtcgatcgatcaccgccgcac

SEQ ID NO: 40802 - DNA, 210 bp, Oryza sativa
  Clone ID: PAT_MRT4530_44208C.1
atggtcaaccatcctcatgccccctacccacgtcgacgtcaaacagtattagccagcatccccacctcctccctctctgccctggagacggttgatggtgtcggcgctgtaggtggcgtcaatgagccatccgatcccaggttaggggagagcggtgttccaattgagggcaacgctttgggctcgagcttcggcgccaaccggctctag

SEQ ID NO: 40803 - DNA, 2400 bp, Oryza sativa
  Clone ID: PAT_MRT4530_44209C.1
atggcgcgtgcactgccatgctctcctcccgctagcgctgcctcttgggcttcagccctctcgtgcgtgtagacacccaccccttcctgcaggctggtgtcgggtcacgccggcgctcgcgtgcgccgcctagtgcgtccccaacaatactggttccctgccccttagccatacccgattcaccgccccttcgtccgagtgttttacagctgctttaatgactacgcggtgcgcgtcgtgttccctcgctggggcagtggtccagactggggaacctcccagccaaattcattctcttggtttattatcatctgaccggtctgtagtcaagtccctaagggttattctacatatacctgcacgaccgatgcaagcaacagttcagcattcgccagattcggtgggtttgtgtgccttcttgtctccgttgccaatttgataagatgcctcccgatggaagacatcgttgtttttgaccctggtattattccttgctggagattgcttgctttctcttccctattgagactaaagggcgtggaatggattgatgttcatgctgctcttcattttttaaaggaagttgggatttagatgggcatgtagatgagttactattcatcagatttatcattgggggtgtacatatcattatacatgtagatttttatagtggatattaagttgtaaagttcctcaaatatgtggactttgcaaacttgggcattttatttttggtgtaccctcctccaggctgataagccggccggactgtaaaatggattatgtaaacatcatttcttgtataagcatctaagaatgctttattgatgtttaaaagaattactaactaaattcaaccctgtttgccagtggaatgggttttctaagtgctttctctcctaattattcatgcttgctggctctacgttttctcgttggcataggagtgggtggtgcacatgtgtttacatcttggtttttggagtttgttcctgcacaaaatcgtggcacttggatggttattttttcctgtttctggactattggcaccatcttggaggcttcacttgcatgggttgttatatcagtattgagttggaggtggttgctagcattgactgcacttccatgctctctcttgattccattctttggaactacacctgagtcaccgcgctatttatgtgggcaaaatagaacatctgatgcaatgcttgtcctggagagaattgctataacaaaccaagcagctcttcctcctggagttctcatataccatcaggaagcaaaagttgaccacagtgatcttacttctgagaaagaagatctcctcccagtcagcgagaaggaatgcacatttgacaatgccatgagcttcaaatatggtggtggcattgctgcattgctcaggctattgtcacgcaaattgctaagatcaactcttcttctttggtttgctttcttcgcaaattcatttgcttattatgggctagtattgttgaccgcacaactaagcgatgcaaatagaagctgcacatctgggcaaacaaatgtagtgccacagaaagatgttaacctttacaaagatacattcattactagtttagcagaggttcctggcctgattttatctgctgttcttgttgattggtttggccgaaaagcttcgatgtggttcatgttattcacatgctgtgctttcatcggaccacttgtgcttcagcagaatgagctgttgacaactgtccttctatttggtgcccgcgccgttgccatgggtagcttcacagttttatgtttatatgccccagaggtttatccaacatctgcgcgctcaaccggtgttggcatcgctaccgctattggcagaatcggtggggttgtttgccctcttgtcgccgttggcatgttgagaagctgccaccagatggaagccatccttgtttttgagctggttttattccttgctggagttgcttgctttctcttccctattgagactaaagggcgtggaatggattgatgttcatgctgcacttcttttttaaaggaagttgggatttaaatgggcatgtaaattatttcatttcatcaaatttatctatgggggtgtccatatcattaaacatgtagatttttatagtggaaattaagttgtaaagttccccaaatatgtggactttgcaaaattgggcttcccccccccccgcacccataaaggggtgataagcaggccggactgtaaaatggattatgtaaccatctttcttgtataagcatctaagaatgcttttttgatgtttaaaaaaaaaaaaaaaaaaaaaaaaaaaaaaaaaaaaaaaaacccaccccaccaagggcggccgtaaagaggtccaagcaagtacgcggcagcga

SEQ ID NO: 40804 - DNA, 306 bp, Oryza sativa
  Clone ID: PAT_MRT4530_4420C.1
atgaggaatccgctgtcaacgagtatcgctgctgcatcgaccagggaggaggccgaggccaccggatctagcgacctcacctccttgctgtggatctgggtgtccggagtggatagcggatgggacaacgacgaggagcgactaggattgtggctcggtgatggcagcggcgacaacaacctcgccagatttggtagccatcggccagccatttccttccttgtaagcgaggatgaaaaggtggcgaccatgctctccatcaatgaccacgatgacaaccacggtgggaggactgcatgtgtttga

SEQ ID NO: 40805 - DNA, 199 bp, Oryza sativa
  unsure (1)..(199): unsure at all n locations
  Clone ID: PAT_MRT4530_44210C.1
tgcntaacccacttggcggttggactatatatgttccctgaagcacatatcagggaccgacattacaaatttacaattatccttttcnaggttccgncaggtgatcatttacatggttaataaacaggacagctaatatacccgggacanaataanaggtagctggctttttctaggtgagttacagtggtgcattcta

SEQ ID NO: 40806 - DNA, 624 bp, Oryza sativa
  Clone ID: PAT_MRT4530_44211C.1
atggccggcgacaagctccaaaaggcgacgaggtactgtccacggtggcgacggcgtttcggcgaccttcggcgacaatggaagggtggccgggcttcacttcgcagctgcgaatccaatggatcaaaacacgacggcgagcttcgggttgatggcgacgatgggcttcccggggtcttcggcgcaagggaacgggctgccgggcttgctcttgaccttgcggagccgagagaggtggcggcacaggagggcgacggccgaggcggcggcaaacggcggctggagcggcggatttggaggagaaaacggcgctgcacaatctcgggatggctggctcgggctgtctggagctggaagatgaacaataccggcgaagtaaagtagactttggctgggcttcctttttctccagcccgaagccggccgtggtgctggcaacggcgtgaggcatggtgctgcggcgcaaggtgcctcggccgaggatggcctttgccgatggtcggcgttggcggctgccgggctcttggtacagcggccagctatccagccggcgcatgtggcggacgatgccatcgtcgagggtggcgtccgggtggcggtggagccggagcaagggaaccgcat

SEQ ID NO: 40807 - DNA, 534 bp, Oryza sativa
  Clone ID: PAT_MRT4530_44212C.1
gcacgaggagctgatgataaggtaactttgtagttactactccctcagtctccaaatttagctagttcacctcccttatctcaaccgatcacatccatctctcatttaatttttccacctacttccttatctcaaccaatcacatccactcctcatggtctcatttgatttcaactcttaccttaatctccgtgaaaaactccataagtgtgtatatcttgggatggagtgagtactttgtgaattgcatacttatcggcatgatggagtaatggtgccatcatttgtttttacaacacgcttataagtattcccaaaaaaaaacaacacgcttataattcatcttttccccctcaatattaggaagccctttcattggcagttaagtactatcttcgtcccaacatgaagcatttctagatatgatcatggctagaaataccgccattgccctaagattgacagttcaataccgtcacggtgggaggcgggagtgctgctcatagcgactctcttctcgaactctccagaacc

SEQ ID NO: 40808 - DNA, 723 bp, Oryza sativa
  unsure (1)..(723): unsure at all n locations
  Clone ID: PAT_MRT4530_44213C.1
acggccgccaccccgcttaggtttaggtcttctccgcctccggtttctccctccgccgtcgaaatggtcgcctacaggttccatcagtaccaggtggtgggtcgcgcgctcccgacccccggcgatgagcaccccaagatctaccgcatgaagctctgggccaccaacgaggtacttcctgaggaagctgaagaaggtgaagaagagcaatggacagatgctcgccatcaacgagatctttgagcgtaaccctacaacgatcaagaactacggcatctggctgcgttaccagagcagaacaggttaccacaacatgtacaaggaataccgtgacactactctgaatggtgctgtggagcagatgtacaccgagatggcctctcgtcaccgtgtgaggttcccctgcattcagatcatcaagaccgcaacagttcacttcaagctctgcaagagggacaacactaagcagttccacaactcgaatatcaagttcccgctcgtgtaccgcaaggtcaggccgcccaccaggaagctgaagaccaccttcaaggcatctaggccgaacttgttcatgtgatctaccagtgtgtacccatgttctgcaatttagcccaagaatcaaaagattttgtctgtgggagttttggtgccctgctggttangcatttccagtttcatatccaaatgatgcttaggcatttccagttacccctcccaatgatg

SEQ ID NO: 40809 - DNA, 885 bp, Oryza sativa
  Clone ID: PAT_MRT4530_44214C.1
ttttttttttagttattcactggagcaattatatattgaagtcaatctgaggcaagtgttcggatctattatgacataaggattgggtgcctaacggactttttttatcttggatttctccacgtaacaaaaaaacctttttttaatttaaaaagctagtctattttttttaagagtataagtccctatctatatctactttccttgagcataatatagatttttttattcgattccaaattccaagataactcattagaattattaataagatggtcctgatatattagcaatatttatattgcccctttttattcgctttattacttctattctagaccctatcgtttatccttatgaaatataatataaaatagaaggcagaggaaagagatataatgaaattcttgattcgatcttccgacctaatttatttgattaatggatcaacaaccaaacccccattttctgaaaaaggagagtggtcttattcaaattcaaagcgcttcgtaatcttcaaccagttctgtgcttcaatataatttcccggagtaagcgctatagcttgtttccaatactcagcagcttgatcaaaccaagcttctgcaatttctgaatcaccctgtagaatggcctgttctccccggtcggaataggtagttccttcccctagaaccgtacttgagagtttcctacctcatacggctcagaaattgctatcttaatttcccttgtcttaactgaattcgatttctcaaaaatcgatccaatttcttcttgggttacgcagaagaagttaattacctaagtttcaaacccttaattttgatcaataatcagttttgatcttttctcccacctgcagaaaaatgaagcatagataga

SEQ ID NO: 40810 - DNA, 705 bp, Oryza sativa
  Clone ID: PAT_MRT4530_44215C.1
atggccgcggaggtcgccgccggcggcgactccggctggagcagcggcagcgcgacgttctacggcggcagcgacgcgtcggggacgatgggtggcgcgtgcgggtacggcaacctgtacagcgccgggtacgggacgagcacggcggcgctgagcacggcgctgttcaacaacgggcagagctgcggcgcgtgcttcgaggtccggtgcggcggcggcggcagctgcctcgccggcaccgtggcggtgacggccaccaacctctgcccgcccaactacgcgctcgccggcgacgccggcgggtggtgcaacccgccgcggccgcacttcgacatggcggagccggcgttcaccaggatcgcgcaggcccgcgccggcgtggtgccggtgcagtaccggcgcgtggcgtgcgcgaagcagggcggcatccggttcaccatcaccggccactcctacttcaacctggtgctcgtcaccaacgtcggcggcgccggcgacgtgacggcggtgtcggtgaaggggtcgcggtcggggtggcaggccatgagccacaactggggcgccaactggcagaacggcgccaacctcgacggccagccgctctccttcagggtcaccgccagcgacggccgcaccgtcacctccgacaacgtcgccccctccggctggtccttcggccagaccttctccggcggccagttctag

SEQ ID NO: 40811 - DNA, 3501 bp, Oryza sativa
  Clone ID: PAT_MRT4530_44216C.1
atggctgggcaacgccgtgacggaccagcccgccctctcccccatcctcccgtaggttaggctagtgctagcggtttcgaggagctcgcggaaatggtggccctcagcgttccatcagtcccaggtgtgtggggggcgcgcgctgccgcacccccgtgcgatgagcaccccaagatctagcgggtcaagcactcggcgaccgccggcgctccgcgccaagaggcacttatctgggactgcgagatgaacagctgaagaggggtcacgaagatgcaaaggaccaggactgctcggcataaacgcagcatcttcgagcgcacgccaaatccaccgtaaggagctaatggccaccagctgcgttagcagagcggaaaccgggtgcccacacccccggccaggacggccgccaccccgcttaggtttaggtcttctccgcctccggtttctccctccgccgtcgaaatggtcgcctacaggttccatcagtaccaggtggtgggtcgcgcgctcccgacccccggcgatgagcaccccaagatctaccgcatgaagctctgggccaccaacgaggtccgcgccaagtccaagttctggtacttcctgaggaagctgaagaaggtgaagaagagcaatggacagatgctcgccatcaacgagatctttgagcgtaaccctacaacgatcaagaactacggcatctggctgcgttaccagagcagaacaggttaccacaacatgtacaaggaataccgtgacactactctgaatggtgctgtggagcagatgtacaccgagatggcctctcgtcaccgtgtgaggttcccctgcattcagatcatcaagaccgcaacagttcacttcaagctctgcaagagggacaacactaagcagttccacaactcgaatatcaagttcccgctcgtgtaccgcaaggtcaggccgcccaccaggaagctgaagaccaccttcaaggcatctaggccgaacttgttcatgtgatctaccagtgtgtacccatgttctgcaatttagcccaagaatcaaaagattttgtctgtggaagttttggtgccctgctggttaggcatttccagtttcatatccaaatgatgcttaggcatttccagttacccttccaaatgatgctttgcaaacccttgaatttcctcgtattagtaatcagcagacttcttgttacttcaaactggctcacttggaagtgttgatccctgatgtgctattaataaaatgggaaaaaagaaaaaaaaaaacccgcggccaataaacacttcttcgcctgtaccgcagttgactcgcgcaagtggcagcaaggctggctcctccacacctcgtcgccgtagtatgcgatccaatgttgagaacttggatggcatcgctagaggggatgacgactcgctgctcaaggcaatgaagaggacagcagtgcgtaatttggatgatagctttgcggcacgggaggtttcggcaccgacgaatcagctgcactcggcctctcgtattgcatcatttcagcaaggagtttctttgggtacttctaatgtttcttttctgctcaatgtcttgaaacatattgaggtagatagaacaaaagtagcaaccaagcctagagaaaacaaccagtccatttcttttgtgtcggaggtagatccttttatgacaagtgatgacgagggcgacgatattgatggcgccctactcgctcacttagttaaggatatctcggagattgatatggaggatgtagaccaaagggaagcggcctttgccggaaaccttaagcagttcaagatggaacttagctggtttctgcgcgacgatttccatgatcgtgttgtcgaaatttggaataaaccaatcaagggtcgtaatgcagtccaacgatggaataaaaaaatgagcgctttacgccgacatctgagagaaataaaggaagcgatctttgcaatggatcataataaagctcctggaccagatggtttcccagttgaattttaccaaaaattttgggaagtcattaagcatgatctactgaatttatttaatgaattccactctggcagccttccaatttttggtctaaactttggggtgattactcttattccgaaagttgaagaagcaaatcgaatccaacaatatagaccaatatgcttgttaaatgtcagttataaaatattcactaaggtcgccacaaaccgaattagctcggtagctgacaatttagtgaatccaacacaaacagctttcatgcgtgggcgaaacatcttagatggagtcgccatcatacatgaaacagttcatgaactacacagaaaaaaattaaatggggtgatattcaaaattgactttgaaaaagcctatgacaaggtcaaatggcccttcttgttacaaactctacggatgaaaggtttctcgcccaagtggatttcttggatcaaatctttcatcgtcgggggaagtgtggcggtcaaagtcaatgatgatgtcggaccttttttccagactaaaaaaggccttcagcaaggagaccctctctccccaatcctattcaactttattgttgacatgttagctaccttgataaatagagccaaaacacaagggcaagtagatggtctcattccgcatttgattgatgggggactatctatattacaatatgtcgatgacatagttctttttatgaatcatgaccttgagaaagctcagaatatgaagtcggtgcttctagcctttgagcaattgtcaggtctgaagatcaattttcataaaagtgaactatattgttttggcgaagcacttgagtatagagatcaatatgcccaactcttcggttgccaggttggttctattggcaaggggatggccataagaaaaaataccagcttgctaagtgggacatcatctgtcgtcccaaagatcaagggaggctgggaattcatgacctcgagcggaggagcgcggatgcggggggtgcagcggaaggcgagcgcggcggaggagcggcggcgggcgagcgcagcggtgggcaaagcagcggagggcgagctaggcgaagcggaagacagtggatgggacgaggagctcccccatgctcggccgccgtcaccgccgtggccccgcgggtggccgacgatgctaggagaggcaccgccggcggcagaaggggaagaggcagaggaagagattgtttcttggtcgccgaccgcctctccctccctcctaaactcgctggccgccgcgctcgcgctccgctactctgtccgcggcctgctcgcgctccactgctcggaccgtcgccgcactcgcgccttccactgctccgttgccgcgctcgccctccgctgcgccgcccgcatctgtgctcgccgctccgcccgctacctccgctccgccgccgcgctccgctgcctccgctccgccgccggatggccgcgccgcgtagcctcgcccacggtgacgacgacggtggagagctaa

SEQ ID NO: 40812 - DNA, 1347 bp, Oryza sativa
  Clone ID: PAT_MRT4530_44217C.1
ccggccggggccttcgcccgccgcctcctccgcgctctcccccatcctcccgtaggttaggctaggctagggtttcgaggagctcgcggaaatggtggccttcaggttccatcagtaccaggtggtggggcgcgcgctgccgacccccggcgatgagcaccccaagatctaccggatgaagctctgggccaccaatgaggtccgcgccaagagcaagttctggtacttcctgaggaagctgaagaaggtgaagaagagcaacggccagatgctcgccatcaacgagatcttcgagcgcaacccaaccacgatcaagaactatggcatctggctgcgttaccagagcagaaccggttaccacaacatgtacaaggagtaccgtgacactacattgaatggtgccgtggaacagatgtacaccgagatggcttctcgccaccgtgtgagattcccttgcatccagatcatcaagaccgccactgtccacttcaagctctgcaagagggacaacaccaagcagttccacaacgggagcatcaagttcccccttgtgtaccgcaaggtcaggccgccaaccaggaagctcaagaccacgttcaaggcgtcgaggccaaacctgttcatgtgattggttacgaagtgatgtggatctttgtttggtagtacaagagttggaaagtttttcgtttgttgaaagttttgatgcgcaaaagactttgagcattttgatacttatttatcgtttggaacatgcttggcaaaccttatgcatatggcgttattagtaattggcagacttaaatcttgcttggtgtttgatatatataatctgcttggtttggtcgtgtactaggctgacgcagatcggttttttggcgcccaaaattattgagtgcacacaactcgaatatcaagttcccgctcgtgtaccgcaaggtcaggccgcccaccaggaagctgaagaccaccttcaaggcatctaggccgaacttgttcatgtgatctaccagtgtgtacccatgttctgcaatttagcccaagaatcaaaagattttgtctgtggaagttttggtgccctgctggttaggcatttccagtttcatatccaaatgatgcttaggcatttccagttacccttccaaatgatgctttgcaaacccttgaatttcctcgtattagtaatcagcagacttcttgttacttcaacctggctcacttggaagtgttgatccctgatgtgctattatttatctctgtaatttgtgatggcactgtctttctggtctggtcgaacgattacatattttacttcctgttcctgggtgttaagtcgctttgcattttatt

SEQ ID NO: 40813 - DNA, 174 bp, Oryza sativa
  Clone ID: PAT_MRT4530_44218C.1
atggcgttgcgtcaaatcgtcagacactcatcagactgtgcgtggctagagctaaaacgccatacgtacgggaacgtgatgtcacaggagaagcagaaagcccgcggctacggctcgcgcgccggcggcagcgggtgcctcctccgccgccgtcctaatggcctaatgctctaa

SEQ ID NO: 40814 - DNA, 210 bp, Oryza sativa
  Clone ID: PAT_MRT4530_44219C.1
gtgtggtaacaaggttgatgtgaagaacaggcaggttaaagccaagcaggatcacattccacaggagagaagaatctgcatgtactatgaaaaatattctgaccagaagccactacacttgagaagccttccttatacttgcagagcttgctggtgaccgacgtacttcgtgagctgtgtcctatctcgagtcatgatcgagctagctag

SEQ ID NO: 40815 - DNA, 403 bp, Oryza sativa
  unsure (1)..(403): unsure at all n locations
  Clone ID: PAT_MRT4530_4421C.1
cggccgggnaccttacccctgttgaacagagagtgagtagagagatgagagagagagagaggagactccccctcgcgcaccgagctagggatttcaatccccgcacgccttctccgtcaccggcgtcatctggcttcgtctggcggcgcgaccaggatcacagttgctatggaacacaaggaggctggatgacaccaacccggggggcggatcctttggataaacaactgtggtttctttgggagcgcggcgaccatgaacatgtgctccaagtgccacaaagagatgatcatgaaagacgagtagggcaagattgctggcttctccatcgatagtattttcaatggttgagacggaggaaaggagcatataggtgctgtaagtggtactacgcgtgtggctg

SEQ ID NO: 40816 - DNA, 583 bp, Oryza sativa
  unsure (1)..(583): unsure at all n locations
  Clone ID: PAT_MRT4530_44220C.1
ccgggtcgatttagcgtccgcacatttcgaactattctttcgcctgttactaagaataccatgtagcgcgccacaaatagcagcatactcttatttatggagggtgttttctctttttgagaaaacgctcttaaaaaaaaaaaaaaaaaaaaaaaaaaaaaaaaaaaaaaaaaaaaaaaaatttttttaaaaaagagggggtggaaaaaaaaaaatataaagagttttttaaaaaaaaaaaaaaaaaaaaaaaaggggcccccctttttaaaaaaccaaactttacccccccttccttccaacttaaaattttttttttggggcccccaaaataaaataaatggcccgggttttaaaaaccggggaagggaaaaacccttgggttccccaaattaaaccccttgaaaaaaaatccccttttcccaagttgggtaaaaacaaaaaagcccccccccaatcccctttccaaacatttgcccaccctaatgggaaattggacccccccttttancggcccttaaaccccgggggttgtttggttaccccccaggggaccccttaaatttgccaggcccttaacccc

SEQ ID NO: 40817 - DNA, 353 bp, Oryza sativa
  unsure (1)..(353): unsure at all n locations
  Clone ID: PAT_MRT4530_44221C.1
atcattgttgccgccatgtcgtcgtcttcctcattgtacaagcagctcggcctcggagccggctctcccgtctcnncctctcacctgcttctgctcgtcctcggcgccggcttcctcgcgctcaccgtcttcgtcgtccaccccaacgagttccgcatccagtctttcttctcnggnggctgcggccgtcctggcacggacgccgccacnnangccgttgctgcctcgncggtcaagaatntnagcggcggcgtaagtaatgctgntgncgcgaccacggngtcgngggttngcgggacaacgangtgaggggtgctcatcggcatncagacgttgccgagcaagtacgagcg

SEQ ID NO: 40818 - DNA, 234 bp, Oryza sativa
  Clone ID: PAT_MRT4530_44222C.1
atgggcgggagcgcggagcacgcaacgggacgaacaccaaagggtggcgacttggcgtggcaaaaacggcgcgcggcgcgcgacgccgaggcgaggcgagaggagcgtggcggggcgcggcgcgagcgtgacacgggcacgtggaggcgctgcgagagcgtaccactccacgatctgaagaatggcgacagcaagaagaaacctggccctgacagtctgactgcagatgagtga

SEQ ID NO: 40819 - DNA, 205 bp, Oryza sativa
  Clone ID: PAT_MRT4530_44223C.1
aacaaagaatgttgccaatggtgctccgaatggttttgcggattctccagaaggccatatctgactggagtttcatgatactagtcattggtgtactttcattggctgtgaaattttcagttgtcaacatcctcgactgtggaactatatcgaatttatcatctgttgaagtaatcacagtggtactccagtaatccatttcctt

SEQ ID NO: 40820 - DNA, 876 bp, Oryza sativa
  Clone ID: PAT_MRT4530_44224C.1
atgccggagatctcggtggaggcagcgaagatgaagactcatcgtttccccaaccttatcgccgccgctaacagaggccctggtctaggaaggggcgtcctagatcatcttcggcagatcagtcgcggcgggccggtcggtggggcaaggcgaggcgggataggaggaggtctaacggccggacacggtagcgctgggcagcagatagcggtgggtgcggaggaggctgccgaggcggctctgggcaccaccgaggcacggcgcgccgccaccaccgtcgaggccgagacctacgtggccgtcacagagtcgtcctccagcgccgcgcaggcttccgtcgaggacaggatcgaggtgctacagttttctcttagtttgtctatctttctcggtttgcgccgtaaaccgttcgccaccgctgcgagagtgcgacatctctttgtaggcgaggccgacggcggctccactacgtcgtccaaggcgcccctcctcctctggctcaacggtggccttgtctgctcgtcaatccggtacggcgccatggaggagctcggcccgttccacgtcaagagcgacggcgagacgctcagcgcgaggatgaggtggccaccagtgttatcgcaccacgtcgtgctgacctcgccccactgctctctgaggccgtcatgccgttcccgacgatgtcaacgggaagggggaaaagaagaaaggagaaggagaaaaagaaggaaagagaaggggcaatccgggtatttagaaaactatctcacctcttttatccctggaaataataaaataatgcgaccggtgttctacggccaattatacgcatttttagtgtccattagctgtgttacgttttttagtgttttctag

SEQ ID NO: 40821 - DNA, 401 bp, Oryza sativa
  Clone ID: PAT_MRT4530_44225C.1
gctatggctactcccatattttttttaacgaaatgagccgatcctctaccctctatacactgtttatatttcaatatacctaaacccatataagactagataaatattaaccaggacttttccgcctagataaaaatctattatagccaacaaattgtgatcttttatttgcaaatacccccgtacatggtaaaacaaatacacatattcatctaagaaataactacaattaggaaacctggaagcctggaacatgccacaggaatttgcggacttgttttctgacaaacctcaaaagccttttgcctatgtttggaccacacgaaaaccggtttgaaccagcaaacaaaaacgggggagcccagccccaaatgaccttggaggcgtaatttgggaccaac

SEQ ID NO: 40822 - DNA, 252 bp, Oryza sativa
  Clone ID: PAT_MRT4530_44226C.1
atggcgtacctgtgcctgaagccggccggctgctccgggagaagggatgttcatccggcgtccctcgagctccatgcatggcggctccaccgcgccgagaaggggcagcccaataggagggaggaaaatagacttattttaaggaaaagcatgatgggccatcgggccatcgggccgtgcctgggccgtgagtgcggcacgtggttgtctctgcacggcggtgacaaggtccaccagtggatcacggtgtag

SEQ ID NO: 40823 - DNA, 1726 bp, Oryza sativa
  Clone ID: PAT_MRT4530_44227C.1
atggcgctcaagcagaaggggaccgacgccgccgccgaccccaagaagcgccgccgcgtcggcttctccggcatcgatgctggcgttgaggctaacgagtgcatgaaagtgtttattggtattgaacttgctcatccttccatattcttactagttacctaccttcctttggtttttgatacagcaagaaaccctgacgaggcaggctcagcaaatagcacttctcttcaaccatttgacctaaatcatttttttggtgaagatggcaagatatatggctacaaaaatttgaagatcaatgtgtggatcagtgcaatatcatttcatgcatatgctgatatctcatttgaggaaacatctgatggaggaaaaggaatcacagatctcaagcctgttcttcagaatatttttggggaaaacttggtagaaaaagatgaatttctgaagacattttcaaaggaatgtgaatatctcagcaatgtggtgacagatggcaatgtcattaaacatgatgcttcaattgatgaagattcagcagttgagcattacgttttaggttcgacgcctatagatataactgagcatggatgggaaatgctcctggtagtaaagaagtcagcacaggcgtcatccagctctaactttctagtgctagggtttgcagctgttcatcatttttatcactaccctgagagcactcgcctgcggatcagccagatactggtcttgccaccttatcaaggtgaaggccatggacttcgtcttcttgagacgatcaattctatttctgagtctgagaacatatacgatgtgaccatagaagatccttccgattaccttcagtacatacgttcatccattgactgtctccgccttctcaccttcgatccaatcaagccagcgctctgttccatggtctcatctctgaaggataccaacctttcgaaaaggaccagcagcttgaaaatggttccaccttccgaccttgctgagacggtccgacagaagctgaagatcaacaagaagcagttcctccggtgctgggagattctgatctacctaaaccttgacgctgaggaccgcaagagcatggacaacttcagggcctgcatctacgaccgcatcaaaggcgagatacttggcacttccactggccccaacgggaagcggctcgtccaaatgccgagcaatttcgacgaggagacatgctttgctgtgtactggacacaggacggtggggatgcagatgaccaaactgttgagcagcagcctgaggatctcaagacccaggagcagcagctgaatgaggtggttgacagccaaatggaagagatcgtcgagatagccaagaacgtcacctcacgcggcaaggataaactgagcgtttcttgctccgtatgacggtacgagtggtaacttggaaaaaactgaatgctgcattgcagccacagctcgcctaatgttctctttgtagctcaagacttcagggtagaaactagaggctagaaaattttcaggtctgagaattatgttctgcgtattctacttgagcttttccgagatgaacttccttcagcgtagtaatcttagttatcattcgaaatgatttgcgtgctatttattgtgatgttaaatggtactaacctgtatgctgctgcaattgaacggttaatgcatcttcattatctgaaaaggttactgctccagacaacacatggagttatgc

SEQ ID NO: 40824 - DNA, 854 bp, Oryza sativa
  unsure (1)..(854): unsure at all n locations
  Clone ID: PAT_MRT4530_44228C.1
cttcccctcaaaacccccaaaccctaacccttcccgcgcgcctccaccaccaccacctcctcctcctccccctccgcaccagccatggcgctcaagcagaaggggaccgacgccgccgccgaccccaagaagcgccgccgcgtcggcttctccggcatcgatgctggcgttgaggctaacgagtgcatgaaagtgtttattgcaagaaaccctgacgaggcaggctcagcaaatagcacttctcttcaaccatttgacctaaatcatttttttggtgaagatggcaagatatatggctacaaaaatttgaaggttaatgaaacaagcgtcctttgttatttgcaatgtgaatttctctatgactttcccccataattttcttttggtgcagatcaatgtgtggatcagtgcaatatcatttcatgcatatgctgatatctcatttgaggaaacatctgatggaggaaaaggaatcacagatctcaagcctgttcttcagaatatttttggggaaaacttggtagaaaaagatgaatttctgaagacattttcaaaggaatgtgaatatctcagcaatgtggtgacagatggcaatgtcattaaacatgatgcttcaattgatgaagattcagcagttgagattgttcgagttgaactacaaggtgctgctgcttttctttattgtcgtctggtgccacttattctgcttttggttgaaggttcgacgcctatagatataactgagcatggatgggaaatgctcctggtagtanagaagtcagcacaggcgtcatccagctctaactttctagtgcttaggtttgcagctgttcatcatttttatcactaccctg

SEQ ID NO: 40825 - DNA, 869 bp, Oryza sativa
  Clone ID: PAT_MRT4530_44229C.1
aggaactatgtaaagtgatgattgaagaagggatatttccaaatgtagtcacttacactgcaatgattgatgggctgtgcaaaaatggttccacatctttggctcttgaaatgttcaacaagatgattgagcagggttgtttgcctaatcttcttacctacagttctcttatccgcgctctaggtcaagaaggcaagaatgataaagctgggtgccaaccaacattgtggacatatggtgttttgattaaaggcttgaaaaatgagtacctattagctgaccagagacttgctgccttgccagatgtagttccaaactgcagttttggttatcaaaccactgatcaagatgctgtgtcagttatgtctgctaagttagcagaactggatcctggcctatctgttcaggtgcagaatgcactagtttcaaacttaagtacagctgggagatggtttgaggcaaatgagttgttaggaagcatgattagtcagggtttatgcccagatcaggaggcatataattccttattatgctcactcttgagagtccggaacgttgaccttgctatgggcgtatttaagcatatgtctactcaaggttgtgaggtccaccttaatggttataaagaattaatatgtgctttatgccaattacacagaagaaaggaagcccggattacttttgaaaacatgctcatgaggacctggaatcctgatgacgttgtacaggcagtgctcatcgatggattgctcagggatggatacaaagacttgtgcatggaatttctgcacataatggaaaccagacgttacatgcctagcttccatatatacaccattttggctagggaggcatcaaaaaagaggtag

SEQ ID NO: 40826 - DNA, 671 bp, Oryza sativa
  Clone ID: PAT_MRT4530_4422C.1
ccggccggtcgtccgccgcccgaccgatgacggcaccagcggcaccagtgcgagcgctctcctggggcggccttagatgggtacctcggacgactcgaagggtgcttcctctcctcatcttcgccgtgtccatcccacccgatcgatctgtgagaagatattataaagagccttgatatggggaaaggaaaggcccgagatgcagtcttagctcgtaaaaaggatgggattgggttgctgcatgccgcagcatgccagggccatctgactgtttgcaagttcttgatggaggaattgggggggttgccatgtctacgtttggtagtatgatgtgaagtataccaatgtgctgtttatcacatatgtttaacaccgtttatggcctgtgctgagtctggtgatgttcctactgtgaagtattttcttgatcatggtggtgatgtaacaaaatcagatgataaaggatgcacacagttctccaccatgctgctggcacagatccccctcaatatccagttcattcttatatatattaccaattgtattgttgtacaaggctctataatactgcaatactattaatgggagtatgtttcaatcacagcaaaaaaaaaaaaaaaaaaaaaaaaaaagccgagaggcacccaagctctgcgctgacgcgctgcatg

SEQ ID NO: 40827 - DNA, 3024 bp, Oryza sativa
  Clone ID: PAT_MRT4530_44230C.1
atggcagcgcccctccagtcgctgcctccctctcgtctccgccccctctggcctcccccgcgcgccgcccgcctgaggtcgctcgtcctcctcgtctccgccttctcctcctcgtctcggggcctaggatctgagcggccacttcccgtggacccggggggcgttagcgggcggaggaatcaggatccgggcgacgacgccctgatcaggagggcccatcgggcgctggcgcggccggactggcaccggagcgccgcgctcgcctccctcacgcccgcgcaggccgcttccgtggcggagtcgcacccgatcgccgcgcgaggcctcgacctcctgcttttcttgtcgcgggagcgctcgcactcgtaccggccgggcacgttcgccgcgctcgccaggcgccttgtggacgcgcgccggtatgctgccgcggggcgcgcgcgcatccacctgatcaagtcctgccacagcaaggaggcgatggcgaggacgatgagtttcctggatatgctcagccaaagcggcctcaggatgggtctcttcgcatatagcgccctgttgatccatctgagcaggcttggaatgactgctgccgtcatggacaggtaccaccgcatgctgagcgagggtgtacagccaaatttacttatctacaatgctgtaatcaatgcattgtgcaaggatggcaatgtagcggatgcagagacaatcatgaagaaggtgttcgaatccgagatgagccctgacacgttcacctacacgtccatgattcttggtcactgtaggaaacatgacttggattcagcattgcaggttttcaaccagatggctaaggagggctgtgagccaaacacagtaacatactcgacattaatcaatgggttatgtgatagtgggagggttaacgaggcatttgatttgattagggagatgatattgcatggtattctgccgacagcgcacacttgtactggccctattattgcattatgtgacatggggtgctatgaagatgcctggaggttgttcgttgatatgaaaaataaggggtgtgaaccaaatgtgtatacatacacggcacttatcagtggtctttgtgtgtcaggtttattgaaagtggccattggactgtttcataggatgtctagagatggtgtgttccctaatacagtgacatataatgctttgattaatattctggttgagaacaggagaatcaaatatgcgtttgttgttttaaatttgatgggcagaaatggttgttcaccaaacatcgtgacatacaatgaaatgattaagggctattgcattcttggtgatcctaagaaggcaatgttagtgatgaacaatatgttgcagagaggacattcagctaatcttgtaacatacaacaccatcatcaaaggatattgtgactcaggaaatactacaagcgctcttaggattctagaccttatgagggatggtggatgtaaacctgacgagtggtcttacaccgaactgatatgtggtttttgcaagataagcaaaatggagtcggcttttggattgttcaatgaaatggtggatgatggcttatgccccaatgaagttacctatactgcactgatagatgggtactgcaaggatgagaaactggacactgcaacatcattgttggaacatatgaagagaagtggttgcagaccaaatgttcagacatacaacgttcttattcatggtctgactaagcagaataatttttctggtgcagaggaactatgtaaagtgatgattgaagaagggatatttccaaatgtagtcacttacactgcaatgattgatgggctgtgcaaaaatggttccacatctttggctcttgaaatgttcaacaagatgattgagcagggttgtttgcctaatcttcttacctacagttctcttatccgcgctctaggtcaagaaggcaaggtagaggaagctgagaatttgtttgcagaattggagcggcacgggctcattccagatgaaattacctatgttaagatgattgaagcatatatcatgtcagggaaagttgagcatgcgtttaattttcttggaagaatgataaaggctgggtgccaaccaacattgtggacatatggtgttttgattaaaggcttgaaaaatgagtacctattagctgaccagagacttgctgccttgccagatgtagttccaaactgcagttttggttatcaaaccactgatcaagatgctgtgtcagttatgtctgctaagttagcagaactggatcctggcctatctgttcaggtgcagaatgcactagtttcaaacttaagtacagctgggagatggtttgaggcaaatgagttgttaggaagcatgattagtcagggtttatgcccagatcaggaggcatataattccttattatgctcactcttgagagtccggaacgttgaccttgctatgggcgtatttaagcatatgtctactcaaggttgtgaggtccaccttaatggttataaagaattaatatgtgctttatgccaattacacagaagaaaggaagcccggattacttttgaaaacatgctcatgaggacctggaatcctgatgacgttgtacaggcagtgctcatcgatggattgctcagggatggatacaaagacttgtgcatggaatttctgcacataatggaaaccagacgttacatgcctagcttccatatatacaccattttggctagggaggcatcaaaaaagaggtcatggaaacatgtagcaggatgtatcacaaaggtgaagagggctacatgctctacatcgtgtacaggacagtgcttctgttcaagtctttccagattgtactacctttatcccataaaaattgaaattctagctaatttaggacagataataacaaccaatggaagggaactctatgcgaaggcttgcttgttcttgaataagcatctcagcaagaagatttcactaacgcagtttctatgttcccgctatgaaaagcagcttatctaa

SEQ ID NO: 40828 - DNA, 1077 bp, Oryza sativa
  Clone ID: PAT_MRT4530_44231C.1
atgtggtcttggcttataactggtaggggagttgctaagaaaataagaaatgcacctcattgctctagtcgcccaataagtgaattgggtgcagaagcacagatggaatgtccaaactgcaaacatgttattgataacagtgatttgcaaaaaggtaggttattgctgatgagaaaggaggttgctatacagtggcctgggctgcctgctggtgtcaagtttgatccatctgatttggaattgcttgaacatttggaacaaaagattggcctggggggttcaaagccacatacattcattgatgaatttattccgactatagataatgatgaagggatatgctattcacatccggaaaatcttcctgggaaatccaaagccatagttgaaaagggggttacaaaaggttggaagaaaataatggttctgtacaagagttcacaaagaggtgccaaacctgataaggctaactgggtgatgcatcagtaccatcttggggcagaagaagatgaaaaggatggggagcttgttgtctccaaaatctcctaccagttgcatggaaaacagatagacaagtctgaaacaggaaatgctgatgaagaatctgatgcatttgctgcaagggttggtccaaaaactccaaagtcaaacaccccacagccatgtcgcttaaaaaacagtccatgtgaaacagaaaattacgatcccatcttggaggaccaggacgaagaggagtctaacatacctattgttagcctgaaggatgatgctgggaatcctgcgtggtgcgctggagaaacccaggccgcgagggaagcagttcaggcctgtcctaacttggatgaatccctgcgctgtcatgaagttctggattccttctatcatgaaacgttgcttccttctgaccgcccaattctgtcccaaggcgggaatgagattcttgacaggaacctgaatgcggtgtatggactacctgatctctacaatgtagaccttggaacacctccagattttcagcttgctgatttgcagtttggatcacaggagagcattggcaactggctggatagcatctag

SEQ ID NO: 40829 - DNA, 187 bp, Oryza sativa
  Clone ID: PAT_MRT4530_44232C.1
ggccgccctttttttttagcctgtagctgttctgtagctagttctttggttcggttggactgaattggatcgtgggagtacggtcaggagtggatccagatcaatcaggtgttttttttctgttatgcatgtaacaaagtctgtaatcgaggagaataaatagaaaaaccagaaaagctggcgctgc

SEQ ID NO: 40830 - DNA, 156 bp, Oryza sativa
  unsure (1)..(156): unsure at all n locations
  Clone ID: PAT_MRT4530_44233C.1
tctgcntcgcacgactgcggcacggcagcgtgttgtttttcaaaagcgggggggtaccaagcaatgctggtgtgccgcgtcatcgccggccgtgtccgccggaacgactactatggctgtgcggaggaggaggagggagcgttcgactcggtggcc

SEQ ID NO: 40831 - DNA, 543 bp, Oryza sativa
  unsure (1)..(543): unsure at all n locations
  Clone ID: PAT_MRT4530_44234C.1
ttcgccccgcgtccgcccacgcgtccgcagtcatcctgctgttgcaagataaaaggcttggcgagcggatatgtgtacagtataggtcgatcagataaacagtcggagaagaaaatcaaatgtcacctgtttcctttttctttttcatgtgccccccatccccattgtgtcgtctgaactgtggagaatccccaaaaaaaaaaatgaaagaagaaaatgtgtaactgtatggacgagtttatcttataaagaagttaatagtctggaatattgtgcaaaaaaaaaaaaaaaaaaaaaaaaaaaaaaaaaaaaaaaaaaaaaaaaaaaaaaaaaaaaaaaaaaaaaaaaaaaaaaaaaaaaaaaaaaaaaaaaaaaaaaaaaaaaaaaaaaaaaaaaaaaaaaaaaaaagggggggnngnttttaggggatacaagttttaatatagggtgttttggaaaataaaaagtttttttttggggggattaaatttaaattatggggcggtttttttaaaatgggggggttgggaaaaacttggggtt

SEQ ID NO: 40832 - DNA, 357 bp, Oryza sativa
  Clone ID: PAT_MRT4530_44235C.1
atggaagcggaggccggctcggcgcgagaggtgcgggcggcggagagggaggccggcgtggcgcaagaggcgcggccgatggagggaggccggactggcgcgagaggcgcgtctggtggacgaggccggcttggcgcgagaggcgcggccggcggtgaaggaggcgacctcggtgtgagggagagctaccggtgggtgtggcgcggtcttcggcacacgaaggctggccgacggggggcgccggtgctggggtcccacatgtcggcagagcttgaatggtggtggagcatcggggcaccagccgtggattcgcaagagggtggttgccgggcgaaagcccagtcttggctcctatga

SEQ ID NO: 40833 - DNA, 288 bp, Oryza sativa
  Clone ID: PAT_MRT4530_44236C.1
atgaagaagacgacgataacattccggactgggctcaatacgatggatttgcagaaaatacaaatgggcgaggtggacaaagctattgaagaaaacgacagtgtggattatcaaatcctaaagaatattctttctgagggaaacgacttgctcgaaacaacatacaaagataagaaggagtacgagaacctagaagcatgcccagtttgtaaggcactattatacaagattagacgagatgaccctggtgatgttgatgggaagcctgaagaagagggttccttctaa

SEQ ID NO: 40834 - DNA, 311 bp, Oryza sativa
  Clone ID: PAT_MRT4530_44237C.1
cgatctataaccttacacgtgaacacacatcataccggactcgtagtcgaacacgtgggtataccgcaaaatatgagaccgatacctctcacacacacagcttatcatatattctgtaacatgaaaatatcacctacaacttaatatagctatgcatgcatgcaagtctgtatcatatttagtagcacatacatacatagatccatatactttcatatatatgtctatatgcatatatgcagggtctgaccatcagttaataggccacccgtactgatgtctgacaacttggacttgatccacttgaagct

SEQ ID NO: 40835 - DNA, 2961 bp, Oryza sativa
  unsure (1)..(2961): unsure at all n locations
  Clone ID: PAT_MRT4530_44238C.1
cccttatattctccccacctccgcctccgcctccgatccgccgccgccgttggagaccgccggagtcgcgtgtagcacgccgcctcacccccgcccctccccccccccccaatcgctctccatttccctcccctttcgctcgctgctgctcccgcacgccgccggtgcccggatcccgctggccgacgtcgcccccgccgccgagctgcctcctcctccccttctcttgccgctcgaaatgatgttggagctctggtggtaataacatggatgcaatggaggccgaggaaggtccttttctggctaatgatgctaagttgcatgccggaatgtacagagcatttcatcctgcggtctcaaaacttgtagcgattttccctttcattgaagcatcaagacccagaagcaaatctggcatacaggcgctatgctctctacatgtagctctagataaagccaaaggtcttcttcaacattgtgcagattgcagcaggctctacttggccataactgcagaaactgtgcttttgaaatttgagaaagcaagaacccaacttcaggagagtcttagacgcgtggagggcatagtaacagaagaaattggttgtaagtacaccatatggtatttcctgacatctggacctgttggtgcacaacagattgtagagattattgctgagttggaagaagtggtatttacattggatcaatcagagaaggaagctggtgacgaggtgatcaatttgctccagagaaacaggaaaatgaatagttccagtgatagtggggagcttgaggtttttcatatggctgcactaaagctgggaattacgtcttccagggcagcactcactgagagaagggccctgaagaagctaattgagaaggctcgttctgatgaagataagcggaaagagtatgttgtgtcatacctgtacaatctaatgaggaaatactcaaaatttttcagaagtgaggctggtgatgatactgattctcaaggatcgtctccatgctcgccgacaatattaggcatggaggacatgtatggaccctatggtaatggccgagcattcagcagacaactttcgagtattcaatcattcaattcaaggtttggatctttcaactctaggcttgggtcattcaattgtaggcgtagtggtccaaggtccgaaaacatgtcgatccctcctgaggagctccggtgccctatttccctacaactgatgtacgacccagttatcatttcatcagggcaaacttatgagcgtgtttgcattgagaaatggtttaatgatggtcacagcacctgtccaaagactcagcagcaattatctcacctgtctttgactccaaattactgtgttaaggccctaattgccagctggtgtgagcagaatgattttcctgttcctgatggtccaccaggatccttcgatgtaaattggagacttgctttatctgactccgaagcgactggctgcgtgtctcttgaaagttttgactctatcaacgtgaagagtgtcaaggtagttccattggacaacgtgagaaaagaagagccagcaaacaacgaatcgggaacattggacgacagctcttgttatgatttcgatatgaatgaggggtaccgaaacttactgctaatgcttcatgaaaaaaccaacttacacatccagtgcaggttggttgagcagataagatatcttctgaaagatgatgaggaagctagaatccagatgggctcaaatgggtttgctgaggcactagttcagttcttgaggaacgctgtgcaagatggaaatgagaaggcacaggaaattggtgccatggctctttttaaccttgctgtcaacaataacaggaacaagggacttttattgtctgctggagtaatcgatcaacttgagcagatgatatcaaatccacgcctatctgctccagccacggcactataccttaacctttcctgcctacctgaggcaaagaacatcattggttcgagccaggctgtgtcattcctagtagaccgtctgttcagtcatgaggcccgcgacacaaaaggcagctcttgcaagcatgatgccctatacacactatacaatctctccaaccaccaggccagcgtaccgtcgcttttgtctgcgggcattgtggaagctcttcactctctcctttcggagtccctggcgtctgagggcctgggttggacagagaaggcccttgcagtgctcatcagccttgcggcaacccaagctggcagaaaagatatcatgtccaccccaggtctgatcagcaccttggcgatgctgctggacaccggcgagccaacagagcaggagcagtcggtgtcctgccttttggtgatgtgctcagccgatgacaagtgcatcgcaccggtgctgcaggaaggagtggtgccttccttggtttccatctcggcaaccggcacaggcaaggggaaggagaagtcccagaagctgctcaagctgttccgggagcaaaggcagcgagatggggcacagcctgtgccgcagcaagctcagcagcagcagcagcagcagcagcagcagcagcaggcgggagagaccggtaacggcaccatggttcactcatgcagatacttgtcttcaggaggcccaactgctcaagaaattcaacatcagacagctcaagaagtacctcatggtatagttttgtcccaagatgcaacagtgataagatgcagggttaggctatggcttgacaggacatggaagccaagccagtgatctcttgatctttcttttttttttgccttctttgttgtttccttgtgtaaagtaaaactatcttcccccccttcncggtggggtgatgtaggccatttcctctttgtttttctttgccaagatatgtgcatagctcatctttcactctacttaacaagttcagatcagatcaaaaaaaaaaaaaaaa

SEQ ID NO: 40836 - DNA, 401 bp, Oryza sativa
  unsure (1)..(401): unsure at all n locations
  Clone ID: PAT_MRT4530_44239C.1
gaanaacacccaccaccaccgcccgtccgcctccaccccgcccgncgcggggagaaaccacagggttnaggggcaaagcgcgccgcccgcttgcgggccgcccgggccaaagatgcnnatcttccnttgaaaaccctgacgggggaanaccatcacnctgggangttggaantcctccnggacaccatccnacaacgtntaaaggcgaaanatncaggaacaaggganggggatncccgccccgaccaagcancgggctcntcttccccnngcaaagcaactggaaagaaaggngcaccctcccccaactacaacatccanaaaggagtcnaccctccacctggttgctcccgcctcctctgcngggccnanaancgcnagaagaaaacnttcnccnagcc

SEQ ID NO: 40837 - DNA, 139 bp, Oryza sativa
  Clone ID: PAT_MRT4530_4423C.1
acgtgaactgctgcgatacagattaatggatggcatatggactgctgactgagattcttagggcccgactacctcggtatgaaaaatattgatggtactagaccagcggaggggttgtaggactgttgtttatcaacct

SEQ ID NO: 40838 - DNA, 1496 bp, Oryza sativa
  Clone ID: PAT_MRT4530_44240C.1
atggctcaaaccgcgtcgccatcattttcgattataatatttcttcctgttgtcgccgttgttgttatacccagtcaaatcccccaacccaagaccaagtcttctccttccattccattccccttcttctcaacctcaaagatttcgcctttctctctcttctctctctcttcgtcgccttcctcctcctcctctgccccccctcttcgtcttcctgtcgaaatcccaatccttccaactccgcacctttgcctgcctcctccgatcccttcctccgccgccgctgctgtacggggcgtcgtcacttctttttatttaattcaaaggtctgtaaagctcgtgtccacgcgcgccaagcccctcgaggtcgagatcgccaaggaggacgagcggatgagctcgtcggccgacaacacggtgtactgctgcattgcaaaggggaggaagatcatctactgctacaacagcaaggatggtgacccccatatggagaccaccgccgcgctctgcctcgagaatgcgccctcgtatcaccggcattatatccacacggcggggtctaggagctatggctatctcatggccgatgggcacaccttcttcgcgatcattgacccgagtgtcggaaatgtgggtgccttgcagttcctggagcgtgtgcgcgaagtgttcagaactgtaaataggagcggcttccatgactcgctggtaccggctgtacagaggctggtggcttcgctggagaagatgccccatgcaacatttgaccttgaggaaagtgtggaaaagggagagcctagtgacagctctagctgcacctcatcgaaggttcctttgctagggagaagtgggagtaggaaggataagaagaaggctaaggagaaggcagcgtcagctgcggtttgcgaggatgagcagcatggaactaggggagtgagaattgatgtgccaccagaggaggttggtggcatgtcgctggagcggagtgcaagccagtccaggctgcgacgacagcactcatcccggtcattgtgggtgcgccatgtgaagatcatcatcgtcgtcgatgccatcatctgcatactgttgtttgctgcttggctagccgtttgtaagggtttccagtgtgtgtctagctgaggaaaagaaatcctggcatgagttgtatagctattggagaaatgagaaagctttaatttgtggtgagttttgatttgttgcttttccggaaaggtaaatacttccagccaagaaaatgatgaattgagagttgtaccagcgaaaataatgcggggggagggaggctgcaattaccaagatacaatatgttgctgatgatcagatggtgaaaatggaggctcaatgctgtaaacatgtagatagatatgcttctcctcttgtacatggcaattcgaatgtacatacgcttcaccccttgtacatgaatacatgataatgtgataggattattaaaagatttcaaaaaaaaaaaaaaa

SEQ ID NO: 40839 - DNA, 312 bp, Oryza sativa
  Clone ID: PAT_MRT4530_44241C.1
gagacatcttgatgtacagaggtgacatgctcttctgcagcgaggagtgcaggcaggagcagatcgagatcgacgaggcgagagagcagagatcgaagcagacggcgagggcagagcaggataggcagaggcagcacaatgcgagccacccgaggatcccggtctgggcatggtaaacaattttggtcacggaacacgtgatcttagagaaactcaagaaccgaaaaaacgaggaggagatcgagagacagcttggccatgaccgtgtgtgccgattgagaaagatccagtcgagcgcacgcagatcaaaca

SEQ ID NO: 40840 - DNA, 162 bp, Oryza sativa
  unsure (1)..(162): unsure at all n locations
  Clone ID: PAT_MRT4530_44242C.1
ggacgcgtgggcggacgcgtgggtgaggatgttgatcaggtnacaggaatctagacaagacagcgacgacgattaggggcggggcgtccaccgccacttaccatattttcatatacatctgttcgttagccatcacgatcagatactacttcacggacctaa

SEQ ID NO: 40841 - DNA, 500 bp, Oryza sativa
  unsure (1)..(500): unsure at all n locations
  Clone ID: PAT_MRT4530_44243C.1
ggggggggggtttttttttttttttttttttttttttggggtttttttttttttttttttttttttttttttttttttttttttttttttttttttgggggacccgaatggggccccccccctgggaaaggagccgtccaacaaaccaaatgnatcggggtcgcatggttccccccttgctatttaaactatcccaaacccaaaatacatttcatctcaaaatccccatcccggaaaaaccccccaaaaaaaaaaacccaaaatggggggaagcaagggaccaatcctaaaaaccaaaccccctcaaaattcttcaaaaattcccccccgccgaaacaaaaccccccccggtttttaaataccccccctcgcggggacgccgcgagcggggggccccatccccccccccccggggggggggcngcggcccccccaggcggaccgggccaggcggcaggcaatgcccgatgggtacatggcggccgggaaactttccggtt

SEQ ID NO: 40842 - DNA, 109 bp, Oryza sativa
  Clone ID: PAT_MRT4530_44244C.1
ctggatcagaaccaccctgtctggggctcagtggataactatacaactgtacgggaaaagcaaattacacaattggtacaggctttcagctacagcaagagaactcttg

SEQ ID NO: 40843 - DNA, 449 bp, Oryza sativa
  Clone ID: PAT_MRT4530_44245C.1
ccagctcctctgcgaggaaagaattgatctcttttataatcctgggctctcactgttcgtttgcttcttcgtttcgcctgccaaactttccgagaagcggagcagcagttgaggagaaacgacggggagaagcggccgaggaggtctggagaaaaggctcagcgggcgttgtaatattagagctcagaggacaccattgacaagcagaggaattaggttctacatcaacctgataaattgtgcatcgtgtgatgttctgggcgtttcttgcttcatggcaagcgtaaacactggaggtttacgcctggtgagatgcccaaagtgttataacattctaccagaacctcccaatgttgaggtctacaagtgtggtggttgtgacaccatacttcgagttaaaatccgtcccagcaatggacaaaatgtagcgacgaaacaagtccggcaag

SEQ ID NO: 40844 - DNA, 188 bp, Oryza sativa
  Clone ID: PAT_MRT4530_44246C.1
gttgccaccaacggattcataaaagcattctatactgcgttggcacaagggtatatacatagtccaagcacactggtactataagcaataccatctaacgtatacatctgacagcatcaaccactagtctttagctctcacaattccagatagggttaacatgaaccaacgcctgatgcacatcctgc

SEQ ID NO: 40845 - DNA, 1668 bp, Oryza sativa
  Clone ID: PAT_MRT4530_44247C.1
atgcctggcaaaagctgtgcccttcgtggcaaggctttcgccttagaccttcgaccgagtctcccatgcctaccaaggccgggtcgaccggcgaagaccccggtactcagcgaagggtggtcgtgctaccttggcaagtcccttgtcaaggagtctgacctaaccgagttcgtccttactggcgtccttgcagagcgtctggcaacttacgggggtgaagctgttgtcccttcgcccggcgacagacgaacggttgtctttactactttcttcgccgttgggcttcgccttccatgtgacgactttctgccgtccgtgctggagatatacgaagttaagctcccccagcttagcccattggcgttcccgaagttagccgtcttcgcgtggatgtgccaaacttgcgggttcgctcctaccgcgaagctgttcgccgttctattcacggcgtgcgcaacgaccaaagacgtgaacatgccggccgggccgaaaaagaccgttttcggctgcgtgaacttcatgctacggctggagcattcggatgcctggccggttccttcgtcgatggtgatgcagaagtggttctacgtcgataacccataccccgccgacgatgataaggcgaactggctccgtccacacttggaagatgctgaggcggaggaggtgaggatagtcggaggacgcgccgacacggatgcggatgaggaggatgacgatgaaagagaggccgggtctgacgaagacggcggatcgcgcggctacacccccaatgtggtttgggtgaaggctggagcgggttctaatgctttgcccgtgcgtccgcaggatgttgccggtgcgaacgcgctcctggcgatctccagctccacggcgaaaataggggcgatagccagaaagaagaagaaaggggtggtgcaaattgccggcggcttttccgctagcgaggaatcttccgacgggacgcctacttcgccggcgctgcgacgcgttgtcccccgaaggagatgcctgtcgccaccgcctaccagcgatgccgaagcgccaacggggggtagcgcttcggccccggccgctgctccggtcagagcaatcgagtcggcggaggcgaacatctctggtgccgacagagtcgacaaggctccttcgtcaagccaccagcgggacgggaaggcgccggcgattgagatgatagtgtccgacatgacactcaacgccccgcacttcgtgtccgtggatttcgcctcccgactggagtcgcccccttcgtggatggggtttgttagatggtttcgccgtccgacggccttagtctcttcaccgtgctcaacgagttcggcgagagttgcgcagctgcggagagcttattcgtgcagcctgcttcacgaacatggttgtgaccatgttgaggatttccctcagaccatgaagaaggattggcctgaaaatgcccaatccgccgcgtcggctttgaaggcctttcggaagggcttctgggaaaacggcagcagggatggcgcgaagacccggcttcgcgagcagctggagaggatagcgagggccgaagacgccgctgccgccaatactggcgaagaccccgggccgtcggagacagctactgatcgtgagggcgaaggcaacgaaagccgagaccaccctgaggtgtga

SEQ ID NO: 40846 - DNA, 451 bp, Oryza sativa
  Clone ID: PAT_MRT4530_44248C.1
ggcaatatcaggtgcagtcaactgtcctgctccagcaacaggtgcttacccatatcagagttcgacaggcaacatattggcatatctgaacgcattttcttgtaatcagctgctttacagctgagaatcatccaaggatgccaacagctcgcgctgatggcgcagcaatctcactatcacgacattaacattcgatatgtcatagcgcagcagctacaactcacaacagtgagctgatctctactttgatccgaatctggctcacgctcatgctctgatggctattaacgcgccatctacatatacaatgtaccgtacgtgactatggagaacgcagtaccattaccaccatctgcggcgcactggaatgagttttaacagaatagcggctcataagataaaagtactctcatatatgataatatgtgacatgacaaactctttgtgatgt

SEQ ID NO: 40847 - DNA, 2394 bp, Oryza sativa
  unsure (1)..(2394): unsure at all n locations
  Clone ID: PAT_MRT4530_44249C.1
atggacgatgatggcggggagaggacgttcaaggcgaacttcaccggggaaggggtgaggctgctgcgggcgcgcgtcaaggagaagctcagggagctcatgggcgactactccgacgacaccctcgcggtgagcacccctccacaaaccctaccccacccactcgatcgtctcgtctgcagcgcgatctacgatccgtttgctaaaaccctggctggcggtggcgtgtgtgggattagattcccgtcgtggctggctgggggcacacgccgtgtcggtgtatgtggatttctggggctcgcagaacatcacaccaagatattgatgcaccacgccggcttcttcagtttgctgttcgggatgctgttagacctactgcagagaacaaattcagatgtaagagtacctggtgtcaccgcagcagcattaagagctgcagctgaggctgctgaagatgttctgaaggagaaatactctggaagtgtgtttaggagattgggtagaaagggcatggtgaatgctgctgaggaatcctttggtttcagtgaacaaggattcaatgtgttcaagctctatggtggaggaacagaagcttccatcacttgtacaggtcagccagaaggtggcactgattctagaacagtttttctttccaatgtacattttgctgctacaaaagatgctctttcccgtcatttcaataagtttggagctgtgcttaaaactcttattgtgactgatattgctggtcagccaacaggctcagcgtacattgaattcttgcacaaagagtcagcagaacaagccctaactcttgacaacacatcttttatgtcgcgcatgctcaagaaagaactctctcgaagtgtctcaacagtctggctggccccgtggttctcggggatcaacattcccttcaagactcactagaggtcgagaaagagaatatggtgatatagataatgtccaagcagaaaatcaactagatgttcatggaangaaatcattatgcaggtgactgcttatatgtatgaccgggaggcagccaaaggcactgattctgcatcagatatcgatcggcatgatgatactggtgcagctaggtataatgatttggtatcttgccgaagtacattgccttctagtataggcaaagaatcagtagtagcggggttcaatactgttgaaggaactacaaccattagaagcagaaggtctataatgcaggacccacatgctagttcagggcgaggaccatctgaaaggattaacatggttaacaatattacacataagcctgccaaccaggcaacaagaaggaatgctgtgaagatagagcctcaagtgcccacagagatgaaacatactgactcaagaaagtcaactgcgacacttgcacatgttaacaatactccaatgactgacaagtccaaagattcaatgtgttcaagctctatggtggaggaacagaagcttccatcacttgctgttggatcatgcagtacaggtcagccagaaggtggcactgattctagaacagtttttctttccaatgtacattttgctgctacaaaagacgctctttcccgtcatttcaataagtttggagctgtgcttaaaactcttattgtgactgatattgctggtcagccaacaggctcagcgtacattgaattcttgcacaaagagtcagcagaacaagccctaactcttgacaacacatcttttatgtcgcgcatgctcaaggttgttagaaagaactctctcgaagtgtctcaacagtctggctggccccgtggtttctcgggggatcaacagttccctgcaagactcacgtagaactgcatacccaaggccagcatttcctggtgctatgcgtgggcgtctaccactcagaggtggtgtctcggagcttacaatggaagcgtgataatgctgatactgtcgatgcggcaaaacctggtcacagcacacctatacctaccggtaatcagttgataagcccagttgtgcggagcttcacctacacacgtgctgagcaaaaacaggacgttggtgcgaccatttgactgctcctgatgaaactcgcagaaagacctcagaattagtgttatctcatagttcctcctctcgtaaatactatttatttagttgcagagcttagtaacacggctggtttttggaactgaatttgagccatgttctgtgaccagttttgtgtgcttttttccggccatcgctcatgctgtgctggctacgcgaagtttgtggattgaaaaatcagggaaaaaagaaaggaaagtaaaggttgtagaatatgatgggaacaccgcaacatttaatattatcggtaggttattcacccggcgcattttatttaaaaaaaaaaaaaaa

SEQ ID NO: 40848 - DNA, 612 bp, Oryza sativa
  unsure (1)..(612): unsure at all n locations
  Clone ID: PAT_MRT4530_4424C.1
gngnagatgaattagtgacctgaatgataaaaccttatgaattcattattttttcttgggaagacttgtcttgaccctaagaaaatttatgtaagctgtatctctaatacacggactatacctataaggaaataaattcaactatctaaaaaactaatcattcttatgtttaattacaactagtgccgcgccagcaggtcctccttgaatagtttgctgttggtacagtaaatacagtagtgcacgaacagtaccaagccaatacaatggctacatgatatacacaatatattttggttaggccggtataatgctcaacctcaatatgatgtatcttctaagtcagtttctcaaagaaaaggatatcttatgcatggtagaagtgggaaaatatatctctggtagaagccatgaaattatgaatgcactattgacatctgcctctactgtacagatggcaagaaactattgattttggaaatagtcattttgatttgctcgcccttttgttttgcgtttaggaaatgataattcttcttgccttgcatgacatttttcttgctgaattatatttttcatacagatatgtaaagagccggagtgatgcacagc

SEQ ID NO: 40849 - DNA, 463 bp, Oryza sativa
  Clone ID: PAT_MRT4530_44250C.1
atggcgaagactatggagcaaggacggcgaagggcggagaatcgcgcgggtacctcgcgaagccaaaggcctcttgggcgaagaatgagggaagacggtggcggtgccctccgccgccagatccggctaggagcggcgactcagcaggaggggaggcggctgcgggcggtggcgggagagaaggcggcggcggcggcgccctcccctccgccagatccggcgcgaggggacgtggagggctcccacagtggcggcgacgtgcggtagcggtagtggccaaggaaacggcgaccagcagcggcggattgacgacggcagagtgaattcgtgcattgtgttgatctgtgatttgtgattgtgttgttccgtgatttgtgatgatacgtgatttgtgatggattatgatttgtgttgatctgtgattgttgtcgaatgacaattgcttcatgtcgaaggacatggt

SEQ ID NO: 40850 - DNA, 940 bp, Oryza sativa
  unsure (1)..(940): unsure at all n locations
  Clone ID: PAT_MRT4530_44251C.1
atagaatgccggccgggactccctatctaaccttaccctctccctctctctcaccatcagaccctctccctcttcctctcctcagagcacataagcctagctacaaggagcggcggnggcgaggcgaggaggagcaacgangaggaggggagncggctgcggcggnggcggctcggcgaggagggccggtagctgcggcggcttgacgaggaggagcgacaatgaggagaaggggcggcgacatatcggctcctcccctctcctccaatcccgccggcagcagnagctcttcaacaaggaggagnggngacaaggaggcagctggnggagacggcaacgacgactacacccggcangggngatgcacggcgaccgcgaccatgccgcaagggcaccgccggcggcctctacagctcctccattattccctcttcctctaaacccacaaccaatacctcctttctctctctcctttatctcctgcgccatccgcgaacccctatcctcttcccccccgccccgcccccacccccccccccccccgcatcgcccccttcacccaaccacccagncacccgccccgggccccccccccccaccccccaaaccccacccacaacacggccccccgcccccccccccccccccccctcctccccccccccccccccccccccccccccacccgccccgcccccgccccccccccaccccncccccacccccccccccccccgcccnnnaaccccccccccccccccccccccccccccccncccaaccccccccccccccnnccccccccccccannnnccnncnnccccccccccccccccaccgnnnnncccccccccccccacccccnccnnnnnnnnnncccncccccccccncccccncccccnccccccnncccccccccccccccccccccccccccc

SEQ ID NO: 40851 - DNA, 550 bp, Oryza sativa
  Clone ID: PAT_MRT4530_44252C.1
gcacgagggagagaactagtctcgagtttttttttttttttttttgatgaaagtaatgccacaataccttgttaattcttgatgtgtatagtttttcttttcttttgtcaagattacatagtcagagagcaatcaaaagcatcagtcaaacccattacagttatacttaacatgaacccccacacccttttgcccttccattccaaaccagagaacaacgaaggaaggccctgaattagttacagaagttaagaactacgccggtaacaaacaaaccatcaagcacccacaaaaccaaaaacatatttcataaacatttcatcaccactaaacagggtgttaaaaacataactgttcaatcagtatttctgtaatattatgtcaggctagacatccttctcctgtgctgatgcaagggagatctctgagctggtctagaaatgaagctctccctccttcgaggcgctgacgccgacgtcgaatcgatgctgttgttgctcatgtcgatctgatcagacttgagtggcaaacacttcatcttaggcatgct

SEQ ID NO: 40852 - DNA, 912 bp, Oryza sativa
  Clone ID: PAT_MRT4530_44253C.1
ggccgcaaattttttttttttttttttgcgaaagtgtgttcagtatccaataaggattttatgttttccttttatttttaggaaagtttctttcttgtccagcaaagattagtataaatacaacttcggcacatcgccaccgttttacttttctaccttttcaacaagttcatgctccaacgaggagtaagatttgttatgattgtttgcattcgtggggctagggcttcgacgctctgatcttgtcaatgtaaacacctatctatcatatatcttagttaagctagcttggtagttcgatttacttgtatctactgagattcgctttagggtttataccggtatcggcgaaatcgctttaccagattagattagctaaggtatctaccaccctgaaaatcagtcaaaagcttgattatcgagatattacgtttcttttcatacttagtgttgcatcagttaagtttgatctactaagtcgtacttagaaccataatctctagcttgcttcttgattgccaataaagtgcatcggggtttcagccgatgagttatctggatgttgcatcggcttacaaggattgcatacataatggatttagccgattgcaacaaaggtttcactgtttaaattaatcttttggattttatgacatcggacctccagccgatgtatgctttaaccttcggatcaatgcttattctatcatattgtattgctagccgattggtttatactagattatattgttattttattacatcatcatcagccgattgcctttctatcattatctatattggacatatagccgattgcttaaatcctatcgctatcggctagtatcggcatcggctattattggcatcggctggaactactccatcgccttgtcagccgatcggctattt

SEQ ID NO: 40853 - DNA, 1610 bp, Oryza sativa
  Clone ID: PAT_MRT4530_44254C.1
attgatgccaaaaggacgaacaatccccaactcgcctcgaaaaaaagcaaatcaagaagaatccaacgatttcgtgaaaatatccgccaattgcaattgagtatcaacaaaagccaattaaacatctcccttctcaacatcatccctcaaaaagtgatagcgaatgtcaatgtgttcagtgtgtgagtgttgtacagggttcttagcaatattaatagcactagtattatcacaaaagaaaggaactttctcaaaagtaagaccataatctctcaaagttgaaataagccaaagaatctaagaacaacaactagcagcaataacatattcagactcagcagttgattgaacaacattagattgtttcctagaagaccaagcaatcaaagaagtaccaagagaataacatgttccacttgtacttttcctataaattctacacccactacaatccgcatccgaataaccactcaagcatatagaagatgatgtagaataccatattccaaatacctcatgatgcgtttaacaacttgacgatgtgaagcacgtggagaagcttgaaaacgagcacataaatacatagcaaattgaatgtccagtctcaaaacagtgagatagagcaaagatccaatcatgttcctacactcctttgatccacaacttcaccatcttcatcgagatccaacacaacagttgatcccattggtgtagagattggcttgcaatccgccatcttgaagcgccttaagagatccttggtgtacttcatttgatgcacaaacgtaccttgcttcatttgcttgatttaaagtcccaaaaagtaagtcaactctcccatcatactcattttgaattccctcattatcacaatcagaatcttcatccacgcttctagccatgagacaaacatcattcttgcctttgttccccttgccatcatcctcatcactctcaaattcaacatcgcttgattcttgggcagctgcaaatgcttcatcaagcgccctcgaacgaagtagacgtcgaagccctgtcgccaccagtgacaccgcctgcccttcgttcccccacgttccccaccaggtctcctcttccgctcccttgtggacggcggcgcggcggccatcggcatgccaggcgatcgtctcgtctccctgctggcagcggcgacggggggatggtggaacatacgggctgctccgcgcggtcgccggctcgaacggcgcgaactcgtcgaagtggccgctgtaccatgcgtcatgcggcggctcgcggccgccaccagctcggtgtacgctgcgatggccgacaacgacggcgcgggggagcactgcaccaggaagagcagcctcgccaccaccccgacagccaacatctcctgctgcaccgccggcgtcgccgagtgcctcgccatggcgtgcagcgcgcacggcgctctcggtgcccgcgtgggacagccgcgtcgccacgcacgccaccgccgggtgcgccaccagcgctccaggcgcccctccgcgacaacggtgagctcgcacgccgctggcaagcctgatggggtccctcctgggtgttcgttcagtggcatctaccttttccagcagcggcat

SEQ ID NO: 40854 - DNA, 512 bp, Oryza sativa
  unsure (1)..(512): unsure at all n locations
  Clone ID: PAT_MRT4530_44255C.1
ccggccgggctctctcgtcgtcgcagtcgctgtcctccacttcctgctctctgtcttgcaccttgcagctaccccaagccatagatccctcgctcgccaaaatggccctctaattcggcgcccccgctaagggagctgacactaagtcagaatcattcccatgatgtcacgaaaagatccctccggctgaagacatgggcatatgaaaatggatggttactgcgacgaacgacacaatagagtgatcaacgttagtaaccttggtaagaactgactagaatgtccatgagggtgctgaaggttcttgttgcatctgaaaaccctcacgatatcgttgatgtcactgtgcaaggcccgtatatgcagatngctgtccatcaggatgctcacatacactggcgatcacgccagtgggtggtaaattgactcctgtgacaatgacgatgcacttgtagaccacattgatgaagacacatctgctgattctgaatgatctcgatatggatcatcac

SEQ ID NO: 40855 - DNA, 346 bp, Oryza sativa
  unsure (1)..(346): unsure at all n locations
  Clone ID: PAT_MRT4530_44256C.1
ccctagcactccccaccctcttcctcggcgggctttatataaaagtcggcggtggctacaacaccncctccggtgacaacgacgacatggctaacctcctgaggcgcgcgtcgctgcccctcgccttcaccgccgacgcggcaacagccgccccctgccccgagagctataagcaagggatctgtggctctactttccactgccggtatttctcgtctaaagccaactagaacacaaagtccattggaactgactctcgtgaacagaatctgtcaaagaaagacttggttctacaccaggctcttggtcaaatcacatctgcctttgggaagggcgcactaatgtg

SEQ ID NO: 40856 - DNA, 195 bp, Oryza sativa
  Clone ID: PAT_MRT4530_44257C.1
atgaggaagcaacacacttcttctgctgttgctgctgttgctgcgtctctttgcaaggtgctcctgatgatcctcgccctcctctgcaccctgcacactgcctccgtggtcgaagggagatcaggtcctccgaacgggccgccagctcctagtgccaacgaagagcggcacaatacaccggcctttcacaactag

SEQ ID NO: 40857 - DNA, 1141 bp, Oryza sativa
  Clone ID: PAT_MRT4530_44258C.1
aaagcaacaagtacttagcgttagtcattctctccagcaggtgatatgctattcaatttattatttcctgtgattttacggtgccactaccttcgttctgttctcggaagcaatatagctaattgcctataatagattacttcctccgtttcacaatgtaagtcattctagcatttcccacattcatattgatgttaatgaatcattgattcattaacatctaaatgactagcaatagtgcccgtgcgttgcaacgggaaaaacaccgtttgatagtgtgacaccttgaaaacttttggcccaggtcttcccaagccggcccaaacttgggctggcccatcttcggcgagccgaatcaattcgacggcccgcgagctgagcagctgaccatggcacatatgcgggggaaggtccgatgcacttccgcggcccattgggcgtagcgtaatctgcggcggcggcggtggcccaacgctaggcaaaactgagccgtccgatctaatggacggctccgatcgtccccttgccggatgaagtgccgatcgggagaaaagggcaaaaccctagctcccaaatccctctctcccgatcccatttctctccggcgacgagcgagcggaacgacggcaaaggtggcaacggcgagctggtgcgcgcgtgcggtgacgaccgccgagcggctcctgctttgccggctggggggcgcacccgagggcgttacaaatccgtgccatggcgtcggtggtcctgctaggcgggcgcgcaaacggcgacgagcgccgagcggcatggacctctcggcgggatgccaaaccgacgcttcccgtctttggcaagggatggcggaggggtgctccaggacaacgcgcatgcagggaacccgacgcaactgcgagaaggtgaaggtgcggcggtgccgcttctcggaaagctccggtgagctttgggacttcaggtccgataagtaacccgaactcttaggtgtggccatcgccgcgtctacgtaggcaggtctcgcgagagagagaagaaagccagaaagtctcactggctgcagggcggcagccaatgggaactcgacaggcaaatacacggtggtggcgatgattggggacaccgatcgaacgagatgccatgacat

SEQ ID NO: 40858 - DNA, 261 bp, Oryza sativa
  Clone ID: PAT_MRT4530_44259C.1
atggatgtaaaagcaaatgtcacgagccgcgaggagctcgcctgcaacgcgaaccgcctcgaatacgacgcgcggccgcgcaggcgcaggccgcaggcagcagggaccacgacacgacgactctgctactacgccctgcggatctggacgctgcgtgcagcttgccgctacgagaacatcagccaaccatggcaagctcagcagccgacctccctggggttttatgaggcggaggcggcggcggcggcgtcgtcgtcatga

SEQ ID NO: 40859 - DNA, 440 bp, Oryza sativa
  Clone ID: PAT_MRT4530_4425C.1
tgacaagacccttcatataacccactccgaccaagcacaccacacctcaggtttctcccccgcccccagcaggcagcgagcagccccccctcgtgcctaggcgaatctgcaagccgcataggctgtcgcagggcccatccgaactccataatgctcacccttgcctggatgcgtcagcccgaggaaagctatacttcaagtcaggcagttacccattcccgcttgtggcaagcgctgtatgtcttccagtgcatcccgctaaccggtccttaactgccatgggtgcgactagcaaaaccatgtacccacaacccacctttaagtcgcattttagttggataattacgaccaatgaaacatggccgggtgtctcaagcacgcaactcgttatgatactaaaaaggtctaatactgcaattatcccatcaactgagctagtg

SEQ ID NO: 40860 - DNA, 378 bp, Oryza sativa
  Clone ID: PAT_MRT4530_44260C.1
gccaaaagctgcaggcagcgtatatttgtgcatttcataatatagacagccctcaactgaaacgtacagtttttcaggcttgaggggcatgtaagaaggaacaaaagcacactgaaacattcggtagatcaagttcagtgaagtgaacaaaaatgaaaagaaaaaaaaactcagatattttgtacgcatgccctttgaaccggcattacgaatggcagagtggtcttactgcgacctttgcattgtttcatcatatcctctcggagatgtatgctgcaagcctttcaacaggcttttggccttcaactctcactttaccatggcaccttagctttatccgcgccaagtaatccaccgggatccatgcaaagctaaggc

SEQ ID NO: 40861 - DNA, 371 bp, Oryza sativa
  Clone ID: PAT_MRT4530_44261C.1
gaaaatggttttctatgggggagttgatcatgctttgagaggggaggtttttgaaattcttgttgcggtattcatgaatatgattcaacatatgctgagagggaataccttgctgtcatgaaacgagcagaatatgaagtcataaaatctcagtggaagagtatctcagccacccaagctaaaagatttcaccaagttcagggaaagaaaaggcccaatcgacaaagaagtggcgagaacagactggtccattccctattatgaaggagatgacaatcagaacgttgcagctttacgtgaaatttctgtaacatattccttctacaatttcgaccctggttattgccaaggaatgagggactttttggctt

SEQ ID NO: 40862 - DNA, 925 bp, Oryza sativa
  Clone ID: PAT_MRT4530_44262C.1
ccggccgggccggaataaatccaatccaaaaccagccgcctcgtcgtcctcctccccaaccccaccctcctcgcgattcctcctcctcgtcgtcgtcgccggcgagaggagccgccgccctgttgctggtgctcggtcgatcgccgcgcagttggtgcgcttcccttccctggagccaccaccaccaccactcactgcaggcgaggggtgggtggtctacgctgcggtggtctcgtctccttcctgctgctgctgctgctgcgccgggtatgcagagccagatcgtgtgccatggctgccggagcgtgctgcggtacccgagcggggcgcccagcgtgtgctgcgcgctctgccaggccatcaccaccgtgccgccccctgccccagtaatggaaatggctcatctaatatgtggtggttgccgaacattgctgatgtatactcgcaatgcggacactgtgagatgttcatgttgcagtacagtcaatcttgttagaccagtgaataatatagcacatgtgagctggggccagtgccggacgactttgatgtatccatatggcgcaccttctgtcaaatgtgccatatgccattatatcacaaacaccggaatgaatactgtggcacccacgccatctccaatgcctacatcaagtggatcttcatataatgcccccccaagtggatcttcatataatgcccccccaagtggatcttcatataatgcccccccaccaacttcagctcccacatctcgaccccagaatgtaaccgttgttgtcgagaaccctatgactgttgatgaaaagggtaaactggttagcaatgttgtagttggagttacaactgggaaatagcagcgtattgtctgtaccttgttacatccttgatttgtaccactaaatacgtgaagatgggaatacca

SEQ ID NO: 40863 - DNA, 1929 bp, Oryza sativa
  unsure (1)..(1929): unsure at all n locations
  Clone ID: PAT_MRT4530_44263C.1
gctgaatcctttcatagttccattcagagactactattgagatataagcaatatggctgtgttggcggattctgatcttaattcatttggataaatgttttgcgtatggaaggctatgttgttggttaagagatttgttaaatgttgttgttctgactgtaataaggtaatcctatttgataggggaaatttaaactcccagtcacttgattcttgcctatccaaaacaatcacttggttccattctggttaattgtcaatttgtcatgccgagtgattttggaccctgtattagtgcagagtgacctgttaccattatatctttgccagattagtagaaataataagttgagaacacattcctctntcagatggtttgaagcttgaacaaacttgttttcacatataagagtgaactatgcttgatgattttactcatatttatttattcgcaaatgaaatgacaaacttgttttgacagatagagtgaactatgcttgaccatgaaggcgtcgatcaagttccgggacgacgaccggccgctggtgcgcgccaaggtgcccgtcggcgtcctcgggctgccgttcctcaccggcgtctcggccggcggcggcggcgactcgcgggatctccgcttcgacctctccaccgccttcgcctccggcccggcgctccgcctctcgtaccgccccaacgacccgctccagcccttcgcgctctccgtccgtaccggcctcggcccgctcgggtcccccgcccgcgcgccgttcgccatatccgccgagttcaacctcctctcctccagcccgccggccttctccctcctcttcaagccccgcatcggcgacttctcgctcgccaactccgtcatctccccgcccgcgtccgcgtccccggccccgccgctgccgccgccgccgccgtcgcacaagctgaccgacctcgccaacggcggcgacgaccacagggcgttctcgttcagcgggaacgggttcgccgcgaacgtggccgccgcggggaagagcggcggcggggtcggcgcgctgctgtccgggatgcgcctcacgaccaggagcgtgctgccgctgtggagcaaggcgagcctgcggttccagtgggggctgcgcgtgccgcccgagctgaaggccgccctcgccgacgacgggtacggccgcaaggcgggtaacctggccatcaacaagttgccgctgctggtcatgaacaagatcacaattgagcacacgctgcggaatcctccacattccgatgccgacaaggggaagaagaaggatgcgccggaatttcagactgaagggttctcgctcgtcaagaggcagctcgaggtgctcaatgcagagagcatcatgctgcggcgtaccgtggaggacctgcgtgccgagatcggtggaaatagagccgcctcaatgcccggtaaaggcgacgcccgaaggatgccgtcgtccctggcaccaccaccaccacaaccattcctggcgaagccagatcgccacgggaacggcaaggagatggtggacagtggaccgaagccggtgtcgaatgaggcgagcgaggagttgaagaaggcactggaggctcgccggaagtgaagaagtatcagaatttgctgaaattgcaaccccctgcaatactgcaacttgacatggctgcttggttaaaattttgcgctcaataatacatttggtaggtgcagtttgcttccccagggaagcaaatggaattctcataaggtgatgtaataatctcgccttattttccaggccgttgcttgtgctagactgctactagtagtattatttatctccaattcgccatgtataaactcgctcttttgttagttgaagtttcagctccattgagatgtatgaaacgctttagttttccagatcatccttattacaatttcaatcc

SEQ ID NO: 40864 - DNA, 1208 bp, Oryza sativa
  unsure (1)..(1208): unsure at all n locations
  Clone ID: PAT_MRT4530_44264C.1
ggtattgtactatgcagatataaatctatattgtcagctctccacatgtttctggatcactaacaagaacccaggaaggtaagtagaatatgaaagtggtccaagtaattatgatagcaatcaagtcagatgctgattaaatcaattgttcggcaggaattatcaagtcaccttggtgctttgcattgtcaaatggcagatgtccaatagcatctcaggtaaatagctccgcttcttatattaataacttgagctgtatatcgaattatctactctcattggataaataatgcagcaaatatgcatatatgtctacatttttctattcggtgctgtattcagtagtggtttggtggcatatgatcttaaaaggcccccttttttacacacacacacacacacacacacgaattgagcaacacatacgccaacgttacatgcatgtccttcagttattggatcaaccacaggaaggttaagaatattgaccatataagaggaatttcacttaagttctaatagaatatctgaatcacatcgtaattcataaggaatctcgattaagttctaattaactttggtacatcatgttgcctgactcactacataatatttggagtgctaatgccaattcatatagtgctctgctatcactatttcagtagtgcatatactgttaatcaaaataatttcattttgtaacttgtatatatatatatatatctacatgaggactttgcaaagcaacatctcaggggcctacaatgagttgttgctcggtaagaagttttagtatcaaaattcataatatgcgcgctacaggtccaaagtactgtccttgctagattcagttccaaaatgagacagttctcaccaggataacaggtgacagaaaactttgtcgtggttccatagcagttgcgtgtggaggggcagcagcttatgaagccacgtcttgtttcatcagaggtaatattgagctaaagatgataaatttagaaacttcagaagatggcatgaactgaacttactgacaaatgcttaattcagaaaactgacaagatctcacgaactaacacgagaaaatatggtctttatgcactgacttcgggtgttcagcgagcagggcgttgcagtcttgctgnagctaccagtctacttcagtttgaggaagcagtcaaccaacaacgttcgcagcaagcacatgc

SEQ ID NO: 40865 - DNA, 1019 bp, Oryza sativa
  Clone ID: PAT_MRT4530_44265C.1
atggctgcagcgaggagactgcccgtcctggagctggtctccttcgtcgccgtcctccttatctcctcaccaacagcagcagcagccgagttgtctgtggacttccacgcggcgtcgtgcccgccgctggaggccatcgggtgcgatgcatcggtgtatctgaggggaggcagcaactcagagcagggcatgggcccaaacctgacgctgcagccgcgggcgctgcagctcgtcgacgacatccgcgccaaggtgcatgcagcatgcggccccaccgtctcctgcgccgacatctccgcgctcgccacccgtgacgccgtcgtcgtctccgggggaccctcgtacgcagtgtctctcggccaaaaagacagcctcgccccggccccggtgcgcctcgtcaaccaactcccgggcccgggcacctccagcgtccaggctctcctcgacaaattcggaagcaagggcctcagagaggccgccgacctggtggcgctttccggcgcccacaccgtcgggagggcgcactgcgacttcttccgtgaccgcgccgcccgccaggacgacaccttctccaagaagctggccgtgaactgcaccaaggaccccaaccggctgcagaatctggacgtcgtcacgcccgacgccttcgacaacgcctactacgtcgcgctcaccaggaagcagggggtgttcacctccgatatggcgctcatcaaggaccggatcacggcgccaatcgtcaggcagttcgccgcggacaaggccgcattcttcaggcagttcgccaagtccatggtcaagctcagccaggttccgaggactgacaggaacgtcggcgagatccgccgcagctgcttcaggaccaacggaccacgcctcgtcgacttggccaccggcgatgaggccgcttctccttgatatgggtggatcgatcgagatcgttggctccggctgtacgacgacatgtccacggagcggccctccatccgttgttgattaattagggaggtggttgacgt

SEQ ID NO: 40866 - DNA, 523 bp, Oryza sativa
  Clone ID: PAT_MRT4530_44266C.1
ccggccgggagtgagagcagagagccaaattaagatggctgcagcgaggagactgcccgtcctggagctggtctccttcgtcgccgtcctccttatctcctcaccaacagcagcagcagccgagttgtctgtggacttccacgcggcgtcgtgcccgccgctggaggccatcgtgcgctcctcagtgcaagccgcgctgcagcaagagatcgccctcgccgccggcctcctccgcatcttcttccacgactgcctcccgcaggggtgcgatgcatcggtgtatctgaggggaggcagcaactcagagcagggcatgggcccaaacctgacgctgcagccgcgggcgctgcagctcgtcgacgacatccgcgccaaggtgcatgcagcatgcggccccaccgtctcctgcgccgacatctccgcgctcgccacccgtgacgccgtcgtcgtctccgggggaccctcgtacgcagtgtctctcggccaaaaagacagcctcgccccggccccggtgcgcctcgtc

SEQ ID NO: 40867 - DNA, 345 bp, Oryza sativa
  Clone ID: PAT_MRT4530_44267C.1
tgacagaaaacacaaggcctgggagatctgcttaactccagtgcaggtccaaagctcgccttcggatatatgagcatgccagttgatttgatcctgcaatcaacaagaaatagaacaaaggaaccgcaattaatcctataaatgatagccgatcggctaggactctatccatgcgtggcaatcatcttgaagcacatcaacttgaacccgatgacgtacaccgagtcatattatcggaatcggctgtatcggctagccccgtccgactcgaactctgccgacctgaccttagccgatttggactgcagccgattcttactctgtttccgcaacgatcttcatctt

SEQ ID NO: 40868 - DNA, 321 bp, Oryza sativa
  Clone ID: PAT_MRT4530_44268C.1
atgggcgttgcaggctccggtgcagcgctggggacaggggaggcgatgcagctgagggggggggcgacctcgcgcgttgcgcagcgtgggagagggaaagatgcagcgccgtgggaggaggtgatgcaaatgctgcgtaagcaaatcgactggaaatatcgttggacgtttgattttgatccaatggttggaagaaaaaaaggtgacgtggaagcaccaaaactcagagaattcctattagtggggatgatttgtataggtatatatgataacaatgctatctgtgactatgaggtggagcaaagggaggtgattggataa

SEQ ID NO: 40869 - DNA, 957 bp, Oryza sativa
  Clone ID: PAT_MRT4530_44269C.1
atggagacggtggcggccgcggcaaagacggcgatggtggcggacgcgacgacgacggcggcgatggcgatggtggcggacgcgacggccgcggcgacgacggcggcggggctcgtggcggtggcagctgcggcggcgcctaagattgtgagtgaaaccttggagagtaggctcagtgaggtggaacttgtatttaactgtgttaagaaagcactggaaggtacagttgagatcaagatcctgtcagatgctcaagtttttcatgggaaaattactgcttgcacaacaaatgtcccaaatcatgctgtattgttgtatgacagcgatgttgttggttgttcaaccacagttggtgacgacagagttattcaactactgcgacgtgtcgtggtagtatcagtgaatgaaatgttgatactgaatattcatgctcagaatgacaatgtcttctcgggttgcagtttggagttgagtccattcactagaggctctgatgaggaggagattagctgtgggaagaactgggtggcggcggtgggggaggagctggggccgttgggcgcagccggcggccggcaagggaggttggagaggatgttgaggtcggtgtcgaaaagttatatggtaaacaagttagagttctacatgtcagccgttgaccatgtcgtggcattagtaagatgtagatgtagacctaggggcaccgtggagttgagatatgcagtggttaaagaggcagtggaggctactgttgaaatcaaggctgtcgagggatgtttcagtggagaaatcgcagcctgcaccaccaacatccaagatggagtagttcttcttgatagcacaataacatgctgtgtgatggatgacaatggtgatgtccagttatctcgacgtgtcatggctgtccaatgtaaggagaaacttctgttgaccgttgttaatcaggatgatatgtag

SEQ ID NO: 40870 - DNA, 924 bp, Oryza sativa
  Clone ID: PAT_MRT4530_4426C.1
atggaaaccatccaggcgctagaattgggagttgaacagaaaaagtcagaaccagaggttgatgagatgccaggatccatggaggatcaaaagcctgcggaaataagccaggacaaagtcgcggaaactgatattaaaccagcagtacaaactgagctggagacaagtccagtggctaatccaaaccctgcagaaacaaaccagtacacagatggggtaacttatggtgacctagaaaccactgatccaggcactacttaccgctgcaaaagatgtcgcacactcgtcgctactgaaggctatgttgttacccacaaagttggtcgtggtgagaagtgcttcgcgacgcgcaaaaagcggccgggggatgagaaggaacccgaatgtacctgcctctttgtggagcccttgaagtggatgcaacctgtggtggaaggatatatttcagggaagatcgcgtgcaggaaatgcaacagccgattgggacaattccactgggcaggaatgcagtgcagctgcggagcctgggtgaatccagctttccagctggtcaagagcaagattgatcagtgtgagatgtgatcagtcgggtgactcaacttcaacttcattatcagtgacatcgcaatcatacccagctgtaggaaacattattatttccttctgaagcttctataggcactctggtagtaagttttgctgtctactaaatgtaagtctttgcagtccgcaccattcagattcagtgtttccttagttgcatcatcttgatgaaaataatgggaacatatcaggcaagaaattttctttacatttctgaagtaaacgaacttcacactgcattacgattgcaaacacttgcatgtgatttaagggaagagcagaacctcttgtcaaagcaaaaaaaaaaaaaaaaaagcggcc

SEQ ID NO: 40871 - DNA, 2185 bp, Oryza sativa
  unsure (1)..(2185): unsure at all n locations
  Clone ID: PAT_MRT4530_44270C.1
atgcacgcttaggttggatcctatctcttatagcggcctttttttttttttagcaggaacccacttttgatatggaaaaacagttcatcagaattagcgaatgacaatgtttcagacaacaaggtttacatacagcaagagctgacaaatcttttctgacaattagcctctttgcccgccacaaacactacagttgcatatcagcctatcagctattcatcgtccagtacaacgacaacaaccatgtgaactacaactagcagtaaaatacatgaaacaaagtgcatcctggcacaacgctgcaatcgaatgaatgcagcataagcaccctggagcattatttgatatcaaaatacctgagcaaacgacactggaaatgagagttcaactctgattgtaagcagtaaatagtggtatcggatggcatcctacaaggatgatggtaaggcgatacaagccagaaagcatcaggctctgatggtcacactgcacagacataatcctggtggcttgagctcagatgtgaaccactctgatcccgttggtgcagcgggatcatacatcagtgtcttatagcagggctcttcatccagagagaacagcagcagcttcccatcatgtatgccgaaacaaaaacgagtactagaactacctgtgagtggcactgggactttctgccaagaattatcagccgggttgaagactgcgagtgacctctggttcttccactcgatgcagaagagctttttgtcaagaacagcatgggctgtgaccattacacaaccattcttcacctcaccccaggagttgtcattaggattgtacacgtcaacaaaacgcgtgttaccaattgtgaagcgcgaacgaccgcccatgacatacaatttgccttcaaagctgcacgcaaagcagccccaccttggacggcgaaggctctcaatcaatgtccacttattctgttctgcgtcataaacttcaacactagataaactatcaccattgggaccaaacccaccagcaacatatatcataccgttgacctctgcacaagcaaagtcacaacgagccacattcatcttagaaagctcaacccacctgtttaggcaagaatcgtatcggtaaacctcatcagaaacacactccttcccatgatcagcagcatagccagcaataacgaaaagctttccatctagaacaaccacaccaaaaccagctttggttggcccaggcatgggtggaagagggctgtgcttttgccctgaacaccccaaaacttcccaatgggacccctttgatccagcatcagcagtcaggacatacacccactcctcaagcttcccaacctctttccttacagcaatgaattccttactctcgaggaatgacatccacctcttggacactgaacccataacagggaactggctccgaggaacaagagcaagacatatctttgcgagatcttcaggtaagccaggtattagagcacagtatgcgtcggattctcctatgggcataaagccttgggaatatttcgcccttgttggagccttgagctgcatgccagcacaaagttgtgcctgtgactgagcaaaagaatctcttgtgccaacaagtgtaagcattgtacactcttgagagcgcaactcaatttttgcctccccttgttagccaacagaaatgaaaaactttggcttatctataagactttatctgctataaatgacagtgacccacaggaaacaattcatggaaaccgtcgcctatggggatggtaagagacaagggtttgaatgatgctgaaatgaggttcttcaactttgatgtctctgttttagtaattcttggtgtatcaaatgccatccgatactgagagactttggaatggtttttccttgaagggtcggaagtctccttactgttgaggtagaaacctttacctcccacacacatcgcacaattatctatggccatataaattttgacgactgttagccagcagttccatccattttctgtgtttttaatcaccttgggagcagcggaggcagtgtggggtggcgctccggccgcgtgatggggagggatcggacgagaggaaatcggggaaaacaaatcgcccgcaagttggagtgcgcgtggggacgataagataggacaggagagganaggacggaaaaagaaa

SEQ ID NO: 40872 - DNA, 260 bp, Oryza sativa
  Clone ID: PAT_MRT4530_44271C.1
cacgtaattaacgctgcctcgctgttaatgttcttatacgtacttagtagtagaagtactggtagtaggaatttgggtgcactcgtttcaccggatgcctcagctggtggagattttggtagcttggaagtgcacgcgcaaaccttggggtggaaatggatttttttgatcaggatgttgggacgctcatgattagacctggatggctttgatgatagtggattgattgtccatccacattgaaaaaaaaaaaaaaaaaa

SEQ ID NO: 40873 - DNA, 3840 bp, Oryza sativa
  unsure (1)..(3840): unsure at all n locations
  Clone ID: PAT_MRT4530_44273C.1
atgtcgtcccgctacctcgtgccgccgccgggggccgccgaccgggcggggggcgacgccggggacgcggccctcgcgcgcgacatcgtcacgctccacaaggcgctctcccttgaccactccgcctcctcccgccgccgccgctcgctcccgctccccgccccgtccgtcgccaaccaggcccgccacaagcccaggctgaagccttcctcctccacgcgcaagctcctgccgtccgcctcatcgtcctcctcctcctcggcagcggcggcggcgtccacctcctcgagctcgtccttctggaagaagtctctgacggccatctcgcacctagggcggcgccgcctcgactgcgcgttcgccctccacgtgcactcggtggacggcctccccgccgcgctcgatggctccccgatctccgtccacttccgccggatgtccctgtgcgcgtccacccgccccgtcgcggccgccctcggcgccgcctcgttcgaggaggtgttgacgcagcgctcgcccgtctacttctcccgcggcgccaaggccgcggtcaagtatgagccccgaccgttcgtcgtcgtcgccgccacctcggcgctcgagctggggaagcacgaggttgacctcacccgattgctcccactctccttcgacgatctcgaggagggcggcggctccgggttcgggaagtggagcacgagcttccggctgtccggccccgcccgcggcgcgcggctcaatgttaccttctcgtgctcgctggtaggcgcccccggggagcagcagaagggaggtgaagtggcggggctgaggcgtggctcgatggcgcgacaggtgtcagtgcagacccctacaccagtgccggcacggagccgggatgtgagagtgttacacgaggtgttgccaagcgggaggactgtgaaggctctgccgttttttggtgatgcagggctcgatgtgaggaaggaggaggtgccaacagtagaatctgaggagaatgagtcgccacaatcgaagcattgcacatccgtggaggtgataaatgtggacttggcacagccagagggcgattgtgatgctgcagagttcagtgtgatcgaacagggagttgagattgcccttgaggatccagaacagctaaaatctgtggggactgataatgtagctgatggaaatgaggactttagggatgaagttggagaaaatgagggagaggccaaggctgtgtcagtaggtgatgcctgtgctgaggagagtgttggagggaagccagaagaggtgttcagtgatgtttgttttgaaagcgaggatgcgggagagaagaaggattcaatggtcaaagcggtttcattgcctaccgtagaattggatggggaggatcagctggatgcagaattggaagatctggggtgtctaatcaatagcctctctgtggtcgagccagaacaatttgactcaccaattgtagaaggtaaacgttctaggcggttgagctgtgtgggtgtgacagaaggctgtaattctgctagtaggatgatcagatcacgcagcatggatgcctcatccgattttgttgctagtgagtttttgaatatgcttgggatagagcatagtccattgggagcaacctcaggtagtgattcggagtcaccaagagagcggctttggaagcagtttgaaaaggaagctctagcatctgggaatggtattcttggtttggactttgaagatgaagcggaagaacttagttatgaagatgatgcggaagaacccaggtgtgaagatgttgcacatgattttgatctctctacaatcatacgtgaagcagaacttgagcttcagaacgcgattcagcccatagataccagatttcgagctaaatcactggaagatgaagaaactgaagccttgatgcggcaatttgggttaaatgagaagtctttccaatcttctccacccggaagtagaagtgggtttggtagccccattgaccttccacctgaatcacccattgagctaccacctttggccgatggcttgggtccatttgttcagacaaaagatggaggatttctgcgctcgatgaatccagtcctgttcaaaaatgcgaaaaacaattgcagcttggtcatgcaggcttcttcaccaattgtactaccagcagagatgggctctgggattatggagattctgcatggtctggcctcagttggaatcgaaaagttatcaatgcaagcaaataaacttatgcccttagaagatgtcaatggcaaaatgatgcagcagattgcttgggaggcttctccagctttagagtcttctgaaagatatgacctattggataatcataccatggatgctttagctggagggattggcaatgctacctttggcaagagtaagaaagggagatgtactgatctgtcatcatcattaggtagggaaagcacttcagaatatgtttcacttgaggatcttgcaccattagccatggaaaagattgaagccctttccattgagggtctgaggatacaatctggcatgtcagaagaggatgcaccctccaatatcagtgcccagcctattggggaattttcctctctgcaaggaaaatgtgcagggaataccctctcccttggtttagaaggaaccgcagggttacaactcctggatgtcaaacaaagtggtggtgatgtcgatggactaatggggttgtcaatcactcttgatgagtggatgaggcttgattctggcatagtagatgaagatgagcagttcactgaccggacgtcaaagatacttgctgctcaccatgccaaatcaatggaattagttgctgaaaaccagaatgtggacaaaaagaacaggaggtctggtagaagatggggtttgctagggaacaacttcactgttgctctcatggttcaactgcgtgacccactacgtaactatgagccagttggcacgccgatgcttgctttaattcaagtggaaagggtcttcgttcccccaaagcctaagatatacagtactgtcacagataaaggtaacagtgagcatgatgatgaggagcccaagactgaagaggtactagaaaaagctttggtcaaggaagaaaagattgaggaagaagaagattctgttccacaatttaaagtcgcagaagtgcatgtagctggtttcaagagcgagcctgagaagacaaaatcatggggtaatcaaacacagcaacaatcgggatcaagatggctgcttgcagctggcatgggtaagggcaataagcatcccctgatgaaatccaaagctattgcgaagccaactaaagaggcagctggtcagtcagaagacaccctttggagcatttcttcacgcgtacatggagctggaaccagatggggcgaattagctggacctaaaaggaacccaaatatcctccttcaaaaagaaaagcgatttaggtgatggcttggcaattatcagtatttagctcttgtgatttgctgtcttggatgaatctgttcagggaagagtctatttatctggaaccttgtcctcactggaatacttctagtggactgttaatgtaaatgtagttcctttttcttgatacaccttgaaccatccaggtacatgcacatgcttccgatcggttgtgctccttttctccttgtacttggctgtactgagaaactggtatttctccttttcttgttacaattgaaatagtggctttttgcctgtgaaggcgcaatagcaatactacagccttctcatgtatgtagtggttctagcattcatttggccagtcttttaacggattttatacccatttctgtcnaa

SEQ ID NO: 40874 - DNA, 251 bp, Oryza sativa
  unsure (1)..(251): unsure at all n locations
  Clone ID: PAT_MRT4530_44274C.1
atgaatgcactgctctctgtcttcctagccgtgcaagggttgataggggaatgcttcaccttctactttggtgtgcatgattatcactgcttgaaaatgctcatggcggaccggaattctgttatgtctatcgttctcgatgcgagggaccaggtcagtggcattaacatggtcaccgtccactctggcactgcgggtgacatggngaaaagatatcagatctgcttaacgtttcctgacaggatggactg

SEQ ID NO: 40875 - DNA, 270 bp, Oryza sativa
  Clone ID: PAT_MRT4530_44275C.1
attacactcgattcatgagtcgctcggcgcggatgaagacatgagagcggcagcgatggccatggagaagcacttcaagtacgtgatactaggcggacgggtcgcagcggtatatgcatgaccggaattccacaagcacggtgccaagccaggggagctcgccatcatctccaaggaggccgcggcttcttatgagcgcactgctctcaggaagggatacctgtgtactcagaatgctgtatgactcccaggatttcatgtgtgtcacgg

SEQ ID NO: 40876 - DNA, 517 bp, Oryza sativa
  Clone ID: PAT_MRT4530_44276C.1
attattcaatactcaaatctcaaaagtagcaaattacctgccaaatttggttctgttggcattttcatcttgtggtctaccatattataagctttgccatatggtcatcgaacaggtgagcttgtgttatgtcaaaatcgaatccaagccagtcaaacagtcaaaccacattttcaccatcttccccatccctatagctgcctttatgttcctcctcatgtctccttcaatttgacacccagggggattgatcaaatcggcttggcctgtgagcagagctagtcagtatttatgatatcagtagccatgtgatggtggcaggtcacgaagatcaatttaggagttattttttatccaaatgtttcctataattaatatcatagaagatggaattcgcacatcgtcagaacttagaaccatgccgtctaattctcttacattaaaatagaacacactttagatcgacctgttgtgatttatgttatggaaggaatcttatacttgcaattttactcta

SEQ ID NO: 40877 - DNA, 228 bp, Oryza sativa
  unsure (1)..(228): unsure at all n locations
  Clone ID: PAT_MRT4530_44277C.1
aggcaatgcgtgtgtgtgaccaataagcactgccaaggctgtgctgggcaaaacaattgggaggagagaagaataagacgtgtgagcccgganacaagatggcttgatgtgttgatgttggaggaacaaaacgatactttagttgaattcatttttttgtgaatatagttattatatacctgtgacaataatagacccagctgcatgatcccaaaaaaaaaaaaaaaa

SEQ ID NO: 40878 - DNA, 363 bp, Oryza sativa
  Clone ID: PAT_MRT4530_44278C.1
atgcctcctcattgggactttgggagcgaaaggaagaaggagatagagaggaggctggcaccgaggtccgtaagcacgacgcggtcgggggtacacgagcacgtggaggatgccgccgcgatagtgcatggtgggggactgggggacagcaacgaggcctcaacgccgccgaacaccgcatcgcgcttcgcccattcattggtctccgacgagaagacgtccaaggtgatgccgattcccgccgccgcttcggccgccgtcgccctactccgcccgtcgccccgtagggaagaagagagagaggagagtgggaagacgaaaggagaggataacatatggggtccacatcgaattgccacgtaa

SEQ ID NO: 40879 - DNA, 1211 bp, Oryza sativa
  Clone ID: PAT_MRT4530_44279C.1
ctagccataaacaagagtaccgacccaaccctggctacggccagaatcccgggacaggtaaccaaggttgagccccttgcagcaggacaccggcccatcctggaaatctacaacatcacaagctgcatcaaactcctcatccaaacagtcattatctgcagcagggtaggtcagtgaaaagagatttgcacagaggccctcggaagttgggggaatcaacccgtacttcttctgccaccggcggcgatcggtggatcgaatcggttcgaacacaaaagagaaaatgtagaggacgttcttgcgcatccgtgagtggtttttttttttttttttttttttttttttaggaatgcaacattgtctaacgtaaatcatctcaagcatgatatttttattataattggttctaagcaataagcataaatagtcttaataaggttctaagtagtacttggcgacaagccataaatattggttcatgcggtaagcgtgctacccaaaagcccataggcaaaccgactagggtaaatccctagttagaaccatcctggaaatctgcaacatcacaagctgcatcaaactcctcatccaaacagtcattacctgcagcggggtcttcgtctgcaaactcctgaacctggtcgtcaacaaactcaccctcttcttcttcgacgtattcttcctcaagcagagaaacggaggcagcgaggtccagggagcggcggagacggtggttgttggccaacggcggcaaaactccggcgtcgacgtcgccgggtcgactcaaggcgcgaactgtaacggagcttggtgttgcttcggtggtgaggaacggcggccggagcggcgtcggcggttcgggtggccggcggcgaggacggtgacgcccaccacgtgctcgacagattggtccggggatgcacggcgacgatggctaagtcgccggagccggggaagatggccgagctctgggcattctgtgcgtggggtgtgttttcttggacttggaacgcgatgtggggagcgagctgttgcttctggtgctttggcttgggaaatgaggaagagtggagtgcgggagtgagcgggggagagagcgaggggccgggcagctgacggccgggccccacacggcgcgcccagaggcggccacgtcggcgcggccggcgggaggcggcgcccgtgccccgatggttgccgccggcgaccat

SEQ ID NO: 40880 - DNA, 461 bp, Oryza sativa
  Clone ID: PAT_MRT4530_4427C.1
gcacgaggctgacttgttaactccgacacggaaggatgaattcctgaacatgttacttgaggacggatgctacatcctatccaagtttgtagttccaacaatcagcattgcacgaggaagctggcaacgacaacacgtgccaccccagcacctagaacacgacatcatctacctcgttgagaatcagataccgttctttatcctggagaagatcagcgaaataactggtttgatcccgactgaaggcggctctctggtacgccatttttgttcatatatcgagtatgtgctcaagttacgcggttacgcgataggcgatcggtatgtggagatgcagatgccgactcccagtcatcttctgcacttgcttcacatactcttgaacggacctcaggcggtcaagcagacattggcaacagatgggcaggattcgacagcgatccagattacacgtttcctgc

SEQ ID NO: 40881 - DNA, 666 bp, Oryza sativa
  Clone ID: PAT_MRT4530_44280C.1
atgggggacggaaatgaggtcattgacatttcatcagatagtgacgatggtgatgcctatcttccgattttatccttttttcgtagcattacacctactaacaagtttggattaaacacgagcagaacaagacaatatggacctcgtactttctctggattcgacaagtactgctgtaaatttgccgctgtcaagagaacccttatgaccaatgcgaaaatgacctttgcagtccagtttagcgagcggtacataaacaagtacattgggagtccaattgatgatctgatggtgtctatggctggaacaacacagtcatatcaaatgaggctgaagaggtccaaggacagtagggcaatgctgaccactggatggaaccaactgattgatgcaaaagcattcgatgagggtgatgtttgtcttttccatttcaaggaggttgacgacgttcttgttctgaaggttcatgttctcaagtagtgtggtggatgaaaatcaccattttgtctggcaatatgtaatgccatccaaattcgtatgatgtaaagctagttaagaccttattatgtggttgacctttccagtacaatcttattatgtgctagttaagacttgattatgtgggtcaactatctgttaatggatgcttgtcaagatggaggaact

SEQ ID NO: 40882 - DNA, 951 bp, Oryza sativa
  Clone ID: PAT_MRT4530_44281C.1
atggggagctgcgtgagcaagaaggccgcctccgcacgcgccggcgccgtggccgataaggaggcggcggcgccgctcccgcctgagaaggaggtcgtcgctctgccgccgcccgtggtggtggaggaggaggaggtgaaagaggtgctgtccgagacggccgtgcccgtgtcgcggcccaggccgccgccggagccggagaaggaggtggtgaagcggaaggaggaggaggaggaggaagtttcggagagcgcgtcggtggcgtcggccacggcggagaaggccaaggcgaagggagggggtgagggtgagcaggaggtggagaagaaggcgattggcgggatggagaaggggagggcgaggaggaggacgccggagcagaggaggcccaaggaggctgcaggcaacgggagggcgaggtcgccgtcgcccgcgtcggcgcagaggaggttctctccgtccgcggcgaggagggccgccgagagcgccgtcaggcgaaccaactccgccagggaggccgacatgatgctgccgcattcttcccggacgccggcagccgccaagcggtccctcaacggcaatggcggcgcctacggaggaggcgcagccaaacgggaccccggcgagcgatccgggcggcggccggactccccaacatccaagcacatcccgcccgcctcgccggcagcgaacggcgccatctcccggcagcagagcctcaacggcggcgccacgcgcaagaccgcgaaggacgacaccaccctcgagcaaaccaagccgcaatgccacggcggcggcggcggtggccggtcaccggaagagggaagagacggctccgacgagtcggcattggaggaggaagggcacgagcaagagaagcagacggcggagggcggcgcgctgggaccgatcaacccctcggtggccatggagtgcttcatcttcctgtag

SEQ ID NO: 40883 - DNA, 258 bp, Oryza sativa
  Clone ID: PAT_MRT4530_44282C.1
atggaggacttggcgttcttggcggccatgatgttctggcacagcctagagcttggcgtccacggaggcgtgaagcaacccacgggatgcggcgttgtcgggcaagttgagccacgccgtgttgccgcggaaccgcccgtggaaccacaggcacggcacggcctgccgaccgtaccgtgggcagcccgtgggcaggcacggcacgacacgaactgccgaccgtgccgtgccggcctgatcgccttgggccgtgtctag

SEQ ID NO: 40884 - DNA, 486 bp, Oryza sativa
  Clone ID: PAT_MRT4530_44283C.1
ggctcggagggtgcaggagacggtgtgcaggcgcgccctgtgtatgtagcggctgtcgatcttgcatgttctgaagagttcctggagcttattaagagtgcacttctggcagctctagaagctctgattccaggctccctgtttgggcttatgacgttcagtcacaagattggactgtatgatgtacaaggtccaattccagttgtaaaaaatgttttcatccctccagacacagaagaagatgggctgcctgttgcccttgaagatgccatgcccctactttcttttttggcccctatcgacacatgcaaagatcgaattgctgctgcccttgatacattgcgacctacatcttcatgggagcgaggtgctgcttctgggcaggaacctgatactgttttgcttggtggccgaggttttggaacagccatgtctgctctaactgactacctaagttcagagtatggaactacttttgctttggct

SEQ ID NO: 40885 - DNA, 468 bp, Oryza sativa
  Clone ID: PAT_MRT4530_44284C.1
atggaggtgcgggatgtgtcaggtggcctcgcgtttcggttcgtggcggtggcaggggacggggggagggcgctgctcaacgccgtcgaggtggttctcgtcactatgaggagcggcgaggcaatccttgacggcagcgacgaaaccaacctctctgagatagctccaactgggaagaactccagttctagtgtgggggaaaagggagcaagactgagtactacccactgtactcagcaagtcataccggaagaggaggtttcacctccacccctcaaaaggcagtggctggcggtcggtgaggcggcggcgaccggcgtgaaggcgacggcgcacggccggagtggcggcgcggccaaaggcggcggcgcacgcgggaagggggagaaaaggaggcgaagggagtcctcaccggagggggcggcggtgaccgacgcggaaaacgagggtggcggcaacaaccggtga

SEQ ID NO: 40886 - DNA, 2757 bp, Oryza sativa
  Clone ID: PAT_MRT4530_44285C.1
atggcgctcctcctcctccgccgccgcatccaccgcggccacaaaaccctcctcccgcgcgccttctcctcttcctccggcgagggtatgttcccgcctccgacgtccgaccccgcatccgccgatcagcgcaccaccaagctctcctcccacttcgccgaaatccgcggccacctcaacgccacccctccctcctccccgccgcgccgcatccccgaatcaccgccgcccgacgatgtccgccgcagcctccacctcttccgcaacccccatccctcatccggcgcgacctccgccgccgccgcgaaccccagcccctccttcgccgacgtcttccgcgccaggcccgcccctccgaccagccgcgccaccggagcggacgcctttcccttcagcgcgctccgcgagagcttgaacaagaacctgggaacgagccccacggcgtcggcggtgcccctccccggcgccaccgccagttcgccggactggagctccatcctctcctcgcggcagagacacgacgggaagccgctgccggagtcggtgttcgggagggaaacgaggggggaggcgaggagaggccgtgacggcaaagtggaggagcagcagttcatccggttgtacagcgacaatgagctcggcaagaagctcagtgaactgcggccaccggtgggtaaggatgggaaggagtggttctccgtggaggagctgagccggcgactcaagaagctgcgagagatggacagggaggaaagggctctgcagtccgggctgggcaccgacgtgctgcgggatgcgatcgtgacgctgcagaccaaagatctgaagacgaacaacttcgccattggtgaatgcctgatgaaactgatggataacctttttgttactgatgatgctgtggttacatttggtttgctagtggctgcagcacagagtatgtcggctttgatggcctttggctctcaggccacaccggcgtacttgctggggaaaccgcaacaggagttggtggagaggtacttccatcccgatcatatgtcatcagcggagaagatgaagcaggagctccagagtgtaagggatgagttcaaaatgtctgagaatgactgtggttctgcacgggttcaaggcaaggtttgggtgaaagaattgggtgaacaatctagttacttgcaacttaaacccaacatcctcgtgaagaagtgcctgatcatcctcgccctcgccgccgccgcggccatcgccggcttcttgtccgtcgccggcgcgggtcgcggccgttcttcctcctcttctccggcgcgtcggctgtcgaatggtctcgccgcggagagggcccggatggcgatggcgagggcggcgtcgccgaccgtggagcgggagctcgacgcggcgcgagcagcgatacgccgggcggcgcggcggcgtcgacatggtgatctcgccggcggcgagggacgaagcagcagcaacgtcagctcggcgaagtggctgagcttcttcggcgacgcggaccacgctcgcctggagcgcgtctaccgcaacccggcggcgttctacaggagctacgtggagatggagaggcggttcaaggtgtacgtgtacgaggaaggcgagccgccgatcgcgcacgagggcccgtgcaagaacatctacgccgtcgagggccgcttcatcgaggagctcgagctcatggcgccgccgctcggcggcgtacggacgtgggacccggcgcgcgcgcacgccttattcctgccgctgagcgtgtcgcagatggtgcagctcgcgtaccggccgctgtcgtacgacctctcgccgctccgcgccatcgtcgccgactacgtcgccgtcgtcgcctcccgccaccgcttctggaaccgatccgccggcgccgaccacttcatgctctcctgccacgactgggcaaagaaaaatattttcccaacaccaaatgatttccatacaaatttcgaaacgagtgcaaataataaattcagtacatactccctccgttcaacgagactcaatttctggggtccgcacgcgtcgagggggcacccggagctgtacgcgaacgccatccgcgcgctgtgcaacgccaacacgtcggagggattccggccggacaaggacgtcagcatcccggagatcaacctctacgacggcgacatgccgccggagctcctgtccccggcgccgccgccgccacggccgttcctggcattcttcgccggcggccggcacggccacgtccgcgacctcctcctccgccactggaaaggccgcgacccggccgtcttccccgtctacgagtacgacctcccctccatccccgtctccgtctccggcgacggcgacaccgacgccggcggcgagggcggcaacccgtactactggtacatgcggcggagcaggttctgcctgtgcccgagcgggcacgaggtggcgagcccgcgggtggtggaggcgatccacgccgggtgcgtgccggtggtagtcgccgacgggtacgcgccgccgttcgccgacgtgctgcggtgggaggcgttctcggtggcggtggcggtcgccgatgtgccgaggctgagggagctgctggagcggatcccggcaccggaggtggagcgcctccgcgacggcgtgcggctggtgaagcgccatttcatgctgcaccagccgccggagaggctcgacatgttccacatgatcctgcactctgtctggctcaggaggctcaaccttaggctgaacagtcac

SEQ ID NO: 40887 - DNA, 526 bp, Oryza sativa
  Clone ID: PAT_MRT4530_44286C.1
atgaactcctaatgcactgtcactagttccggacaaaaaaaaaaaaaaaaaaaaaaaaaaaaaaaaaaaaaaaaaaaaaaaaaaaaaaaaaaaaaaaaaaaaaaaaaaaaaaaaaaaaaaaaaaaaaaaaaaaaaaaaaaaaaaaaaaaaaaaaaaaaaaaaaagggggggcctttttaaagtacccaggtttggggcccggtccttgcaagtttaatttttttttttggggccccttaattttttttcctgggccgggttttccccccttggggcttggaaaaaccttgggtttccccattttattccctttgttgcaaatccccttttccctggggggggttttaggaaaaagcccggaccgggcggcttttccaaacgtttgggcagcttgatgggcaattggccccccccttttacgggccctttaaccccggtgttggggtgttttccccccagggtgccctttttttttccgggggccttgggggccgtttttttggtttttttcctttttttttgggcc

SEQ ID NO: 40888 - DNA, 587 bp, Oryza sativa
  unsure (1)..(587): unsure at all n locations
  Clone ID: PAT_MRT4530_44287C.1
tcggtccaggctgnaaaatactgcggccgcgatgaagcccgcggcggtagtagcccgcggcacgaaaacgccgacaaggcccccgcgcgctgcaagtcccaggcggctaagcgcctgcccgccgtcaggtctagattggcagggttgatggtaataaggcgggcggatgatgggaagaagacggcgataccttttgatctactcttcaaggtgctcaatcaggttcaccccgacatcgtgatcccctccacggccatgtgcatcgtgaactccttcatgatcgacttctttgatatgctcgccggggagtccgacatgctcgcccgctacatcgagaatcccgccatcaccttccgggagattcatacctccgtccgtctcgtccttcccggtgagctcgccgatcacgccgtctccgagggcacgaatgccgtgaccacgtttacttccgcttacgctgactgccttgctctaactggttaggaggctttggagcacgaggatgctctgtttatgtggcatgttaactgcgaaatgatgattgcaaatgaagaattgtgcggcgtcttcttttgcgataactcact

SEQ ID NO: 40889 - DNA, 4640 bp, Oryza sativa
  Clone ID: PAT_MRT4530_44288C.1
atgccaaatggattaatccgaaaactccgtgaagagttgcttgacaaattaatagcacacgcgacttttccccatccacctccccaaattcccgttggagccgccgccgccgccgccaccgacgccatcgcttggatctgtgcccccgtagtcgccgccgcttggatttgtgcccccgcctccccagttcccgacggagtctcaccgtcttgcctcagagctgtgcccccgcctccaaatcgtcgacaaactcgtccgtcagtcgttgcgccgtctcccaccatagatcgccatataccccttctaatcggttgtttcatggagaaagatttgatatttatgacgcacggaaggggcgtggttaaggctgacgaagaagttcgaggctcgcgatcagctcgaaccgaactcaaaattagaggtgtcggcttaatgctggtagattgtggatatcctcccatacacgtaggcgtcgatggcttcatgtgcgtacgtgccgtcctgcataggatgggtagcaacggaggaaggctggctttgttgacttgtagcctcactaaggccaactgcctattggcaatgaagttgtttttgtttaaggagaaacaaacttttgagctaggcaacatcgaagaagcagcagctagctccggggagaggtcgacggcgcgccgggtagatcgcgccccgccccgcctgcgtcgcggctgtcggagcaaacgcaaaccccccagctgtgcccctctctcgggcctcgagctcctcgcctccatgggaaccaaagcccttatatttcatgtcgcggaagaaaaaaaaatcccgtcttttgcggggatcctcgcggctacgttttgggggaatttatttcttgctataattttgcccgctcgaatttctggtgctcttatattccatgagctgattgaagtggatatatattgtgcgtgcctgtgtgttgattctctcctcgtcgtggtgatcgatatggagattgttgcagtagatcaggagggagctcgtgttgttgggacgaactgtatgcttgctcgtggtggaactggtgctgtagcgccagtgttggagctgacagcgacgcctcgtcaggatgcagccgctgaagctggtgtagacgaaccggcacaacaccaatgcgagcatttctccataagagggtatgttgctcttcttcagaagaaggatccaaaattctgctctctatctcggattttccatgaccagaaaaaatgtgatgaacacaaagctagttcaagcccattttctgtagcaaagtttcgacgatgggattgctcgaagtgcttggataagttgaaaacttcagataatggaacagcaccaagaactcttcccgcaaagcagaatggcacaagtgatggttgctccatcacatttgttcggagcacttttgtgcctgctagtgttggttcccaaaaagtgtctcctagcacacaatcatctcaagggaagaatgctgatagatcaactcttccaaagagtgtgcaagaaggcaatgactccaaatgcaatgcgccttctggcaagaatggagctgctgaggccaatactgattcaccaatgaaagatttgcaagggccagcccaaaattatgatgtggcagcaaatgtctctgaggacaacacttctgttgatgttggggctttacctgaagttccccagattacatggcacatagaagtaaatggtgcagatcaacctccatccactccaaaactttctgaagtggtcctcaaaagaaatgaagatgaaaatggaaaaactgaagagactcttgttgctgagcagtgcaatttgaccaaagatcctaacccaatgtctggaaaggaacgtgatcaggttgctgagcagtgcaatttgaccaaagatccgaaaccagtgtctgggcagaaatgtgagcagatctgcaatgagccatgtgaagaagttgttctcaaaagaagctccaaatctaagaggaagacggataagaagttgatgaagaagcagcagcacagcaagaaacgcactgcccaggctgatgtttcagatgcaaagctttgtcggagaaagccaaaaaaggtgcggcttctatcagaaattataaatgctaaccaggttgaggattctagaagtgacgaagttcatcgtgaaaatgccgctgatccctgtgaggatgatagaagtaccatcccggtcccgatggaagtaagcatggatattcctgttagcaaccatacagtgggagaagatgggttaaaatcaagtaagaacaagacaaaacgcaaatactctgatgttgtagatgatggatcatcacttatgaactggctgaatggaaaaaagaaaagaactggaagtgtgcatcacacagttgctcatccagctgggaatttgagcaacaaaaaagtgacacccactgcgagtactcagcatgatgatgagaatgatactgaaaatggtcttgacacaaatatgcataagacagatgtctgtcagcatgtatcagaaatctccacacagaggtgctcatcaaaggggaaaacagcgggtttgagtaaggggaaaacacattcagctgctagtaccaaatatggtggtgaaagcaccagaaatggtcagaacatacatgtactcagcgcagaagatcaatgccagatggaaaccgaaaactctgttctgagtcactcggcaaaggtttctccagctgagcatgatatccaaattatgtctgaccttcatgagcagagtctacccaagaagaaaaagaagcaaaaacttgaagtgactcgtgaaaaacagaccatgatagatgacatccccatggatattgttgaactgctagctaaaaaccagcatgagaggcagcttatgactgagactgattgttctgacatcaaccgtattcaatccaagacaactgctgatgatgattgtgtaatagtagctgccaaggatggttcagattatgcatcaagtgtgtttgacactaattcccaacagaagtccttggcatcccaaagtacacagaaggagttacagggtcatttggcattgaccacacaagagtctccacatcctcagaactttcagtctactcaggaacagcagacacatttgcggatggaagaaatggtcactattgctgcaagctcaccactattttcacatcatgatgatcagtatattgctgaagcaccaactgaacattggggccgtaaggacgcaaagaagctaacgtgggagcaatttaaggccactacaagaaattctccagcagcaacatgtggtgctcaatttagacctggtatccaagcagttgacttgacttctactcatgtcatgggatcttccagcaattatgcatctcgccaaccagtaattgcgccactggaccgctatgctgaaagagcggttaaccaggtccatgcaagaaattttccaagcacaatagcaaccatggaagcgagtaagttatgtgatcggagaaatgctggacaagtagtcttgtatcctaaagaatccatgcctgcgacgcatcttctgagaatgatggatccatcaacattagcaagcttccccaactatggaacttctagcaggaaccagatggagtctcaacttcataattctcagtatgcacataatcagtacaaaggatcaaccagcacatcatatggcagtaacctgaatggaaagattccattgacattcgaagacttatcacggcatcagctgcatgatctgcacagacctttacgcccacatcctagagttggtgtgcttggctccttgctgcagaaggaaattgcaaactggtcggagaactgtggcacacaatctggttataagttaggagtgtcaacaggaataacatcgcatcagatgaacagaaaggaacattttgaagccctgaattctggaatgttttcagcaaaatggaatgcattgcagttgggttctgttagctccagtgcagattttttatcagcgaggaacagcatagctcaatcttggaccagaggcaagggtaaaatggttcatcccttggatcggtttgtgagacaggatatctgtataactaacaagaacccagctgattttactacaatcagtaacgataacgagtatatggattaccgctgaagcagaaagtggtgtgcataattcctgaacatttacaatcatacatttcatctttatggcgccaaatagtcatactgtaagaggagggctttgctggatctgctgtaaggcttcttgtaagttgtggatgccccattttctggatgggaacctgccagacagtgaacaagggctttgcaaggtgcagcatccggtttttgttttgccagtccaagaaacgtcctcctgttactttgtagttgtactcatactagtgcgcttgtttgtacaaggagaaatgtgtaaccttgttgaaaaaaatgtctcccccattttgtaattaccataaggaggtttatagtgttgtgagctgtgtgtgactgacggcgagaaatggttttgtcggtgttaaggttgaaacgactagctctcgttatcaatgtgttgtaaacttctagattgatgtgttaccttactcttgaagtcaacaccggagaatttac

SEQ ID NO: 40890 - DNA, 294 bp, Oryza sativa
  Clone ID: PAT_MRT4530_44289C.1
atgcgttcttttccaactgacacacaacccctacgcaaggattgaaccttctggaaccgacgtttccttgaaccgatcgacggcaccgccgacggcctgatcggaatcgcaagggtttccggattgccgctcccatgatttatatggtttacgaatgcgccgtgaacgaccaggagagcttggttaacccggacatagcatctgctgctctgccatacgcattagccggggagattgaggtaacatgacgtgtcgcgtacggccctgcagatgtggcgatagaagaaggggccg

SEQ ID NO: 40891 - DNA, 543 bp, Oryza sativa
  Clone ID: PAT_MRT4530_4428C.1
atggctggtaatctccgtaaaagggaggaaatgtatagacaacctcagaagcggagacacacaggaggtggtggaggcagtcagcgccgagggctccttcgagattgtgtatcgggagctcttcgtgaccatgccgggcagcagcgcagcagctcctcccagtcaaagaacaaggcggcgttcgcggcgagagcattgtgcgcgccacacgaggatgtattggctaggcactttggaggcggcgtggtgagcgattttgtgaagacggcgcaggagcacatcgacagcttagatgagcacgacaacttcaagacgcttcagccgctttgcgccaccgctgtggtcgtcgccgctgccttccgtcaccaccgccgggttcgccaggtggaggagcatcccgtccgccccttcgctgctgctgcaatccgccggagaatcgccgtcgacatagagccgagccgtgccgtcgtcaagttcgtcgtcggtcttcgttcgccgtcattcgtcgtagttcttgtcttcgtttccgacgttctgaagtag

SEQ ID NO: 40892 - DNA, 165 bp, Oryza sativa
  Clone ID: PAT_MRT4530_44290C.1
atggacccgacccaagtcgagccatgccgtgcttgggccgagccaaaatgccgtgccgtgggccggtccttcgggcctcgggtagagcagagggaggagaggagcggggcgccggtgctccggtggctgggtggttgcgacgccggcggccaaacgtgttcctga

SEQ ID NO: 40893 - DNA, 334 bp, Oryza sativa
  Clone ID: PAT_MRT4530_44291C.1
cctgtcatcagatcacacatcatactatcgcaacaaacaaacactacagtcgtcaccgcggtaggaacactgtggatctacatgagactctacataagcttgcaacatgtctccagcgtctgactcctccgctaaacatactactaaacagtgaaactgcacataagctcttgtttcaggctacggaatggcagagccggctgggttgccatgggctctaaactagtcagcaccactgatgctgctaactcgaacggaaaagaactgcaacaccgaaaaactcaacgaagctgcaggtgagacgccctacaacaaccaatgctacttcttggga

SEQ ID NO: 40894 - DNA, 469 bp, Oryza sativa
  Clone ID: PAT_MRT4530_44292C.1
gaatcctcagaaaaaagactgctcttctacaagaaatcctgtttttgaagaatgtagcacccacaaagctacaaactctgcagtacaacagttatcccttaaatcaatccagaatgcaacgtgcaacttcaaaaccttaataggggagggtgggtttggatcagtttatcgaggaacattagcacatggtgaagaagttgcagtaaaggttcgttcaacctcgtcgacgcagggaacacgtgaattcaacaatgagttgaggctgccttctgctgtgcggcatgataatttggtcccactaattggatattgctgtgaaaaggatcaagaaattttggtctatccattcatgtccaatggttctctacaggatcgcctctacggtgaggcgtcaaaaaggaaagttcttgattggcctaccagactatctgtttgcattggtgctgctagaggactagcacatctgcac

SEQ ID NO: 40895 - DNA, 244 bp, Oryza sativa
  unsure (1)..(244): unsure at all n locations
  Clone ID: PAT_MRT4530_44293C.1
gtcgcggggcccgcaggcggtgcatcccccagcacaagcaggcctgatgagagtgaacatcctgggaacccgcaccttcacntgtcctggctgcgactgtgcagtggaccactcgtgcacaggcggccgtgaacaactttatgacggccacactcgggcagatccgccgcgtgggggctacgggctatgcgtgcctgtccgctccggcctttcggccatccgggtgctaccgtgcttcaacctc

SEQ ID NO: 40896 - DNA, 2293 bp, Oryza sativa
  Clone ID: PAT_MRT4530_44294C.1
tggatcccccgggctgcacgctcctccaagacatggccgcccgcttcggccccctcctcctcgtactccccctctcctccgcgctgctcgtcctctccgccgccacggcgccccgtggccgtcccagccaagtggatgtggggaggcagctgagggaggagctgtgggagagaaaccaagggcacgagatgctcaggtcgtggcgcgacggtgacccgtgctcgccgtctccatgggaagggttctcttgccgatggaaggacggcaacctcttcgttgtcaagctgaacttttcttcaaagaaactgcaggggccgattcccgccgcgattggtaacttaacagaactagatgagattgatctgcaggacaacaacttcactggttctattccagaatctttctttgatctcacacacttgctgaagctgtcagtaaagtgcaaccccttcttgaacaatcagctacctcatggcctatctatcagcgtggaatttagctatggaggctgcgcttatcatagtccacctggagcttccaatcagagaatagctgttattggtggtgttgccggaggatctttggcatgcacttttgcacttggatttttcttcgtttgtttcaacaaacgtgaaaagaatcctcagaaaaaagactgctcttctacaagaaatcctgtttttgaagaatgtagcacccacaaagctacaaactctgcagtacaacagttatcccttaaatcaatccagaatgcaacgtgcaacttcaaaaccttaataggggagggtgggtttggatcagtttatcgaggaacattagcacatggtgaagaagttgcagtaaaggttcgttcaacctcgtcgacgcagggaacacgtgaattcaacaatgaggtacagatgaaacctgcccctgctagtataaaggaatcttgttgtgggcttggggtgaatcaaattccaaaaaagttgttcattgtgttgcattctggtaaagaagctaaatatggattctttggccgtaaattcaagaacaaggaaatgttgaggctgctttctgctgtgcggcatgataatttggtcccactaattggatattgctgtgaaaaggatcaagaaattttggtctatccattcatgtccaatggttctctacaggatcgcctctacggtgaggcgtcaaaaaggaaagttcttgattggcctaccagactatctgtttgcattggtgctgctagaggactagcacatctgcacggttttgctggccgctgtatcatacacagagacgttaagtccagtaacatacttctggaccacagcatgtgtggcaaggttgcggactttggtttttctaagtatgcacctcaagaaggtgacagtaatgcatcaatggaagtcaggggaactgctggatatttagaccctgaatactattcgactcagtcattatcaaccaaaagtgatgtgttcagttttggagtggttctcttagaaattgtaaccggaagagaacctcttgatgttcagaggcctagggatgaatggagcttagttgaatgggctaaaccatacattagagaatacagaattgaagaaatcgttgaccctggcataaaagggcaatattgttcagaggccatgtggagggttcttgaggtcgcatcagcatgcactgaacctttctcgaccttccggccaagcatggaagatgttgtcagagagctagaggacgctctgataatcgagaacaacgcttcagagtacatgaggtccatcgaaagcacggggacacttggctccaaccgctacctgtccattgataggaagatgtttgcttcgggttcagctcgattcgcatcatttgacgctacgaaagggcatttgcaaacgatgccttcgcttccggggtagtttggctgtgcaatggctattgtttttatgacctcagggggatgtcatgcttgtgttgaaggcatcaagcaacgattggcaagataaggatatggagatgctccgtaaactatacccatctgtacagatatcagaattcagagatcatgcagtgatgatatgggaaaagcttcacaaacagagcagttttgcctttgcagtttgtactgattcaatgcttctgaaagtgccctcatatactactctttggtttcggtcttagatcacttcattgtttcgattcctcctccttcagaaagtatagtacaaaggatgtaattcatttaatgctactatattgccttttgcaatctttcagacaatttgagtcgcagttatcc

SEQ ID NO: 40897 - DNA, 371 bp, Oryza sativa
  Clone ID: PAT_MRT4530_44295C.1
ttttgtttttttttttttttttttttttttttttttttttttttttttttttttttttttttttttttttttttttttttttaggctcaaggatttgggggcccaaccaaaagcccccttgggtcaaaaaatgggtgccccaatttttttttttagcaacatttgggcaagacttttggggatagcaaaccaaccccctgggggggggggactttggggggaacgggaaattggggcggggcctttggcaaagggaaaattttccaaaacccggccccaaatggaacagggtcaacttggggaaatatttaagggggggtcccacaaaaaaaaccttaatgggaaaaggggggtttttaccgggctaaaaa

SEQ ID NO: 40898 - DNA, 379 bp, Oryza sativa
  Clone ID: PAT_MRT4530_44296C.1
gggcaatggtagcagcgaacagtacttggaccatgaaatggtggaacaggcatcttgttgtacagctgaaacctgccatgcgaatgaagaaccaacaatgcatccacaagtttatccaaacaatacgttacatacattttactcaagtttggccaataatttggaatattccaaatctggtcagtcagacatgacaaattcgagtataaatgttgcccatgaggaaaaacaaaaattttctccctccccattgagcttggtggatctatcaggtgatctagatttgcaattgagatgcctccgccaagttcagtatcacctagaatacatgtttgatggttttttgcagtctgttcaagaagcatcttctgactgtaag

SEQ ID NO: 40899 - DNA, 292 bp, Oryza sativa
  Clone ID: PAT_MRT4530_44297C.1
tttgctttttttgaatggcattggccccacctaaacacaccctggaccgctgaaatgagctgcatagtccatctacaccaaggaccatgtatggagccagaggtggtctaaccttacaggatcctgacatagctcaattcaagtgatgcattcctctctggattgctcctgaagtacagacacagccatacatattgggatatatacctcaaagcttacatacctaggtacttgacactcactagacctggatttgaaagacaaaacagttcttaactgaacccaggactga

SEQ ID NO: 40900 - DNA, 645 bp, Oryza sativa
  Clone ID: PAT_MRT4530_44298C.1
acgaggcaggaagccgtccacttcccacttcggcctccgcgccggccactgacgtcgacggcgagccactcgtctcctctcctcttctccctgatgctccgagtcgtcgcctctgcacggagacgggagagacccgggctgcgggctggtggcctcggttataaacttataatggtctgacattcctgttagctttgcagcccggcgaaccatcgatataaggaaagattttgtttgatcgaggtggggatggatcagctttgcacgagtggaggtagcgacagcgacaaatctttggcggccggcgatgagccggcggtgagagtccgaggtgaagtggaggcggaggcggcggcggcggtctgcggcagaggcgcaaggcggtggctgcttcgactgcaacatctgcctggatttcagccacggagccaggtggtcaccactctgcggccacctctactgctggccactgcatctacgagtggctgcaccccggcggcgacgacgacggaagcaacggcgacgcgagctcgacgaggcggcgtcccctgccccgtgtgccaagccgcggtctcgccggacacgctcgtgccgctctacgccgcgccgctttagaggatccaagcttacgtacgcgtgcatgca

SEQ ID NO: 40901 - DNA, 310 bp, Oryza sativa
  Clone ID: PAT_MRT4530_44299C.1
atggacatctctagggcaaatgaaggctacacgggctacggcgtggtagtcgagatgtcatggcacagggccagtgttctgctgctaggggctcaatcctgcctacctgtctcgggggttccggccgtagtcggggttgggtcggtgcttttgtcatggctaggataggtaaagggttggtggtttaatttttaaaacttgcttaacaactaaaatgtggaatggttggcatgggttggcttgggacgagttgggacctgggtctggttgccagttcggtctgaatcatcgtaggccttgggttaaggca

SEQ ID NO: 40902 - DNA, 1493 bp, Oryza sativa
  Clone ID: PAT_MRT4530_4429C.1
gaacacctattcaccccccctctaggcgacatcaagttcctttcaggaagaaagttgatataggtccaggtgataggccaagaccgacatttattagtaaaaatttatctccggaattcagaaccaagttgatagagctcttaaaagaatacagagattgctttgcttgggaatattacaagatgccaggactcagccaattgattgttgaacatcggctccctatcaagccgggggttagaccatatcagcaaccaccaaggagatgcaaagccgatatgcttgaagctgtcaaggctgaggttaaacgtttatatgatgttggttttattcgtccatgccgatatgcagagtgggtttccaatatagttccagttattaagaaaaatggcaaagtcaggatttttatggcggaggaggacattcataagacaacttttagatatcctagtgcaatcggcttgtttgagtgggttgtgatgacttttggcttgaaaagtgctggagctacatatcaacgggctatgaactacatataccataatctaatcggctggttggttgaagtttatattgatgatgtggttgttaagtcaaaggaaatagaggaccacatagccgatttgaggaaggtttttgagagaactaggaagtatggcctgaagatgaatccgacaaagtgtggttttggtgtatcggctggagaatatgagtgcaaaaattatacattagtggtttacaatgagaagtgccgagagttgatgaaagaatttcggctggtgactttgaagcatgtatctcgagaacataatgttcaagctaatgatttggcccaaggggtatcgggatataagccgatgatgaaggatgtcaaagtagaagtcgccacaataacagccgatgattggagaggttggggaattgatatgatcggtatgattaatccaccatcaagcaaaggacacaagtttatattggtggcaaccgattactttaccaagtgggtagaggcgattcctttgaagaaagttgattcgggagatgctatacaatttgtccaggagcatattatttatcgatttggtattcctcaaaccatttcaactgatcaaggctcgatctttgtgtccgatgaatttgttcagtttgccgatagcatgtgtatcaaattgttgaattcttcgccgtattatgcacaagccaatgggcaggccgaggcatctaataagagtttgatcaaattgattaagagaaaaatttccgattatcctcggcagtggcatactagattggccgaagcattgtggtcttatcggatggcttgtcatgattcgatccaagttcctccttataagcttgtttatgggcatgaggctgttttaccatgggaagttagaatcagctcaagaaggacggagttgcaaaatgagttgacagccgatgagtattataatctcatggccgatgaaaggacttggttcaatcaagattga

SEQ ID NO: 40903 - DNA, 462 bp, Oryza sativa
  Clone ID: PAT_MRT4530_442C.1
atgcgtcgatccytctctcccacctcagttctcytcctcgacacggcgcaagactacaacaaggcgagcctcgacctcgagcggcaaactgaggcggcgctcaaggcaatgctggagctggaccagatccttagggcaaatgagataaactttgctattcttgcagcactacctgcatttggtgtttcacttctgctgctctttgcagttcgagcatgggctacacatgaggaagaggcatgctgtaagttcgggttaacactgtacacccttgatagactatacaaagctgttgaatcgcaggcgagagaaacaggagagtggtcaagcttgagagaagacatgtttgatctggcaaagcctggtgtgggcatggaagacaagctggttctgctgtcccggctcaaagggatgtacgactgcttacttccatcaccgtcaggtgtcttgccccgtctgtag

SEQ ID NO: 40904 - DNA, 879 bp, Oryza sativa
  Clone ID: PAT_MRT4530_44300C.1
atgccacctcctctctatgtcttgctactactcagtgggcttctcctctcctccctgcacactcctccatgttccgccgccattgcagatggcgacactctcatggtaggccaagcgctttctgtcggcgagaagctcgtctcgaggaacggcaagttcgcgctcggcttcttccagccacaaccaactgcaggcatcagtaagtccattaacaccaccaccaacacattgcctggctggtatcttggcatatggttcaacaagatccaggtttttactacagcttgggttgctaatagggagaatcccatcactggccctgagctgaagcaagcacagctcaaaatctcaagagatggcaatcttgccatcgtcttgaacaacaacaacaccagttcagagtccataatctggtccagcactcacaccattgtcaataggacaacaggatcatccagcacaaacaccagtgctctcctcatgaacaatggaaacctactcctcatggctagtagcaatgttgtgttgtggcagagcttcgactaccctgcagatgttgggcttccgggtgctaagttaggtaggaacaagatcaccggtttgaaccgtcggttcgttgccaagaagagcctcattgatatgggcctcggctcttacatccttgagatggacacaaacacggcaatcaaggtgttcatcgggtgctccgccttcgaccatgtcttcctcaaggatgaggatgacaactgcagcatccgcattgattacgagctcgaagtgcgccatgtctatcgcaaagacaacaccaatgtcgacaacctcacccgacgagcttccaggagaaagccggtggaatccagcatgttcctagagtattaa

SEQ ID NO: 40905 - DNA, 428 bp, Oryza sativa
  Clone ID: PAT_MRT4530_44301C.1
cttatacaacacgtcagtccagtattgatttctcttttttgagagttgaggacttgagtgacaattattaccctgtttggagttgagatacaaatattaaactaagttgaggagtgagaaataaatatctgtgggcccttactgccgcggccacaaacaatttctttaatacgagtaaagttacaccatgccagttatttagtcacgaactaaagccttctgtccactggaatcttgtttaacttgtatttagtttatatattttactgtggactagtggtactggatgccatctgacctattatattggtattatgttggtactatgtcccatgtagattttgttcctgatgtgggttaatggcgtaagctaacttcaattctgtataatgcataaataatctagacaatttgtctgcaaatcttta

SEQ ID NO: 40906 - DNA, 642 bp, Oryza sativa
  Clone ID: PAT_MRT4530_44302C.1
atgacggaggggaagaagacgaagacgaagccgcacaggagggcgtgctgcctgctgctcgccgccgtcgccgtcctcggcgcgctggtgctggcgctctacctcgtctaccgcccccgtccgccgcgcgtggtggccacgccggtggacgtgacgatcgagctcttcagcctcgtgccgccgaagctgaaggccgccgtcggcgtgcacgtggtggtgaccaacccgagcaactcggcgtaccggtacggcgagtcgctggcgtcggtgacgtaccacggcgagcgcgtgggcgcgtcggtggtgccccgcggcgaggtggaggcgaggtcgacgcggctgatcgagccggcgacggcggtggacgtggtgcgcgtcgccgagagcccgcacttcgcgcacgacgcggccgccggcgtgctgccgttcgtggcggtgaccaccgtggaggggaaggcgctggtgctccggtcgttcgaggtgagcgtgtccgtggaggtggtgtgcttcgtgcagatgtacgtgttccacggcgagagcacctcgcgctgcgtctccaccgtccgcacggccacggaaaccgtctcgtcggagccatccggcgcccgtggcgcacgtaactctgttcctagctatgactag

SEQ ID NO: 40907 - DNA, 1982 bp, Oryza sativa
  Clone ID: PAT_MRT4530_44303C.1
ttttttttttttttttttttgggaaaattaaaaaaatatataataattaatctcctgtgaatgatcattccttatgtgacacatcagacaaagtatatcgatttaatccgtgtttatagcgaaaaaaataaaaataaaaggaagacaagaaaaaaaattaagaagcgagggaggggaaaggaggaaagaagaaaacaccacaaattaagaagctccaaagtttgaggacgcacgcttcgcgggtgacgtacaggtgtaggggaggtaatgcggcggcggcgcgacggccgccggcgagggcgaggctgaggctaccatggattcgatcacagcttgacgacctccgggatgtcgacggggtagcggtggatgcagtcgtcccacggcccgtcggcgggcgtcttgactgtgcggaggcacttccagacggcgctgttgcacttgaatccgctgccgaagccgatctgccagacgcggtcgccgcggcgcatgcgccccttggcctcgatgtaggcgagctcgtaccagagcgagctgctcgacgtgttgccgaaccggtgcagcgtcatgcgggacgcctccacgtgctgcgcggacaggtccaggttcttctgcagctcgtcgatcacgggcgcgtcccccggcgtggatgcagaagtgctcgaacgccagcttgaagtccgggatgtacggcttccacttcttgttgatgagcttgcggccgacgaggcggaagaagaagagcagctgctccgacatgggcagcaccagcgggcccgatggtggtgatgttcgacttgagcgcgtcgccggcgatggccatcagctccttggacagcgagatccccgagtgcccctgctcgtcctcctcctcgtacacgcaccggtacgcgcggtcgtcggcgcccttgtgcgtgcggaccacgtgcatcagcctgtacttggccctcctcgcctccctcctcctgttcgacagcaggatcgccgccgcgcccatccggaacaggcagttgggcagcatcatgtcccgccgggttccccagtagaagtttggtgtgatgatctccgtcgacaccaccagcgcgttcgagttgggatgcacctggagcatgtcgcgggcgaggtcgagggagatgaggccggcgctgcagcccatgccggacaggttgaagctgcggatgttgctgcggagcttgtacttgttgatgatcatggcggagagcgacggtgtcggggagaagagactgcagttgacgacgaggatgtcgatgtccttgggcttgagtccggtgcggcggacgaggtcgtcgatggcggagaagattacgagctgggcctcggcgcgcgacgcctccatggacgggttaggcgggatgtagtggttggccggcgggaggcaggtctcctccccgagccccgaccgctcgaggatcctggtctggaaccgcacgctcttctcgtcgtcggtgatgaggcgcgtgtgctccatgaacgtggcgaacggcacccggcagctgggcggcggcttgtagcaggagtagtcgacgaggtacaccggccttggccgcgacatgaagtacaccgtgccgacgaacacgacgaggaacaccgagcagaggatgtggacgaggtcgagctgcagcgaccgccacagcgacagcagctcaccgggccccatccgcgccagctccagcgccgtcgccgccatcaccggcaccagcagcagcgtcaggaagtggttcaccagatactggtaccccagcttcacgtacttcagcttcaccgacccggagtaccccgccgcccccggcatgatcgatgctctcactacttccccgcgcgccgccgcgcaccgcaccaacgctcgcacgccgcgtcctacgtacgactttagtttcttctctctttttgagcggtgcagcgtgcacaatttgtaggtgcgatgcggtgcggaggcggatgggtttgcagtggtgtgttgg

SEQ ID NO: 40908 - DNA, 251 bp, Oryza sativa
  Clone ID: PAT_MRT4530_44304C.1
aggccacgacgctcacgcgtacgcctaggcgtacgcgtgcgctagcactagaatattatactatatcatcatcaatgggttgagctagtacaattaagaagtagctaagttgtccaatacgatgggcggcggcaagaataatgtgcaagtttgtgccgtgttcgtcgttgctctgaatatggtcatcttcatgcaaatgggtgcagtgcaagcatgcgagccctacttgcccaccccgacgccggcggtga

SEQ ID NO: 40909 - DNA, 913 bp, Oryza sativa
  Clone ID: PAT_MRT4530_44305C.1
tttttttaaaattttagttttttgttgtaattgcttatttttttaagagcaaaaacaatgagataacatatattgaatatatttgtattacaagttgataacatacgtacatagatgcacgtgcctatataatacaacagtgtccagtacactatataatgggcagcacaacataagaaaatatgatatggtttattcgaaacacacacttggaagggctccaaacataccccttcagttacgtgtgctgcaaaaacgtttactcggaatatcgatcgggcagctcacagcaagcttcagtaatggtaggtgtagaggaaggagcccagtgtactaaccttccagcgtctcctccatgccgccgtactagaggagcatccgcactcccgggaggtgagcagatatcccgttccattttaagctcttcaaattttgcgtacggtaagggagagtagcttagctgcagtaacgtacgtagtagctgatgccatggatgtagctagctagagctagtactggtcgggccagaggaaggcgcccatggcgaaccgccgcttggcgtcgaggtcgccgtcgacggggagcccgtactcccggagcaggcagtccacccgccactccggcatcgcctcgtactccgccttcttgtaccgcgggtagtgcagcggcatccggaacgacgacccgccacacccgccgccgccgccgccgtgctgctgctcaccgccggccgccgccgtcgtcttctcggccttgggctgcagccccaccacgcttggacccaacgatcccatggccaatgtggctttcttgcagctaggactaggagtctaggagactagctaggactatatatgattttcttttttttttttttggggtgtcttgcggaccgcgtgggcggacgcgtggg

SEQ ID NO: 40910 - DNA, 360 bp, Oryza sativa
  Clone ID: PAT_MRT4530_44306C.1
atgtaccggcaggatatatggatgctcctcggcaatgggttggggccagagctcgggaattctgtcaccggggagttcgttgttgctgagcggatgtggagccgcagctgcgacgggaacgggatgaaggggagccgccgctgtgatgggccgccaccgcgccgagaagcggagcagccgccgctgcaatgggcaggggagacaccgctgcgatgggccgccgccgcgacgagaaccggagcagccgccgttgcggcgggcatggggagatgccgctgcaatgggccgccgttgcggacgggaaatggagccgctgccgccgccgggacgggaagcggagccgccgccaccacccactag

SEQ ID NO: 40911 - DNA, 327 bp, Oryza sativa
  Clone ID: PAT_MRT4530_44307C.1
atggcgcagaaatacttctgcgatgacgtcaccaccggcggcggcggctcggcggctcgggctggcatgctcgccggcgaacgacggcgcggcgacgcgaacggagagcaccaggacgtagagcgcgacgcggtgaactcaccggtgaccaaagaagcggcggagaagcaacggacggcgacggcgacgaggaggaagtggcggaaacttcgggttgacgacggcgatgaagctccggcggtctccggcgacggcgaaggggcggacgaggacggcgacgaccttgcgaacccgacggcggtcttcccgagcgacggcgacggctga

SEQ ID NO: 40912 - DNA, 315 bp, Oryza sativa
  Clone ID: PAT_MRT4530_44308C.1
atgttggcgccaacaaagccacaaccagaagacgaccgcatcagcgataactcattcaacctgttcgcgtcaccgacctccgttctccagtacgtggcgacggacgaggttccacaccgaagcggcggcggcggcgagctgtttggatcgaaattggaattgtcgtgggggtatgtggggcccgcgctgcagtggcacgtgtccccctggagctttccagcgagccatggggtccgcgtgtctgggctcgccggtcgccacgtcggcagtgtgtggggcccggtgattacgaagggcccaggcccacagcactag

SEQ ID NO: 40913 - DNA, 171 bp, Oryza sativa
  Clone ID: PAT_MRT4530_44309C.1
atgcccgactggcgcgcgacggtcaggaatgaccggtctgtgaccggcctgtcaccggtcacatccgactggacggacagctgtgaccccacgtcgcatctgcctccggcggagtggagggttgtcccccgtgtcaggcaagggacggcgctgggccccactcaaggataa

SEQ ID NO: 40914 - DNA, 5136 bp, Oryza sativa
  Clone ID: PAT_MRT4530_4430C.1
atggcgaccgatatatcccaatcacttgatttaaatgtcccaggccttgagtttttacatcaacacgattttggcacgcccagtgggacagagttgcaacaacgttctctcaagactgagaaaccaccaccatcaccgtcgtcgactgacaagtcggaggtccctcccaagagtagaattccaaagcatactgggtccgaagttcatgagggaaacattgttcccgtcactgtagacaaactaacaccagagcaaaaggagtttgagctaacgatgcagcaagcgcaacaccagttcttgaactcgttcatggagacccgtaagggaacagttgttcagaagtataaggttcttctaaggatggagaagggcaacaggttccggctggtacaaatgaatcaggcggtaaaggcactgcagagggctcaggagataaagtgcaaccacagtttaatactttccaagatcggattgactaggccatgcccacaacatgctttgatcaatcaatttggagcgttagtcaataccttgtcaaacatggtgaagtcactggttgatggttcaatagctgagcatcaggctacaggaccagtatatttaccagggggtgttttcccaaattatcggcccctgatcacaaataatcagccaactgcttccaatgtaccaccagctcagccgacagcaccaatatcagctcctgccgctgctgcaccatcatcggcgtcaaggcaactgaccaatcctcgcttgttgactagagagcagccacaacatgctggacaaaatgtcaatcggctgactcaggaacagcaagggggatcagctcggcctcagtttgctcctcagttcaatcaattcaagcctataccacaacaagcgcaaggggtgcctcagcagagaccatgggccgatctgattgcagatatgatgagggagcaattcgggcttaagacaaaggacactggaaacttatattggcatttgaaccctgagtgctgggccgatttggagaaacaattccataactatttctatagtggagttcatgagatgaaattgtctgatctgatagcgattagacaaaggcatgatgaacctatgcaggattatattcagagattcagagagatgaggaataggtgctacagtttgagtttgactgactcccagttagccgatttggcttttcagggtctgatagccccaatcaaggagaaattctcatcccagaagtttgatagtttgtcacatcttgcacagaagctaactctacatgaacagaggtttgcagaggccaagaagaatttcaagaagatcaatcatgtgtatccttacatgtatgattctgatgacgaagatgattccgaggtagcagcagtcgagtgggtcagaagcaagaaacttataccatgccaatgggtgaaaagttttgagaaagaagagaagcagattcaacttcatgctggtcatatcataccatcagctgaggaattaggcaagaggaggtattgcaagtggcataactctgggtctcatgctactaatgattgcaaagtcttcagacaacagattcaggtggctattgagggaggaaaaataaagtttgacgactctaagaagctgatgaaggtcgatggcaatccttttcctgtcaatatggtatatacagctggccgaacagccgatggaggaaaagctcgaggttttcaaataaattcggctaagattattaacaaataccagagaaagtatgataagcaacaggaaaggcattatgaagaaggtgatggcggttttgatcgtcatactgtgagtttttcagattttgctggaacgaagaatcagaagagaagggttcaaaggttgaggaacagggagcgctttcaggaggttgagcaagaaatcaaccgtcggctgaagaaggcaaagccgaggcaagagtggcgtattaagaacaaacatgccgcagccgatgaagttaaagccgatgaggaagcttcggctaggttggttttgtcaccagagcaagcagattttgagaagccggaagggacagagaatcggcatcttaaggcattatacattaacggctatgtcaatgggaagccgatgtccaagatgatggttgatggtggggctgctgtgaatttgattccatatgctaaatttaggaagctgggcagaaatgctgaagatctcatcaagacgaacatggttctcaaggactttggtggcaatccatcggaaacaaaaggagttttgaatgtggagctgacagtcggcagcaaaaccatccctacaacattttttgtcatcgatgggaagggttcctacagcttgttgcttggaagggattggattcacgccaattgttgtattccttcaaccatgcatcaatgcttgattcaatggcaaggtgacaagcttgagatcgtgccagccgacaggtcagttaatgtagccagtgccaatttagctctttgggagatggacagtattgattgcttgtctggaaagacagagagcccaaattattattttgagggcgtcgtggagaagtcaaatgtctacaccaaggacacagtagatgatctcgatgacaagcaaggacagggtttcatgtcagccgatgatttggaggaagttgatataggttcaggtgatagaccaaggccgacatttatcagtaagaatttatcttcagaatttagaaccaagttgatagggcttttaaaagaatatagagattgctttgcttgggagtattatgagatgccaggactcagccgatcaattgttgaacatcggctacctatcaaactgagggtttccaatatagttccagttatcaagaaaaacggcaaagtcagggtgtgcattgatttaaacaaggctataccaaaggatgagtacccaatgccggttgccgatcagttggttgatgctgcttcagggcacaagatattaagttttatagatggtaatgcaggttacaatcagatctttatggcggaagaagacattcataagacaccttttacatgtcctggtgcaatcggcttgtttgagtgggttgtgatgacttttggcctgaaaagtgttggagctacatatcaacgggctataaactacatatatcatgatctaatcggctggttggttgaagtctatattgatgatgtggttgttaagtcaaaggaaatagaggaccacataaccgatttgaggaaggtttttgagagaactaggaagtatggcctgaagatgaatccagcaaagtgtgcttttggcgtatcggctgaccaatttttaggatttcttgttgatgaaagggggattgagataactcagaggagtgttaatgcgatcaagaagattcaacctccggaggacaagacagaattgcaggagatgatcggcaagataaattttgttagaagattatatctatcggccggtgagaagtcaatcggctcggtcttgattcaggagctcgaggggaaagaaagagttgtgttctatttgagtcgtcggcttttggatgcagagacaagctcggttgagattgtgccctggactttgtttttcaatgggtcagtatgcactcatggttgtggtatcggcttggttataatttcccctcggggggcaaattttgagtttgcttacactattaaaccctatgcgaccaacaatcaggctgagtacgaagcagttctcaaaggattgcagttgcttaaggaggttgaagccgatgctgttgaaattatgggtgtttccttgctggtgatcagtcaattggcaggagagtatgagtgcaaaaatgatacattaatggtttacaatgagaagtgccgagagttgatgaaagaatttcggctggtgacttcgaagcatgtatctcaacagcagaatgttgaagctaatgatttggcccaaagggcatcaggatataagccgatgatgaaggatgtcaaagtagaagttgccacaataacaaccgatgattggaggaatgatgtgcatcattatttgcaaaatccatctcaatcggcttctcagaaattgtgctataaggctttgaagtataccttgttggatgacgagctatattatcggacgattgatggggtgttgcttaaatgtttgagtgccgatcaagctaaggttcaaataggcgagtttggagcaattcaaagggcaccagcatcggctatgaatcctatcatcaagccatggccattcagaggttgggggattgatatgatcggtatgattaatccaccatcgagcaaaggacacaagtttatattggtggcaaccgattactttaccaagtggctagaggcgattcctttgaagaaagttgattctggggatgctatacaattttttcaagagcatgttatttatcgatttgatattcctcaaaccattacaaccgatcaaggttcgatctttgtgtccgatgagtttgttctgtttgctgatagcatgggtatcaaattgttgaattcttcgccatattatgcacaagccaacgggcaggccgaggcgtctaacaaaagtttgatcaaatcgattaaaagaaagatttctgattatcctcggcaatggcatactagattggccgaagcattgtggtcctatcagatggcttgtcattgttcgatccaagttcctccttataagcttatttatggacatgaggctgttttaccatgggaagttagaatcagctcgaggagaacggagttacaaaatgagttgacagccgatgagtattataatctcatggccgatgggagggaagacttggttcaatcgagattgagagcccttgcaaaagttactagggataaggaacgtgttgctcgacattataacaagaaagtggtgcccaattctttttcggaaggtgaacttgtgtggaaattgattttgccgacagggactcgagataacaaattcggcaagtggtcaccgaattgggaaggaccgtttcaagtccataaagttgtatctaaaggagcttacatgttgcaaggacttgatggagaagtttatggacgagcgctgaatggcaagtacttgaagaaacattatccaagcatttgggttaatgcatga

SEQ ID NO: 40915 - DNA, 534 bp, Oryza sativa
  Clone ID: PAT_MRT4530_44310C.1
aagaaaaaaaaaaaaggccccgggtccccccccattttaggaaaaagggcccatccccaggaaaccactatatcactaagaaacggggggtcccgggcccccgggataaatttaaataggaaaaaaccccccccaccccccccaaggggtttttttggggggggggcccttttaaaacccccgggaagcttgggggaaaaaaaaagggggccgggcccttaaggccctgggggggggggaagggggaaaaacgggatgggtttccttggccccctggaaaagggttccccaccaagggaacggggggaactttggggggtttgattcaaaattgggggggggggggccccccaccccccaaagggggggggggtccccaaaaaaccccaaaaaagggggtttttccccctttaaaacccctcgggggggggggggcccgaaaaaacaattccccccccggtggggcattttgccaaaaagggaaaaaaaacccccttttacaggggcgaacatttccccaacttgggggggggc

SEQ ID NO: 40916 - DNA, 1470 bp, Oryza sativa
  Clone ID: PAT_MRT4530_44311C.1
atggctacacaaggctggattgctgacataattggtgactgggtgaagaaaaatccacagaagaaggcaaaggatgccaaggagaaaccctttataggtgtagatgcaactaagttgactggtaaatacactggacagttagcttcagccactgttgtagatgaaagattggtgatatcagcagatgcttgcaaggggttagagaaggttgttgatgcttcatttcctatgcctgtggagcatagagagtgcattaggcacctctattctaactttttgaagaagtttcatggtactgttatcactgatcatctgtaccatgttactaaaagctacacaaaagaaggcttcaaataccatatgggtcaaatacatgtagccaagccagaagcaatacagtttcttgagaagcatcattcaaggatatggtacacatgtgggtttggggaaggcaacaagtgtgattacttgacaaataatatgtcagagagcattaatgctaaaataagaggattgaaagagttgcttccacatgaattagttgactccattagagacttaatcatggagaagatgaccactagaagagaagtggccaagaacctgggtgatgaaattcttatgtcagtgatgaagcagttgaatgatttgacttctcttctcaaggttgttaaggtggcaaggagtgatgatggctttgcagaagtcactcttgttgatgctgacaatatgactagaaggcacactgttgatctagacaatcgcaagtgctcttgtagggtttggcaagtatcaggtagagttgcacccatgactcatagatcacagtggccaatagttgatcttggcttcaaggtgcatgcacttaggcaaaagagtggtgctcgaagtcctagagtacagaggataaggggttgtctagagccgggaagaaagaagttcattgtcctacaaaatcaaccagctcagacaacttgcaattttgatgttgagcctcatgttgagcctcagttaactgttgctgaagcatgtcgattctttcacccagataatcttgcacaccggcctggcatcgtcgtcgtcgccgtcgcctgcgcaaccgcctccgatgccgccttcaagattctagggtttcgggaatggatggcgagctcgtcgagccagaccacgatggcttacaacccagcgacacgggggcattttggtccatatgaaaatacggctgcgggctgctcttgctcagctgctccgctgcctccgcaagctcccgtggcggtgtggcctgctgctgctccttttgatgctcgtgcggactcaccgccgcgtgctccgctgctcacgaggtcgtgcaagctgccgccacacgcttccacatgctgcttgccggtccacctcgccggtgccgccgtgccgccgaccccctcgctgctcgcctcttgcgccgccgcacggggtcgccccaatggctgt

SEQ ID NO: 40917 - DNA, 1234 bp, Oryza sativa
  Clone ID: PAT_MRT4530_44312C.1
gtggcaaaggcagccgcagaggcggcgtcgtcgtcgactccggcgcagggaggggggacaccaccgcggccgtctccggccgtcaggtgacctcgtgaggggagaacgcagcggcggaggggggaggaggggaacgcagtggaggagagccgccggtggtcccaccgtccacgtcccacgccggagcttgtcgccggcagccacatcctccaccatccgcgccacgtcggagctcatcaccggcggccgcgtcctccgtcatccacgccccacgccggagctcgtcgccgacggccgcatcctccaccgtcgacgccacggagctcgtcaccgtcacatcctccaccgtccacgccacgtcggagcttatcgcgggcggccgcttcctccgccgccacctccttcgccaaatcgtgccggcgcccctgcgtctgcgtctccacttcaagctgccgcttccactttgcctcagccatcctaccctcctccggcccaaccagagccaaccccctctccgccgccgtcggcaagtaccgtgggtcgtccggcgacgccgacgcgctgtccgcggccaccgccgcgatggacgtggccttcaaggcgaccacgtccaacaccctctccaccgtgcagtcgtcagccagcgaccgagcgaccaccccctcccataaagaaggagcccctgggccccacctgtcatccacccttcccgcccactaccgccaccccggtgggcccacctcccccgcaatggccaccacgcgtccacccgcctcccaccccgccaagtcggtaactgatcgctagccccaccgacacgtagcccccccaagcgggctccacctgtcactcccaaaaaatcgcgacggccagagtggagaaaccttagcccctccccccagcccccgggaggttttccgcccccgaccgccgtggcgccgcgccggagagcaccgccgccgccgccgccgccgcccgcggacgccgacgccgcctcctcctcgaggggccccggcgacgatgaggggagcggccgcgccggggcctcccaggaggcgggcggcggcggatgcggtgtcaccccctacgagcaggccaggaaggccctggcgctgcgctcgccgttcgacggcgacgaggcggtcggccgggacgcgctgctccccgcccgggtcgccagatgggccgcggtgggggacgtccggaagaagcacaagaaggctcagcagccaga

SEQ ID NO: 40918 - DNA, 657 bp, Oryza sativa
  Clone ID: PAT_MRT4530_44313C.1
atgaagcccagccggaaaagtctacttttcctccctgctacagtgtcatcttctccagccggctgccaggcagagctcgagccggccacgcctcgccgtcttgccgccccaaatcccacccaatccgaccccgtttcttccggatttttgaggggttttgatcctctcatcctcctctatcttttcccctatgaatcggagcaaatcgttggcgccgccaccacaccacccaacccgccgccaccgccggccaacctccggccacgccgcgccgccgcctccgccgtcgccgccgcttgccgccatcgccaaaaggtgcgccaaggggaggggaagcccggccacccgtccttcttcgccgccggccaccggagagccgccgccgccgaggccgccccccgatgccacgtggccctccccggaggggagtcaggcccgaggtggggtggcggccactctttcccgctctgcctcaccgagaagtacgccggcggtgtcaacccctccgagtactgcacgacgatcatagaggcggcggggggtgatgaccaggtcatggcgagcttcttccccatgaccctcaggggccaagcgcggggttggctcatgaacctgctgcctgcctcggtctactcttgggaggactcttgcagttga

SEQ ID NO: 40919 - DNA, 700 bp, Oryza sativa
  Clone ID: PAT_MRT4530_44314C.1
ctgacatcatccatggcagccacagcacgggtggcgacctcgccggagctagggtggtcagccgggattttggaggacacctatgcgaagagaacgacgagacgaacgcaacggtactcaccaacgcgacgaacgacgacggatgacggctggcaacgagaggatggcggcggcggctcggttcaccggcggcggcggctctccggtggccggcggcgaagaaggacgggtggccgggcttcccctccccttggcgcaccttttggcgatggcggcaagcggcggcgacggcggaggcggcggcgcggcgtggccggaggttggccggcggtggcggcgggttgggtggtgtggtggcggcgctacaaggcacgagaggccacgggagagggggcaaacgaaagagggcgacgaggggatgctttatataagcttggattgaagagatcggactccaaacgagaggaatcgcttcgggaaatcaaaaactcggttttggagataaactcgaaaacgagtttgattcggataaaatacccaacgatttgctccgattcataggggaaaagatagaggaggatgagaggatcaaaacccctcaaaaatccggaagaaacggggtcggattgggtgggatttggggcggcaagacggcgaggcgtggccggctcgagctctgcctggcagccggctggagaag

SEQ ID NO: 40920 - DNA, 1635 bp, Oryza sativa
  Clone ID: PAT_MRT4530_44315C.1
tgcgggctgcaggaactcggcacgacgcacacctctcccccccaccctttcccgcaacacgcgaaaagagaggcgaggcggaaacaagcccgggcttttccgtctcgtctcgtctccctcccaaaccgaaccaatccaatctcttctcatccatccccatggaggcgcaggcgcaggacaaggcggaggagggggaggaggagggcacgcggcagcaacacgcgcaggctgggccggtcggtgcggctggtggtggtggtggggggggcgcggcggctgtggcgatgagcgccatccccatgaacagctggctcgtgcccaagcccgaaccggtggagttcttcggcgggatggccatggtgcgcaagccgccgccgaggaaccgggaccggcacaccaaggtggaggggcgcgggaggcggatccgcatgccggcggcgtgcgcggccaggatcttccagctcacgcgggagctagggcacaagtccgacggcgagaccatccggtggttgctgcagcagtcggagccggcaatcatcgcggccaccggaaccggcaccgtcccggcgatcgcgaccaccgtcgatggcgtgctccgcatccccacccagtcgtcgtcgtcctctggcccggcgtcctccgcggtggtcgacggtgaggagtcctcggccaagcgacgccgcaagctgcagcccacgcgcgcggtggctggcgcgtctccgctggccacggcggcgcccgcggcgtactacccggtcatcgctgaccctctcctgcaaggtagcggcggcgcggcgatttcagtcccgagcggcctcgctcccatcaccgccaccggcgctccccaaggcctcgtgcccgtcttcgccgtcccggccactggcagccccgcggtcgccggcggcaaccgcatgatcccgcaagccaccgccgtatggatggtcccgcagcccgcaggcgccgcgggcgcgggcaaccaacccacgcaattctgggccatccaatccgcgccccagctcgtgaacttcgccggcgcgcagttcccgacggcgattaacgtcgccgacttccagcagcagcaacaacagcagccggtgtcaacaaccatcgtccagaacagcaactcgggcgagcacatgcacttctccggcgccgactcccacgagcagcagcggcgcgggcggaaggaaggcaacagcggcggcgtggtggaccacccggaggaggacgaagacgacgacgacgacgagccggtctccgactccagcccggaagagtagcaaacacacacagcacaacacaaaaaaagcaagcgaggcgagcactccactgcacgccaaaaagtccacaagtcccccccacacacaaagcttaggttcctttttgctccgattcaatttctcgatcgtttctttcccgcaatattcctcatccttgtcatgatgaactagtaattactcccgcgtgttgtgctgtgctgtgctggtactactccttactttcccgtccttagctcagtgtttagtcttagagaagaagaagatgatgatgatttagcatgcaaatgagcagttgacaatttgacataaaaaaaaaaaaaaaccagtactacttgctgtgacaaaaaaaaaaaaa

SEQ ID NO: 40921 - DNA, 360 bp, Oryza sativa
  Clone ID: PAT_MRT4530_44316C.1
ctcataatgcccagtaaaaaattcttgggggaaacgtggtatacagcttacaacattaattcataccgcgatctaccaaatacggtaacagttaatacacctactagcacggtatttatactcaaattacaattgggttgtagcacatagaatctgacttagtcggatgcgatcaacatcccattcttgccgccggagtggcgtcgccgagcatcctgttgggcgcctaggcaaggcaggacgccggcactaccgggccggctcgcttccaagactcaatgtggcagaactcctactcaccgccgccaaccaccatggtcaggttgacgttcctcagctccagatcccagcacggtacgg

SEQ ID NO: 40922 - DNA, 494 bp, Oryza sativa
  Clone ID: PAT_MRT4530_44317C.1
acccggggatcctaaggggccttccggttcgggaaaaacaacattgttgaccctgatgggggggttacggtcggcccagagcggtagtttgcgggtgtttggtcaagagttaaatggagcaaaaaaacaggatttggttcaggtccgccgtcacattggctatattttccaagcccacaatttgctcgaatccctcactgctaggcaaaatgtacagatggccatcgaactacacccccaatacaatgctcaacaggcgaaagagttgtccattgccatgctggaggcggtgggactaggagctcacattaactacaatccccacaatctttccggtggacaaaaacaacgggtggcgatcgccagggcactaggaagtcatcccaaaatgattttggccgatgaaccaacggcggccttggacagtcaatcgggccatgacgtggtggagttgatgcgaaaattagcccgagagcaagggtctactattttga

SEQ ID NO: 40923 - DNA, 915 bp, Oryza sativa
  Clone ID: PAT_MRT4530_44318C.1
atgaatccgaaccggactcctcctcgccaatcccgtggcgacacgtcgtccttgtacggttcccgtgcgctgccttccttcctgccgcatgggccagctgggctgctgctcctgttgatccagccaccaacacgagcccaaccatccaggccgacgtccacagcacacacgacacatgcacatatcagccagctacagtattccgattactgtagcagcaacacatataataatgcgtacgtaacggcatgctcaaacggtgtacaatacgagtacgagtacgactatagtagtcggactcggacggacccgaagcagagcaaccagactctccgagtgcgagcggatcccctgacgtctatccgccgtccaatctcatcgatccatccaatggtgtccgttgagtgtcatagagatgtaagcactaatcccgagaacgtaagccgccataacaagctttacctttttcgtcggagatcgaaaccgatgcaccccaactcgaaagcaagaactcgtcgaaacaatgaaaatataaaagggtggcgatacgccgaaagtattattgaactgatgttatttgcttctgagagaaggctggccggaagttctggcccctgcacccggaacttccggaccttacgagttgaaaattttcataagtgttgtccggaagttccgggccccttccagttcaaaaatgtttttctgttgcccgaaagttctagtattaagatcaccggaagttccgaacagtctgagcagatcggaatttccagtgttctacacccggaggttccgaacctgctgaattttaccgctgcgaatttgtttgtaattttcaggaaagcctattcaccccctccccctctagactatatcttagcgcgttctaatttacatgatatgagaaaaaaa

SEQ ID NO: 40924 - DNA, 303 bp, Oryza sativa
  Clone ID: PAT_MRT4530_44319C.1
ggaggaagttaagcctcatctctatacctgtcttgtgcgcacatgcgcgcacacataatcctaaattctactcaataccataggcttattaataactacaggctctaccctacagaggtgggaacataattttttcatggacaaagataacaatgctatatctaccagtacgtgcttgttatggtaatttatcggtttaattgcactgactgctttagctagtggttgctgaccattacaaaactcaattacttcgtctttttttgtcctataacatactccgtattttgcactgtctttctg

SEQ ID NO: 40925 - DNA, 191 bp, Oryza sativa
  Clone ID: PAT_MRT4530_4431C.1
gtcttcgtcggcggcggagcggaggagcacggcgggctagtttctctaccttggaggggcgactgttccagttaacccaaaacctttgtgtagctgacgcagcaccagcagtcgcggtgaaagggacacgtctcgccgccccagcttaccgacttccttccatcccgccgacgaggacgcgtacaagccac

SEQ ID NO: 40926 - DNA, 194 bp, Oryza sativa
  Clone ID: PAT_MRT4530_44320C.1
cccacgcttactgggacccatgggaagcaagagagatcattactagaatgatatgacgacagggctcctctcactgggttcattgattatggagcactagcgacggtgccgacaccgccaactgcgtgaaagcattaggcctgcggattaatgctctcatgctataggggatcattatccacagcataatatgt

SEQ ID NO: 40927 - DNA, 660 bp, Oryza sativa
  Clone ID: PAT_MRT4530_44321C.1
tttttatgattcgtaatactaggaaatgtcccatccggtcctaggttatattttgggacggatgcagtatatactatggcatgtcacattttcaatatctgtggcagtgtttacctctttatgtggattatctaactcttgctttgctattctttgaagtaatttgtgtctaattgctgaattgttgtctttctatgcttgacctgactatttaattcaattgaaaaaaacaggcggctttttgcagaaaataaggaccagcttggtgtatctctgccctgctgagcacatccctccaaaaattgaggtggacctggcaaatcttgacattggagatagggtatcaatgaatgacatccccgtccatccgtcgttgaggttactgagtaaaaacgagaccatgcctgtctgcaagatcttggcctcgaaaccagttgagtagaggaatccatgcaaatttttggagcttggtgacaatgtacccgagttggtacagcagcccagtaacttcatctccctatgtgcttgcatttggtagcatgccccattcttattgttaaccattcctactgagttgttgtcatgactcatgatcatcaccagcgtgtcccatgtactgaatactgaatgcatgaacgggggtaattttagcagcgccat

SEQ ID NO: 40928 - DNA, 1411 bp, Oryza sativa
  Clone ID: PAT_MRT4530_44322C.1
gcagagcactagtacactagttgcccccccggccccacacgagattgagattccatcgtcagccagcgaccgaatccttcgccgcgggaaccttctagagcgttccggatccaccggccatggcggccgcggggagcgcggggtcctcgccgccgccgccgccggggcagctggggacgctgtggtcgacgctggaggaccagcgcggcggggcgcgggaggtgcccctgctgtcgtcggcgtggggcctgccgggcggcgggaggggcggggacgggggcgggggcggggaagggggtgggctgatggagatcatgagtcatgacaacaactcagtaggaatggttaacaataagaatggggcatggtatgtttaaagttcgacattatcagctcggcgtgtcaatacacccaggccacaaccaagaatcgacaaaatgtcttgtgtatgttaaactgagaaagctggtgttattttgtgacattacagccaagattggtcctgaacatgataacttgtttgaacctattaccacattgggacttggcaaacagctaccaaatgcaagcacatagggagatgaagttactgggctgctgtaccaactcgggtacattgtcaccaagctccaaaaatttgcatggattcctctactcaactggtttcgaggccaagatcttgcagacaggcatggtctcgtttttactcagtaacctcaacgacggatggacggggatgtcattcattgataccctatctccaatgtcaagatttgccaggtccacctcaatttttggagggatgtgctcagcagggcagagatacaccaagctggtccttattttctgcaaaaagccgcctttcttcaacccagggcagacgtcctcccccttgaactctacaggcaagttcaccttcagcattgttccttcatctgcctccaccagcaccaagttcaatatatttcctgttgtttcgtctctatgcaccttgatagggaggacagtgccggagtgcacgacggcggtggatcgctcgccggcgcggacctggaggcggacgggggtggagaggaagtagggggactgcttcagaatctccccgagctgcttcctgtcggcggtgaggagcttccggtgggccaccccctccccggggccggcgccggcgagggcgagtagcacggccgggacgcggccgttgcggcgctcccgcgccgccgcgcgcgggccggccgtctcccgcggcaacgcctggatcgtgtggtggtacgacgccgaggccgcccgcctccacggcgccgtcgaagcgccgcggcggagcgcctctccgacggcggcggcggcggcgcggcggaggcaaagcgccatgtgtgggggtttagggggacgaagagagttggccctcgtg

SEQ ID NO: 40929 - DNA, 457 bp, Oryza sativa
  unsure (1)..(457): unsure at all n locations
  Clone ID: PAT_MRT4530_44323C.1
ccactattaggcacccnagctttacacttnatgctccggcccgtatgttgtgtggaattgtaacggataacaattncacacaggaaacagctatgaccatgattacgccaagcgcgcaattaaccctcactaaagggaacaaaagctggagctccaccgcggtgncggccgctccatgctcagggtcgcctgctcctactagctccagctaattaatctgccattagtcccttaatccggaacttgttgcttctgtttgctcccttgctgatcgctaatcgccgccgctaatcatcgggaagttttgtaattagcgtgcatcccgatgcacgagcgagcgagcgatcagcagcagtgcaggtgattgtagctgtacttgttgtacgtgtacattattattgttattctgggtgattagtgaattattaatccattgaagcttcaaaaaaaaaaaaaa

SEQ ID NO: 40930 - DNA, 1125 bp, Oryza sativa
  Clone ID: PAT_MRT4530_44324C.1
atgtccggtaccccggcggacggcggcggcggaggcggcggaggcggcggagggagcggggacgactggttcctcgactgcggcatcctcgaggacctcccggcggccgcgtgcggggccttcccgtgggacgcatccccgtcctgctccaacccgagtgtggaagtaagcagctatgtgaacaccacctcttatgtcctcaaggaacctggcagtaataaacgtgtaaggtcagggtcttgtggtaggccaacatcaaaagcttccagggaaaagatcagaagagataagatgaatgataggtttcttgaattggggactactttggagcctgggaagccagtaaaatctgacaaagctgctatcctaagtgatgccactcgcatggtaattcaacttcgtgctgaagcgaagcagctaaaggatactaacgagagtcttgaagataagattaaagaactgaaggcagagaaggacgagcttcgtgatgagaagcagaagctgaaagtagagaaggagacattagagcagcaggtgaagattctgactgcaactccagcctacatgcctcaccccacattgatgccagcaccgtacccacaagcaccacttgcccccttccaccatgcccaggggcaagccgcggggcagaagctgatgatgccttttgttggatacccggggtacccgatgtggcagttcatgccgccttccgaagtcgacacctccaaggacagcgaagcgtgcccgcctgtcgcgtaatgcttcatcggttgcgttatgtgaattaatcgtaacctgaaaccgcttagttgctcaatccattggttgggcatcgtcgtccctgattcacattcactattgttcttgtgttagtagttcgtttttgtatggaagtaagctgacatttgtggcgctctatagaggctactgcccccttttaatgtacaatacaatttttccggagaaaggaagaatgctcattcttgttctctgcagaaaaaaagtgacaaattcagtagcatcatatacaccatttcttatcacccaaaaaaaaaaaaaaatgtatgctgttctggggattgttccctctcgctccaaatcttgttaaaaaaaaaaaaaaaa

SEQ ID NO: 40931 - DNA, 1164 bp, Oryza sativa
  Clone ID: PAT_MRT4530_44325C.1
atggagaagaggcagcagagcgcggggcatagtggtgtcggcgccagagataaggggatcatgacatcggtggcgacaggccaaggaggcgggctagcggtggtggagcagcgttgggatgctgccacatgcactatgatggagggcctggcacccatgagggccatggcccggccgccgctacaggtgaagagcgcaacacatctagtggcaccgatggcgtgggaggagggaaacctgtggctagcccgcgcagggccaggtgctccgacttcaccacatacttgtgtccttgttaccgagctcatcacaaacgaccaagcagctccaacttctcatggcggacatcaaccaaagccaccgtaccacctcttcctgcctattgctggcaccagcatacacgactatcgcaagaatgccgcattggcctcgactcaccgacctccggcgaccaagcaccccggagctccccatgggcacgacctcaccgacggccgcaaccaacgaacaacctccaccacatataacagcacaaagcgtccccgcgggcaccgcgtcaacgccgcacggccgcccaagcttctcgaccaacgctgccaccaccaagctcgccggcgtagcacggccgccctggctcttcgctcgacgccgtccaagcacgccggcggcgcccagtcggccggtgtcgtcagccgctgccacctgcgtcccgcctgccagccgcgccgtcgcccgcgtctcccacgccatatgccgttgtctttcctgccaaacaccatcgtcctcgcgccacccaccgccgttgcccacgccgtcatcagcttaccagccagatccgatgacgacgggccggatccagcaacggaagggccggatccggtgacggtggcggtgccggatccgcagccacgcgccgcgccgccgcgaggcctcccccgcacgccgtgccacttcctcgcatcggagacagctcgccaccggggtttttgtccccgctgccgtcatcctagttcctacgtggttttcggtggcggcgaggcggtgagaggaggggagggtggcggcggccaggggctagggtttgcccctggtcacccgtgtgtggacgaccgaaggcgcgtggagctgattccccctcataggggttgtttggttgatggctaa

SEQ ID NO: 40932 - DNA, 498 bp, Oryza sativa
  unsure (1)..(498): unsure at all n locations
  Clone ID: PAT_MRT4530_44326C.1
ccccgcgtccgctngaaaatagtggagggtggggggtggggagtgaaatctcttgggttgaggaataaaggaaaaagatccgtcggaggctcggtgctctacaggttgtttgccaggactttccaagacctccacttagaaaacacattaaactttttggaagctggacaactatgtgtggtttgtcagggacagtgaacaacccactaaaccattacaggtcntgattgctggagcaggattagctggtttatcaacggcaaaatatctggcagatgctggtcataaacccatattgcttgaggcaagggatgttttgggtggaaaggttttactcttatgcttttatgttgcatttaattttttttgttattcattcttttttttttttgggtgcctttatcttaatagctcatattcactgttagtagcatttgtggattattttttttnnnncgggggaaatgcctttaacattagctgcttggttggtttttt

SEQ ID NO: 40933 - DNA, 880 bp, Oryza sativa
  Clone ID: PAT_MRT4530_44327C.1
atgagacgactagttgcctcacaggagctattgctggttctgctgatttcgctgcagtgtctttcctgccttgcaattgcaaatcctgcgttggatcgccaagctgaagcacttctccaatggaaatctggtctaaggggcgatctctcctactgcgggctagaggaatggagcaacgcaaccagcccatgcaactggtcaggcatatactgcagctacaaggtttacatacaaatgaaaattccgacagtaaacatcttgttccgaggctacttcttgcctttgcaatgttttcttgcatctggctcgtgggtggaagcatcacagtggtttgttggagaagaaaacttgcaaaaaagggcaaagaaatcatccctggagacttcgtttccatatggaactttgatgcaaagagctgagatccaaggaaaaggtgtatttgccatcaagctgcttcacagaatggaagattactttgacattggagcatttcttgctgagattgaagtgttgacaaaaatcaggcaccgtcgcattgtcaagttgcacggttactgctctcattcacagtgcaaatttcttgtatacgatctcatcgaaagaggaagtttagcgtccatttggaatgaccaagaattggcaaaggaacttgattggtgtaaaagagtcactattgtgatggacatagctcaagctctctcttacttgcaccatgattgtgatgatccgatcgtgcaccgcgatattaaaagtagcaacatcttgctagaccatgattttaaggcttatttatccgacttcggcatggcaaagaagttgaaggacaattcatctagctggagcactatctttgcagggacatgtggctacatagccccag

SEQ ID NO: 40934 - DNA, 305 bp, Oryza sativa
  unsure (1)..(305): unsure at all n locations
  Clone ID: PAT_MRT4530_44328C.1
ccgcttgggangnngggcacacaatacgaaacatncgtggatggttnctggcgtcnctatttccgggtacttgtttggggncgcnnncgttgcccttcttanggantcccaactgccaaaacctgangagganaaagangcttgaattctgccnanacaanaagcttggatttgaagaatgaaagaagaatacaagggtttagaantaatgtnataccttccntccatgcttaaattgttgactcananctcccttcnacatttaactganaccttttccttttttatatatttcatgttactgc

SEQ ID NO: 40935 - DNA, 2484 bp, Oryza sativa
  Clone ID: PAT_MRT4530_44329C.1
atgagacgactagttgcctcacaggagctattgctggttctgctgatttcgctgcagtgtctttcctgccttgcaattgcaaatcctgcgttggatcgccaagctgaagcacttctccaatggaaatctggtctaaggggcgatctctcctactgcgggctagaggaatggagcaacgcaaccagcccatgcaactggtcaggcatatactgcagctacaaggtgcgccgtggccatgagcgtgatgccatcctagttgtgacaaacattacacttttctcatgtaacatctccggtggtttgagcaagctccgatttgcacaattgcctcatcttgtctttctcgaccttagcattaactctctctatggaccaattccgtctgatattggtcgtcttgctgagctctcgtacttggatctctctaacaataagctcactggatccatcccgccatcgataggtaatcttacgaacctaggattccttgagctttctaacaattatttgtcacaagggatactcagttgcttgcctgacacattacataacttgcagtaccttgatttaagccacaacagcttaactggcccaataccttccagtttgggaaacctggctagattgtattttctagatcttggatttaacaatctttttggtcatattccacgtgagatagggatgcttcatagtttagttgcgctagatctggatcataataatatcaatggctccatacctacaaccatagggaatctaacaagtttaaagtccttggatctctccacaaatgaaatcacgggttttattcctgaaagtataggaaatttgagtttaatagaattgtatctctccataaatgaaatcacgggtttcattcctgaaagtataggaaatttaaggagtttaataaaattgtatctctccacaaatgaaatcacgggttccattcctgaaagtataggaaatctaacgagcttacaaaacatggatctttccaacaaccgaatcattggccccatcccttcaaccttttcgaaacttatatctttaataacactgaaacttgagtccaatgtgctaaatgctatactgccaccagaactaggatttctacgtaatctttttgttctagatctaagcagcaatcagtttacgggaagcattccacctcagataggacagtttcaccatttgtccttgttgcgcctgcgaaacaacttactgacaggaccaataccagaagagcttgggtattgtaccgacctaactgagttggatttgagcagaaataatttaagtggtgccataccaatgactttcatgatgctttaccgattacttgagctgaatttatcatacaacagtttgggcggcagattttttggtttctacacaactgaagcctcttctgtagtttcactagaccataatacaggtatctgtggtgatccattatatggcttgacaccatgtcaaccatcaaatccaaatcctgacagtttacatacaaatgaaaattccgacagtaaacatcttgttccgaggctacttcttgcctttgcaatgttttcttgcatctggctcgtgggtggaagcatcacagtggtttgttggagaagaaaacttgcaaaaaagggcaaagaaatcatccctggagacttcgtttccatatggaactttgatgcaaaggttgcgtttcaagatgcactttacgcaacagaaaattttgatgaaaaatactgcatcggtgttggaagttatggatctgtcttagagctgagatccaaggaaaagtgcaaatttcttgtatacgatctcatcgaaagaggaagtttagcgtccatttggaatgaccaagaattggcaaaggaacttgattggtgtaaaagagtcactattgtgatggacatagctcaagctctctcttacttgcaccatgattgtgatgatccgatcgtgcaccgcgatattaaaagtagcaacatcttgctagaccatgattttaaggcttatttatccgacttcggcatggcaaagaagttgaaggacaattcatctagctggagcactatctttgcagggacatgtggctacatagccccagaactgtcatctacaatggtgttaacggagaagtgcgatgtgtatagctttggtgtggttatgctggaagtggtgatgggaaaacatcctggagatcttctgctaccgttcttttgccgaacagaacaacatacaaagctcaaggatatcctggaccaacgcatcatggcgccgaccaccgaagagaaggatatcatcctgcttgttctggtggcttttgcttgcctgcaaatctgcccaaaatcccggccaacaatgcagcaggtttgtcaagcaatgacaactagaagtttacctgctcctatcctgaagccccttgatgagatcaaattgcagcatttccatgatttttgtggaactatacagaatatatga

SEQ ID NO: 40936 - DNA, 3774 bp, Oryza sativa
  Clone ID: PAT_MRT4530_4432C.1
atggctaaaaagttgccactgtcgctatcttcgactggcaaagagcttcctcccaagactaataatctaaagtctggtgcgtttgaagttaatgagggaaacattgttcccatcactgtagacaagctaacacctgagcaaaagaaagagctcgatctgatgatgcagcaaacgcaacaccagttcttgaattcattcatggagacccgtaaaggaacaattgttcaaaggtataagatgaaattagttgctgatgttcctaggataggttcttccaaggatggagaagtacaacaaatcccagctggtacaactgaattaggtggtaaaggtgctgcagatggctcaggagataaaggtgatggttctcagggggtgcaaggtgaggatctcggcccagatggtaatacggcacagctacagttcaataacttccaagatcggattgactatgccgtgcaacatgctttgattaatcaatccgaggttcagtatcagcaaggaggatcggctcagcctcagtttgctcctcaatacaatcagttcaaacctgtgccacaacaagcgcagggggcgcctcagcaacgaccatgggccgatatgattgcggatgtgatgagagagcagttcgggctcaagccaaaggacactggaaacctgtatcggcatccataccctgagtggttcaagagggttcaattgcctaaccgatacaaagttccagatttttcaaaattctcagggcaagacagtgtctcaacctatgaacatggtatgatagctccaattaaggagaaattctcatcccaagagtttgatagtttgtcacatcttgcacagaaagtaaccttacatgaacagaggtttgcagaagctaagaagagcttcaaaaagatcaatcatgtatgtccttacatgtatggatccgatgacgatgatgatgatgattctgatgtagcagcaaccgagtgggttaggagcaagaaagttataccatgccaatgggtgagaagttctggaaaagaagagaggtatgatttttatatttccaaggctgaaaagattttcgatctgttacttcgggagaagcagattgaacttcctgccggtcatacaatcccatcggctgatgaattaggcaagagaagatattgcaagtggcataactctgggtctcattctactaattattgcaaagtcttcagacagcagattcaggcggctatcgagggaggaaaaataaagtttgatgattccaagaagccgatgaaggttgatggcaatccttttctcgtcaatatggtgcatacagccggccgaacagccgatggaggaaaatctcgaggttttcaagtgaattcggctaaaattattaacaagtaccagagaaagtatgataagcagcatgagaagtactatgaggaagatgatgatggttttgatcctcattggggctttgaggaagcttcggctaggttggttttgtcaccagagcaagcagtttttgagaagccagaagggacagagaatcggcatcttaagccattgtacattaacggctatgtcaatgggaagccgatgtccaaaatgatggttgatggtggggctgctgtgaatttgatgccatatgctacgttcaggaagctgggcaggaatgctgaagatctcatcaagacgaacatgcttctcaaggactttggtggcaatccatcggaaacaaaaggagttttgaatgtggagctgacagtcggcagcaaaaccatccctacaacattttttgtcatcgatgggaagggttgctacagcttgttgcttggaagggattggattcatgctaactgttgtattccttcaaccatgcatgaatgcttgattcaatggcaaggcgacaagattgaaatcgtgccagccgacagaaccaacttgatagagcttttaaaggaattcagagattgctttgcttgggagtattatgagatgccaggactcagccgattgattgttaaacatcggctacctatcaaaccgggggttagattgaaccagcagcctccgagaagatgcaaagccgatatgctcgaacctgttaaggctgaaattaaacgtttgtatgatgctagtttattcgtccttgtcgggtataatcatatctttatggccgaagaagacatccataagatagcatttaggtgtcctggtgcaatcgacttatttgagtgggttgtgatgacttttggcttgaaaagtgctagagctacatatcaaagggccatgaattacatatatcatgatctaatcggctggttggttgaggtctatattgatgatgtggttgttaagtccaaagaaatagaggaccacatagccaatttgaggaaagattttgagaggactaggaagtatggcctgaagatgaatccgacaaagtgtgcttttggcgtatcggctggccagttcttgggatttcttgttcatgagagggggattgaaataactcagagaactgttaatgcgatcaagaagattcaacctccgttaagacattatctattgtccaatgaatgcactgtgatatgcaaggccgatgtagtcaagtacatgttatcggctccaattttaaaaggaagaattggaaagtggatattttccttaacagagtttgatcttcggtttgagtcactgatggcgattgaggggcaggctatagccgattttattgtttatcatcgtgatgattcaatcggctcggttgagattgtgccctggactttgtttttcgatggatcagtgtgcactcatggttgtggtatcggctttgttataatttcccctcggggggcaagttttgagtttgcttacactattaaaccttatgcaactaacaatcaagctgagtatgaagcgattctcaaagggttgcaattactcaaggaagttgaagccgatgctgttgagattatgggtgattcttcgctagtgatcagtcaattggcaggagaatacgagtgcaaaaatgatacattaatggtttacaatgagaaatgccgagaattgatgaaaggatttcggctagtgactttgaagcatgtgtcccgagaacagaatgttgaagctaatgatttggcccaagggacatcgggttacaagacgatgatgaaggacgtcaaaatagaaattgccacaataacagccgatgattggaggaatgatgtgcatcattatctgcaaaatccatcccaatcggcttctcggaaattgcgctataaggctttgaagtataccttgttggatgatgagctttattatcggatgattgatggggtattgcttaaatgtttgagtggtgatcaagctaaggttgcaatcggtgaggggtgtcaagattgtcaaaagtttagagcaattcaaagagccccggcatcggctatgaatcctatcattaaaccgtggccatttagaggttggggaattgatatgatcaccgatcaaggctcgatcttcgtgtccgatgagtttgttcagtttgccaatagcatgtgtatcaagttgttgaattcttcaccatattatgcacaagctaatgggaaagctgaggcaactaacaaaagtttgatcaaattgattaaaagaaagatttccgattatcctcggcagtggcatactcgattggccgaagtatcgtggtcctatcggatggcttgtcatggttcgatccaagttcctccttataagcttgtttatggacatgaggctgttttgccatgggaagtttga

SEQ ID NO: 40937 - DNA, 522 bp, Oryza sativa
  Clone ID: PAT_MRT4530_44330C.1
atggatcactcagaggaggcggcgaacgcaggggtccgcgccgcggcggcgatgccagtaccacccacgggccacggctgcaccggcggtggcgcgctccccggcgtccccgcgcggcacgacatgcccagagccccagagcatgctatgaagaattgggagcggaagcggggagaattgtcagggcaggggaaatgctttccagagctcgaccaccactgtcaccgagctcagggtggagtggatgacgacgacagcgatgagagggcgagctgctgcgttgtggcacgatggcttcatctcaaagtggcgacgctcgagctcgaggacagcatgagcaacgactgtggcgtccgctggtcgagcttaaggacagtgcaattgacaacaatgatgggcatgcttggaggtgagctaggcggcgacgacgacagacagacatgctcgggaaaggggcgtcctcacgtgggtgggcacacggcaagggacaaaccggagttggaaaagaggatgggtatgtaa

SEQ ID NO: 40938 - DNA, 174 bp, Oryza sativa
  Clone ID: PAT_MRT4530_44331C.1
atggagcaaaggactgtgggccccactaacaatgtccttgatgcaatcaaatctttagatatctggtcaacaaatagtcaagcgcctcaagttgatatctctgaaaagatagctccatcattgcaggtgtgttggagaggtctagagcacaagagggacaatgatgatgattag

SEQ ID NO: 40939 - DNA, 188 bp, Oryza sativa
  Clone ID: PAT_MRT4530_44332C.1
agtgttgaaattatctgattattttaatacggcgagacaatgaaaaaataaaacaaaaaaataacatgagaacagaaacctttaagacctacataaagtttataaagctgggtataaaaaagaaaacggcaaaaacatcaggctatattgatgggtctgaaaggatgcaacacagtgtacagcggcga

SEQ ID NO: 40940 - DNA, 1469 bp, Oryza sativa
  Clone ID: PAT_MRT4530_44333C.1
ccccgggctgcaggaatcggcacgaggcgtcgatctcgccggcgacccacgcgtccggcgcctccgcctccctcccttccgcggatcgtggcgggctagggcgtggactctcctcctcggtcctccacggatcgagcccgccgccgatgggggtggtgatcgagcgggaggagtgggcgctcacgccgctcgcctacccgctcctctccgccgcctccctcgccgcggtgctcctcctcccctacttctccccaccgttgcacgccaccgccgccgcgtccccgtcgtcgcactcccccttcgacgtgggcaccaccccgttcctccgattccgccgcggcttcctcttcgtgttctcgctcgcgtccgtggcggaggggatccattccgtgttcggggaggatgagttcgcgcggtgtgggcttggaagggagcagatggccgcgcgccttgccgccgccgcagcagccgtgctcttcctcggtgggctttccggcgtcgtctcagataaactaggaccacggcaggcttgtatattctactggatgcttcaacttgcagtgggtgccttgaagagttttagtgggcttcgttgtgcatggattagcaacttgatttcggcccttgcctcatcaatgttctatttctgtttcgagacatggtttgtggtggagcatgagaagcaaggtcagaagcaagatttgctgtttgattccttctggctgatgacattctttgagtcaatgtcccttcttggaagtcaaggaattacaaatctattggttaatgatgatgacaagggatttctgctaccctatgcatttgcagctttactatcaatagttggtcttctatatatcagaaaaaatgcaccaagtactactcatcatgcatctgtcattgggagctaccaaaaatcattttttgctcatgtcttcagagctccttttcagaatgaggacagcctaacgatagcatatgttactgtggggatcgctttatcaattgtggcttatgattaccaggatattgggacattggtgatactgttctgcatcttccatgcatgtgtaggctttattcttccttcattagcacgattgagaacaatgtacctgccaaatgaactacgtgggggcatgatgagcttttctctgggactggcaaatgctgctatcttcattttcctaatgcagatgcagcacgcttacgaggcagcgtatctgttctccaaccccgaaacagatactgtcacgacaagtcgtcaaaaagaagaatatcttgtcttcgtgtgttcccgggagttgcagaggacagtaataaaggtttccaaggctgggccaagtgatctgaacctgcagctgctgcctactttggagaagaagctgcatgaggcagagaaagtaggacgactcgatcgtctcttctattctcctccaattgatctgttgctatctgtacacgggtag

SEQ ID NO: 40941 - DNA, 3443 bp, Oryza sativa
  Clone ID: PAT_MRT4530_44334C.1
atggctattcttgaagcactccagcaaacatcgatccctgttactggatcttcttctattgcagtcagtccagaaaactttatcaaatgtttgaagaagttttaccatcattggaaggaagatggatcaaacctttggggatcttcaactgcaattgccattgctactccaccaccttctgatgacatccgatataagaaatcattagccctgagcatgtggttttttaatcgtgagctccctgaaaccataatggttttcacagagaagcagattcatgtcctgtgcaagcagaaaggttgtgatgctcttaaacctttgaagatgcctgtttcaaaagcagtcagcattgaaatcgtgttgcataatttggcaaagggtgacaatggttcttccttaatggatgaaatccttcatgctgtatgttcccactttgaatcaaaaagtgctgttattgggcacttagcaagagagaagcctgaaggtaagattcttgaagtatggtctgagaagttgaacggatcaaggctaaggctttctgatgtgtcaagcggcatctctgatcttctttctgtgaaagatgccacagagattatgtatgttaaaaaggctgcatatttaactgcatcggttatgaagaagtatgtagttccaaagctggagaagattatagctgatgaaatgaaggtacaacattcaaaactcacggatctgatggagaagatattgctttccccaacaaagatagatgtcaaactgaaagcagaaaatgttgatatatgctacccacctatttttcaaagtggaagcaagtatgatctccggcctgctgctgctagtaacaatgataatctgtactatgattctggaagccttattgtgtgtgcgatgggtgcaaagtacagtaactattgctccaatgttgcaaggactttcctgattgattgtgctggggaaaaatgtaatgcatataaggtcctctgccaggcacatgacgctgctattgctgctttggtaccaggtagcaaggctagtgatggttaccaggctgcggtttctttggtgagggataaagctcctgatcttctccccttttttaccaagtcagctgggacaggaattggcattgagttccgtgaaacttggttgtctttgaatgagaaaaatgacaggatactaaaggaagggatggtttttaatgtttcccttggtttccagaatctcccagagaagactggcgattacaagaacaaagaattctctctattgctggctgacagtgttcttgtttgcaaggaaaagccacatgtcttaacagcttttgtctccaaagctgatggtgatgtcttttattcatttgatgaagaaaagacaggttccccttctgtgaaaccatcgttgaatgcaaaagtgatggtcccagaaaaaccagtgccaaaagcagagttgatgctgccgttgaaagaaaacctgcgatcccacagcaggacaccaaaggaggaccttaggaagcagcttcaggcagaaattttacagaagagaactgctgaaattgcaatgaatagtaatgcctccaatcataaattgctggagggacaaggccttagagctatgcgtgaacctgttgcatacaagagcacaagggatattccctgttccaatcggttggagattcaggtggataagcagaatgaggctatcctattaccaatatatggagttattgtccccttccatgtttgtactgtaaaaaaagcagaaatccgtggggatagcaacagaggagtctatgtctgtattacatttaatgtccctggcactgcttccaatctccaagatccctgcctgaagacaaatgcaaatcgcattttcttaaaagcagtcaccttcatttcaaaagacagaaagcatgctgacgaggctattcaattaatgaggattattcaaagaggagtattagaaagagctaagagagctagtttggtcagtcaggaaaggcttcaactatgtgatagaatgactagggacaggattcagttgatggacttgtggatacgcccaacttttgctggtcgtgggcgtaaatcccctggaattttggtgctccatgtcaatggttttcagtattccgcatctaaatctgaaaaaattgaaatcatgttctgcaatgtcaagcatgcgttcttccagccagctgagaaggagatgataactctcctccacttccatctttacaatgatatcatggtgggcaacaagaagactagagatgtgcagttctacattgaagtgatggatactgtagattcagttggtctgaggcgccgaacagcatgggatcctgatgaaattgaagaagagcagcgggaaagggcacggaggagcggaataaacaggcagtttgagctctttgtgaaaagggtcaattccatttggtctcagccaaggtttgagcagctcggcttgcagtttgaaactccatcgcaaaagcttgggttcaatggagtccacggcagaacaacatgctttattgttcctactccaagttgcctggttcaactggttgaatcgccgttccttgtaacttctctgagggaggttgacatcgtatgcctggaaagggtggcgctggggcagaaatccttcgacatggttttcgtgttccaagacctgaagcgagatgttatccgcatagaggtcattccaatgacctccattgatgggattaaagattggctcaatggctgcaacctgaagtactacgaaagcaagctgaacctcagttggcgtaaggtcctgaaggaggttatgaacaataaagagtcagacgagaacaataggtgggagttcttgaacccagatgctagcgactcggactcggagagctcacagacagaagatgatcagtatgaaccatcagatgccgactcatgctctgaatcggatgacgaagacagtgacagtgaatctgtggtggattctggtgaagacgacggtgccatggatggttcagaagatgatggtggtgatgctgccgaatcgtgggatgagatggagcgcaaggcgagggacgccgacatggagatgggcagtgagtcggacagcgaagacgagaggcagcggcgaagggagaaagcactggccaagtctcggtgtcctagtcatccacaggccaagggtgctgcgcacaagaggcagcgaattaactagttctcagataatggaagtttagcttgttcttgtggcactttattatgcatctgtcgctttttacctgtcgttagtttcggtggtgaacttttgatatgttcttctaggtactttgcataagtacattactttgtcagcataagtgactcgaagaatgttcagttttctattatagcaacattatctcgttttactgcaaaaaaaaaaaaaaaaaaaaaaaaaaaaaaaaaaaa

SEQ ID NO: 40942 - DNA, 577 bp, Oryza sativa
  Clone ID: PAT_MRT4530_44335C.1
agcaacttaaccctgtctttttttgctggattggtgagcccttttatgttccaatacaggatgaaacatgattggtgagacataagcaaaagacacatttactggagatacatgcagtttttaggaaaaaaattgggggaggaaggcataaacgactgtctccgaaacatagccaaaaacatttggtagaaacacaaaaagacagcgggctgagagcttccattgggatggaatattttctccactgcatgggcagcgaaacacaactgtttcactgggggaggtttttcacgccggggagacagccgccagttttctttcttcacgcaggcggactgatttgcagccacctttttcgaccagggctgggatggtcttcacagctgcaggaaaaagaggcttcttctactgcttgttgcgacaagggcggtgctgtttgtgtccaggcaccggcaacagaggctgcagcaccggcgtcgagagttcagcaaagaaaacatcagcaggctgctccccttttcctctagttggcgcctgagagccttgccctgcagctgaaaggataaagacaggggaa

SEQ ID NO: 40943 - DNA, 646 bp, Oryza sativa
  Clone ID: PAT_MRT4530_44336C.1
gcacgaggcaacaagaacatcaaggcttatcctcccttcctgcaagccaaaattctgaatcgaagtccagctgattcccatggattaatactgatcccaacagttctttgtcttctccctccttgctccaaatggccggcaccggcttacgattccggcagggcgccatcttcttctcaggagctcatgctgctgctcatccaagaacaaggactcctcaccaccattgctcacctcagaggacgcacgatgcgagaggaaggtgccgcctcacggctaagtccgcaaatggacgcccacagatcagtgcctccttcagagatgtggcgatagatggggcacagtctgaagatggggcgccagagcagggaggatccaccgtcagcatcaccgtcgtcggcgcctccggcgatctcgccaagaagaagatctttcccgcgcttttcgccctgtactacgaggactgcctcccggagcattttactttttggttatgctcgtagcaagatgagcgatgaagagctcaggaacatgattagcttgactctgacatgccggattgatcagagggagaactgcagtgacaagatggaacagtttctgaagagatgcttttatcaatctgggcagtacaattcagaggaag

SEQ ID NO: 40944 - DNA, 1637 bp, Oryza sativa
  Clone ID: PAT_MRT4530_44337C.1
ggaaccataaaacattcgtaaacaaaattcatgcaacgataccaacactgaaatgtttgcagttcgaccaaaaaaatacaaccattatagctagttttatcaccatgtaaagggaaaatctggagggcttgaccaaatttttttttttttttctgctttgagccatcgtcaggccaccacacgcgcagcacgggggcaccgctgggcgctggtttgccacgccatgaaaagcgagagaaaagagcacgaggggggggattagggtaagaggccactgaacccatccacatcgagatgcaaaaggggcgccagcccactggagctggaaaaaaattgcaccggcttcatggcaagcttgagctcatgtacccaccgcctgcagccacagcaggtgctcgaacagcagggtcgggataaaagtgaccaattttctttaaaaaaaatcacaacttttaggtgaggagcggaaccaacccagtcatccttatccttttctctgcctctcttgctcccgtgccctcccccctcctcattctccctctcaagcccctcattctctcacccctctctctgtaactaccgccgcacctcctcttcctcctcctccccttaaccctccatgctgcaagatgacggcgatggcggcgtggccagatccggctccgccccttaaccttcctctcgccccttcatatcatccattggagctcgggggtggccagatccggctccgcccctccccaccagcacatgggaacggccaaatccgcctcctttcccccgccgacccactccccctcctcttcccgcacgccagctgggctggcccgaggccgaggcccagccagccgccgcgccaccccctcccctctccgggtcaccgacaggtggggcggggcccacctgtcgggcccatctcccacctccggccagcgccgccgcgcccgaaaccgccgctcccgccctctccgcgcgcacctgcgcatacgtcgcccatgctcccgcgccacctcccacacaccccgcaaccgccgctcccaacccttacagttcgagtatgcgtccgatggtggtttcttcgaggagtaggcttcatccgtgtcgtcgaggatgcctgtcgcgtccatggcgaccgccaccgcaccgccgcgggcccgctgcccagccaccgcgaggagtgagcagaacatgccgatgtcgccgccacccactcttcccccgaaggtcaacgaggtcgccgcccactcttcccccgaggccgctaccggatccggtcgggacgaggcccgccgtcgccggatccgagcaggacaaggcctgccgcctccggatccgagtgagacgaggcccgccaccgcccactcttcgccgaggtcgtcgcccccgccgccgttagctccaggcagagccgcccaagccaccgccagctccaggcccgagcccgaggcggccgagagccccccgtcccgcccgccgttagctccaggcagagccgccccagccaccgccagctccaggccagagcccgaggcggccgagagccccccttgacgccgccagctcctgccaccgccgcccgaggaggagtggagagcaagagaggagagaaagagagagtgaggggagatgatagaaag

SEQ ID NO: 40945 - DNA, 2219 bp, Oryza sativa
  Clone ID: PAT_MRT4530_44338C.1
gaggcggcggagacgaaggggagaggaggcggcgaaggccggaagtgccgccgtgaggaggaggaggcctttgctgctaagtcaaggaggatcgatgaccaggatgacgaagaaaggatgaacaattatactcctatgttggaggaagaggaggatgggtgtagggattcgaggtgcgcggaattggtgttcggtgaggaggaggagctggacccggtgcagatggaggaaaaattgcggcaggtgaagttggagttgcaggacaagtacactgaggtggacgaggaggagcagattcgcaactaccgtacatcttgggattcctctttgtcttcccgttatggtcccttccaatgcacaatggtaagaatcaaaaagggtctcgagtggccgttgcatgtctatggcttggttgctgtcagggactctgtggatcataatcgcaaccttctgttccaccgcactagagatgattgtcaaattctcactcagaaggattcatttttggagttgacaggtccatcccgtgcaattctgattgtcgacccagttgagtttgacgttgaactaaaagtaaagggaagaagagagtccgatgatcaaatattgagctttcaactcttcagacaaaatgggttttttaatggtagacaatcagtaacgctggttcgtagatttcacccaatcatgcttgggtggtacagcaagtttaagttcacatatgcggtgcttaatggggcagttgaggcgactatctgcagagtcaaagttgttagaggatcgtggacaaaagaataccaaggacgaattgtttgcacaacttccagtatatgccatgaggactttatgttgcttgattcccaggatgcagaaacaatgcctattggttcagatgatgtgatcaagctatcaaggcgtgttgtaactgtagaattaagtggagaactgacagtttctttgacagccacacatgttggtaaaagaactagagatgatgatggcgggattgcacaaaatgatgaggccctattcacaacggataaggttcgcttcaggcccaaaaaatcaggggaaagctgtgctacatgcaaattaggcttctgtgaggtagaaataactgttgagcgaggggttccaggcctctcctgcactgcaagcaagatgatttgcatgattgcttgcttgcttgctgctatggccatgcctaatgtgttgtcgcacgtattccttgttgcatgcctcaatcaatcttcttcattctggcaggttatatatacaatcacatacagacaggtgttgatgcatgctccgatcctacgtacaatcaagctaggagctgtaatttgatcgatcgatcgatccaattggtacctaataaagtaagaatggcaagaggtggtgttgtgtggttggctgtggccctcctgtgctgctgctttgtgaggcattgtgagtcggcccgcgtgttcaccatcatcaaccagtgcaagacgatggtctggccggcggtgacgcccggcgagagcttcggcggcggagggttcgcgctgaagccggggcaatcgatggtgttcacggcgccggtggggtggtcggggcgcatctggggtcggacggagtgcgacttcgaccaggcgggcaacggctcctgcgccacggggtcctgcgggtcggagctcaagtgcggcggctccggcgccaccccggccacgctcgccgagttcaccctcgccaccaaggacttctacgacgtcagcctcgtggacggcttcaacctccccatggtggtgcgccctctcaacggggagggcaactgctcggtggccgggtgcgacggcgacctgcgggacagctgcccgtcggagctgtcgaagaaggtgaacgggaggacggtggcgtgccggagcgcctgcgacgtcttcgacaccgaccagtactgctgcagggggatgtacggcaacccgtcgacgtgccagcccaccttctactccaagaagttcaaggccgcctgccccaccgcctacagctacgcctacgacgatcccaccagcatcttcacctgctccaacgccgactacaccatcaccttctgctccaccaggaagcgacctgtgtgcacgtaccacaacaatcgccttatctgcagcgcctccacccgatcttggcctagtgtcatttctgcgctgctcttcacttttctggctttgcagttttcgctc

SEQ ID NO: 40946 - DNA, 213 bp, Oryza sativa
  Clone ID: PAT_MRT4530_44339C.1
atggcgacgtgtggcgcggcacccgggccacgcttcgcccgccgtacgtacgtcgtcgctcgcggccacggcggctcgcctgtccgcgccgcgtcagcctggaggaacgtgtgcgtgcgcgtgggtgatgggcgagctccggaagacgccaatgcggccgctcgagaagcctgcgagacggtgcgtgaccagtccgcgctgccggcccgatga

SEQ ID NO: 40947 - DNA, 3732 bp, Oryza sativa
  Clone ID: PAT_MRT4530_4433C.1
atggtgaagtcattggttgatggttcaatggctgagtatcaggctacaggaccggtatatttaccaggggatgttttcccaaattatcggcctctgatcacaaataatcagccgagtacttccagtgtaccaccagcagcaccagtatcagctcctgcacctgctgcaccatcatcggcgccaaaacaaattaccaatcctcgcaacatactggacaaaagttgggccgatttggagaaacagttccatagctatttttatagtggagttcatgagatgaaattgtctgatttaacagcgattagacaaaggcatgatgaacctgtgcaagattatattcagagattcagagagatgaggaataggtgctacagtttgagtttgactgactcccagttagccgatctggcttttcaaggtctgatagctccaatcaagcagaaattctcatcccaggagtttgatagtttgtcacatattgcacagaagaagatcaatcatgtctatccttacatatatggatccgatgatgataatgatgattccgaagtagcagcagccgagtgggtcagaagcaagaaggttataccatgccaatgggtaaaaagttctggaaaagaagagaggtatgactttgactttaccaaggctgataagatttttgacttgttacttcgggagaagcagattcaacttcctgctggtcatattatactatcggctgaggaacttggcaaaaggaggtattgcaagtggcataattatggttctcattctactaacgactgcaaagtttttagacagcaaatacaggtagccattgaagggggaaagattaaatttgatgactcaaagaagccgatgaaggtcgatggtaactctttcccggtcaatatgggtatgaggctgccatctatcgaagattgtcctagatgcagtgatattgcagaaagttcaagccgatctcacaatagaagcaatcggctgaggttgacaagagttcctgttcatcaaagattgggcccagtaaatcaagatcatgatcaagaggacgaggagggcagaaaaactcaatggtgtccttctggtatttttacgaagaatcagaagagaagagttcaaagattgaggaacagagagtgttttcatgaagtggagcaagagattaatcatcggcagaagaagacaaagccaaggcaggagtggcgtgtcaagaaccaagctgctacagccgatgaagcaaaaaggttggctaaagggaagagtgttgtgaccgcatcggttaacatggttttcacgttgcctgcggaattcggagctaaacaagctgatgttgatgaagttgaggaagcttcggctaggttggttttgtcaccagagcaagcggtttttgagaaaccagaagggacaaagaatcggcatcttaaaccattgtatataaacggctatgtcaatgagaagccgatgtccaagatgatggttgatggtggggctgctgtgaatttgatgccatatgctacatttaggaagctgggcagaaatactgaagatctcatcaagacaagtatggttctcaaggactttggtggcaatccgtcagagacaaaaggagttttgaatttggagctgacagtcggcagcaaaaccatccctacaacattttttgtcatcgatgggaagggttcctacagcttgttgcttggaagggattggattcatgccaattgttgtattccttcaaccatgcatcaatgtttgattcaatggcaaggcaacaagattgagattgtgctagccgacaagtcagttaatgttgccagtgccgatttagctctttgggagatggacgaattcagaaccaagttgatagagctcttaaaagagtacagagattgctttgcttgggaatattacgagatgccaggactcagccgatccattgttgaacatcggctacctatcaaaccgggggttagaccgtaccaacagccgccgagaagatgcaaagccgatatgctcgaacctattaaggctgaggttaaacgtttgtatgatgctggttttattcgtccttaccgatatgctgagtgggtttccaacatacttccagttatcaagaaaaacagcacagtcagggctacaccaaaggatgagtacccaatgccagttgccgatcaattggttgacgctgcttcagggcataagatattgagttttatggatgtctacattgatgatgcggttgttaagtcaaaggaaatagaggaccacatagccgatttgaggaaggtttttgtgagaactaggaagtatggcctgaagatgaatccgacaaagtgtgcttttggcgtatcggctggccaatttttaggatttcttgttcatgaaagggggattgagataactcaaaggagtgttaatgcgataaaaaagattcaacctccggaggacaagacagaattgcaggagatgatcggcaacataaattttgttagaatgtttatctctaatttgtctggaagattaaggcattatcaattatccaatgaatgcactgtaatatgcaaagccgatgtggtcaagtacatgttatcggctccgattttgaaaggaagggttggaaagtggatattttctttgatagaatttgatcttcggtatgagtcaccgaaggcgattaaggggcaagctatagccgattttattgttgatcatcgtgatgactcaatcggctcggttgagattgtgccctggactttgttttttgatgggtcagctgagtatgaagcggttctcaaagggttgcaattacataagaaagttgaagccgatgctgttgagattatgggtgattcctttctagtgattagtcaattggcaggagaatatgagtgcaaaaatgatacattaatggtttacaatgagaagtgtcgggagttgatgaaaggatttcggctggtaactttgaagcatgtatctcgggagcaaaatattgaagctaatgacttggctcaaggggcatcgggttacaagccgatgatgaaggatgtcacaatagaagtttccacgataacaaccgatgattggaggtacgatgtacatcattatttgcagaatccatctcaatcggcttctcggaagttgtgctataaggctttgaagtataccttgttggatgatgagctatattattggacgattgatggggtgttgcttaaatgtttaagtgctgatcaagctaaggttgtagtaggtgaggatatttttggccgacaatgttggacgattgtttcaaatagtacaaaggatatcaagattgtcaaaagtttggagcaattcaaagagcacccgtggccatttagaggttgggggattgatatgatcggtatgattaatccaccgtcgagcaaaggacataagtttatattggtggcaaccgattattttaccaagtgggtagaagcgattcctttgaagaaagttgattctggggatgctattcgatttgttcaagagcatattatttatcgctttggtattcctcaaaccattacaaccgatcaaggctcgatctttttgtccgatgagtttgttcagtttgccgatagcatgggtatcaaattgttgaattcttcacaatattatgcacaagctaatgggcaagccgaggcgtctaataagagtttgattaaactgattaagaggaagatttccgattatcctcggcaatga

SEQ ID NO: 40948 - DNA, 199 bp, Oryza sativa
  Clone ID: PAT_MRT4530_44340C.1
acaaaaagtctgatctgatagttgatcagctggtcgtttggcttttctgaagaatacaagaaggcacgacatgcaatcagctcggtcaccggtggggttcggagttttattctccgacccccggtagccacgaacattttaaactttttctttacaaaccagggaaagctaaactatagcttacagctcttccaatggt

SEQ ID NO: 40949 - DNA, 294 bp, Oryza sativa
  Clone ID: PAT_MRT4530_44341C.1
cttgaagtttctttctattcctctcctcctcctccgcctcctccgggggcgttttaagcgacagtagcggctcccggccatgggttgcggaggcaccaacgaggacgtggccaccggtaacaccaccgcccccgccgacactctcagcagctatgcttttacggatgaagtccaaccgtatccgccagccatccgttcttcctccatgtcgtcttccaatggatgcacctacgtctccgtcaaggacgtctcgacaaagaatgatgaggagaccgaggccgtccccgtcctgga

SEQ ID NO: 40950 - DNA, 1317 bp, Oryza sativa
  Clone ID: PAT_MRT4530_44342C.1
cgcttctcctcggccgctttgttctcctcctttttttttttttttttttttttttttaattaacatcgcagttaattatttttttattatatccagatttgtatgattaacttatgtaacagattaacatggctgagaaattacagagaacaaattacaacaaatggaaatcaaaagaatggatgtgtgaaagccaaatcaatctactacaagcatagtcgtcgttgatcatcgtctctgtgtggtcgtcttgtgtccatgcatgcaatgcatttagtacaagtggttgatggcgctgcacttcttcctgatctcccccttgctcccctccggcatgggcagctggctgagcttgagcagcgagtcggagaagtcggagtcccaaagggtggcattgtcggcgtactcgtggaccttggagagcgacgtggcgtccgtgagcagctgccagtcggagtggaaggtgacgatcttggcgaggttgttgtggtagtaggtgttgtcgaggaagtcgctgatcttgcggacgcggctgacgaagcccggcatgaacctggcgacgacggaggcgtcctcgtcgcggacgttgttgacgacgtccgggttggcggcctgggagcacttgtagttgaggaggtcgcggtacgccggggtgatctgctgcggcggctcggagaggcggccggtgaaggaggagcagtggccctggccgatggagtgcgcgccggagaggatgaccagctgctcggtgtcgaagcccttggcggcgaagttgtccttgagctgctgcacggtcatggtggagtccgggagctccgcctgggcctcgtcggccctggagacgacgccgtcgaggcggcccgcggggacgtcgaagtggacgtggccgttgctgaggatgctgccggcgtcgcgcgccgcgtagatgaggatgtcggagcaggacaccacgccggggcaccgcttctccacggccgccttgatctcctccaggaggtcgaacgccgccagcccgatgttcaccggcgcctccttctccgggtgtgggttctcgtacgacttgtccagcaggactgacccatcgcaacccctgacgaagcagtcgtggaagaggaggcggactagggcagcgccggtgcggcggttctgcttgagagccttgatgacgtgccacttgatcacgttctcgacgcccttgcacttcttgtggtagtacccgaccttgagctcgctggccgcggccgccgatccggcgaggagcagcgccgccgcctgcacggcgacgagggcgcagaggatggccaccgacagcctcat

SEQ ID NO: 40951 - DNA, 922 bp, Oryza sativa
  Clone ID: PAT_MRT4530_44343C.1
cggccgaggcttgattgagttgtttgctcgatcgatgggttgattgtcactgtctgtttagcaatcgagctagctacgaacaggaatgtagtactaatctgcatcgatcagtgcctctaatcttcttcttcttctcttgtaaccagcagcagaagcaagcaatccccctctcctctctgagagagatggcgtttggcagccacacgcgcctggatgtgaggcgggcgcagcagcactcctcattctgctccccctcctccgccgccgccgtcttggtggcgctggccttggtcgccgtctggatggcctcttccacgctcgtcacccccgcggatttctcccccttccgccccacaaccacaaccgctcgacctcggaatcggatggatcctgtgactgttgaagaggacgccgacgaccctcccccactcacactcagacagactgagaccggacccggaggggataatggctcccactcccactccccctccctggagaccgctacagaggcagaccctcaagctgcacagtccaccagcaacaccaaggacactccccacaataagcagcagcagcagactgcgtcgcccacccccagcagctatgcttggaagctctgcaatactgaggctggtccagattacatcccatgcctcgacaatctccaagccatccgcaaccttcggacgaccaagcactatgaacaccgagaaaggcattgcccccaacaccttcctacctgccttgtccctcttccaaagggctacacaaatccaattaggtggcctaacagcagagatcagatatggtacaacaatgtcccgcatactaagctggtagaatacaacggtcatcagaactgggttaaggtctccggggagtacctcacctttccgggaggaggaactcagttcaaaca

SEQ ID NO: 40952 - DNA, 622 bp, Oryza sativa
  Clone ID: PAT_MRT4530_44344C.1
agctgaccccctcccaaaactttgatcactaaccatcttatctcagtttgatctgatgtcacttaaggacaaggccatagcaattagcaacacttgatcagctaattaatacaacccaaccttcactaagttgtaaattagataggatagttgtgttcccacgcgtccgggttaatttgctgttgtgttgatgaaggagagaggtgtgaggaacaagcagggagtgatcatgaaggccctgctggacaggtgtttgtccaagcacaggaatggtggctggccggagccgccggaggggagcttcgcggtgtacgtcggcggcggcggcggcggcggaggggcggcgagggagaggttcgtggtgaggacggagtgcgtgaaccacccgctgttcagggcgctgctggaggaggccgaggaggagtacgggtacgtggcggacggcccgctcgagctcccctgcgacgccggcgagttcgtcgccgtcctggcgaggatcgagcgtgagatggccgaggagaggacggtcgggtgcgccggcggcctggtgttcaggctgcacccggcggcgcacctcatgctggttgctccggcgacgccgccgccgatgatcgttggctga

SEQ ID NO: 40953 - DNA, 459 bp, Oryza sativa
  Clone ID: PAT_MRT4530_44345C.1
gggaaacaagggggccacaatattttattggaaaaacgggcccaaggccgtttttattatttatagggaaccccccaataacaagaggggacagggccccaaccccaccccaaattccactgaactcccccccaattaaatcaaactaaaaaactcccaaattcaatcgaccttacttttttaaggaaaaaaagcagggcctaggaatgcaaagcatcctgaaaaacccctctttttttttcatctctgaaacccgaaaagggaaacaaagcaaaaaaacccccaggctctccttttttaaaatctcaacctgagatgggggccagctcacttgtttgacgggtcgcccttgacggccaaggggaacggggctagccatgggcgcggtacttgagggcatacagcatctcaagggaggggggggtttcacccctctccaggttcgagacgaacttccaa

SEQ ID NO: 40954 - DNA, 621 bp, Oryza sativa
  Clone ID: PAT_MRT4530_44346C.1
atgataaagaagtggaacaaaaatattacaagtaaaccaaatatagccagcacagcagccaaagcgaccagcggttgcctaattcatcctattcggagcacacgcagaaaaagacgcccaatttcacgatattatcgccttcttttttcccctcaagagatgctcgttgcacagagaaaacatgtaaacaatcgaaaataccgaaatgagaaaatgggggagaagaccgtaggccggaaggcgctgggtcggcgtgcggccgtggccgagatgtcgccctactgtacacacgaagaaattcgtacgaagcttgtacgagaactacctcatcactacgtgacttcggtggctggacgcaaagatcaacccacaacactctggattcttcagtacagaaaagccaatatcaaaattgataggttcaatatccttccactcgttcagagcttggctcaaaggtgcagagatagcaagaatagcatcatcaattcaatcaggcataaggagtatatatgctcatgctcaggcctcatgctgctgccacaatacgagcagtatatagccaatactaccagtaaatcagagattgatgcactgatgtacttaaaatatttaaataaa

SEQ ID NO: 40955 - DNA, 1361 bp, Oryza sativa
  Clone ID: PAT_MRT4530_44347C.1
aagaggcaaacttccatgtctgtttcatcaaactgaacatgttcaacgcagtttacaggcataagctaattatgcataaagcttgatgcctgaatacattattcttcacgacatatatttcctatatcccaaattttttaaaaaaacatagtacacgatgtaacattttctaatttatggtactatgatgtatcatatatgtactatgtttatttattttaggatgaagagagtagatagcagatacagtaagtaggacacaacctgaaagcaggttcttcttataaaattgttacatgcatcatggtcgatggctacggttccagcttcattttctttagccggttccttccatcaagctctgctgtgaagtactctgtcagcaaatcctggtagcttattgttttgtatttcactttaccatctttcacaaagtccggcagagggctgatcaccatatcctggcacggatagtagaacagtgccgctgaaatcctctctctgcttggatgtaccacggccctgtgctcaacacttctgaactttccattactcaggatctcaagtgtgtcgccaatgttaacgatgagtgcaccattcagagcattcacggagaaccatttgccatccttgttgatctgcaggccctgtacatcattcacctggagaagcagtgtcaagccacctggatcagtgtgcggtgacaaacccaacaccttgtcagctttcaagcacggtggatagtagttcatcctcaaacccctagcttgcccttcaaatacacttaacaacgacttcggctcaacaccaacggccttggcatgaattgcagcaggcagagtccaatattttctgtctctgaaagaggcagggtaattgggccagaatctcaagtcccttgaatcggtaggacagacttgaaggtatagcatgtctgcccagtctagtttctggttgtcggacacaacgaaggcctgtccataaccttcaaggttattgggcagctgtgagtattccttcttggcatccagtggctgactgaaaaactcaaccaagtcgttcttgagatttgcaatcacttcatctggcactccatggttgatgagctgaaagaacccccaatactggcaggcagatatcagcttgacacactcctcttgtgatgattgaggagaaatcaacttgtcgagatcgatgatcggaatcgacatatcaccgtggttgttcttgatgacctcgtcggaactaacttctggcctgatgtatctttcaggtatctcctcatctatgccattgcaagttcctgcaagctcctgcacattaggcaccgagatagaaccaatggttcttgcttctgccat

SEQ ID NO: 40956 - DNA, 327 bp, Oryza sativa
  Clone ID: PAT_MRT4530_44348C.1
cccggggggactgaaaatgcaggaggggtagaccaaaatgcccctacctacactgatctccaaacatgtgggaatcttcaacatgacaacgcacagggggacatttttctgaccatgccaccaggaggggccccaccaatatcgccgagggggcggcggccacggaacgcgggggacacacccatggggagtaagctaggtggggttaggctgaaggcgatgcgtcaccatggcctcacggcggctgaagtacacactggccgggaacccccatgcgggcgtaagcccaagcgtttgttgatgacctttgtcatcaaggcggtcgac

SEQ ID NO: 40957 - DNA, 1698 bp, Oryza sativa
  Clone ID: PAT_MRT4530_44349C.1
cctaaattatccatacctcccctccgccgtggccaccagccacctccacgaatccaattccaacatctcctcctcctcctccgccgccgccgttgcactacactctacacgtctacacgtgacgaggccaatggctatctgaattttaccggaagagagcaaagcaagagaagagagggcaccaccagaaggggggaaaaccgccacctctacgcgtcgccggagagcgcgccggtggcattttgcagatgtaccatgtcaaattgagtttttgccatcagttgatgatctagtggagcctggtatctacaacaactttacagggttttctttgaactatatctcgaaggagaatgtatcatctagtaatggtatttttgaaccattgtttggtggacaccagagccttcaggaacgagaagagacatactacgcaagaaaccaaaccctccactgtggttttgtgcaaggaccagaggattaccctaatactggatttgatctggatgaaaatgacaagatttatatggcttcctgccgtgttgttgtttcatcatgcatttttggaagctctgattacttaaggagaccaactaagagcaagattggtccatactctaagaagaatgtatgcttcgtcatgttcctggatgagctaacactgggaactctgtcctctgaaggaactggccctgatgaaactggattcattggcctgtggagaattgttgtagttgaaaaattaccgtacaaagatatgcggagagcaggaaaggtgccaaaatttctggctcacagactcttcccctttgcaatgtactctatttggttggatagtaaactgcgccttaatgctgatccaatgcttatcgttgagtatttcttatggagaaataaagcagaatatgccatttcagtgcactatgatcgtacttgtgtctcggaggaagtgcttcaaaacaagcgactgaacaagtacaaccacactgctattgatgagcaattttacttttaccaatctgatggtcttgtgaagttcaatgaatctggcagagagcctgttcttccaagttatgtgcctgaaggatctttcattgtacgtgcccatacaccaatgtctaatctgttttcatgcctttggtttaatgaggttaaccggttcacctcacgagatcagttgagttttgcatatacttacctgaagctaaggagaatgaacactggaaaaccttttcacctcaatatgtttaaggattgtgaacgaagagcgataactaaactgttccatcaccgagctaacgagactgcagatccacctccagctaatccttgatttaagattcacttaccaatatcagggaaatgccttcatttgggtggtacttctgctactcaagccggtgctgctactaccactagtagtgcatcgctctttactagtagggcattggtcaagaattcttcatttgttcagtatgtcctatcccaagctgctggtccttcattgccaggtgaagggagtattcttgatcagggttccctactgctggccagactggtttacccaatctaccacttcagctcacgcagagcatgtcggcttcttctttctcgtttagcttggaggggcatcgtgggctcttttctttagagtcatatttgtgggggctttatggatttgatagtgcacggttgggc

SEQ ID NO: 40958 - DNA, 412 bp, Oryza sativa
  unsure (1)..(412): unsure at all n locations
  Clone ID: PAT_MRT4530_4434C.1
ttgcaatcttcagtntccaggtcttcttcctccagtnntgcaccttcatggtcagggcagaagccactcccctgccaagcaaggtgctgacaggcagctgtggttcgcatccaagcagtccctgagctacctggatggcacgcttccggganacttcgggttcgacccgctggggctatcggacccggaagggaccggcgggttcatccanccacggtggctggcctncggcgangtgttcaacggccggacggngatgatnggcgtcctccgcatggtcnccccnganctcctcggcaagctgggcctcttncccnccganacngcgatccgtggttccagancggcgtgatccccccgcgggcactacacctactgggccganccttacactctcttcctcttccaactc

SEQ ID NO: 40959 - DNA, 228 bp, Oryza sativa
  Clone ID: PAT_MRT4530_44350C.1
atgggtcgccggcctccatcgcaatcgcgacggggtcgcgtgaccggcggcccccgtgaagacgacgtgggcgcgcgcgcgcgcgcgtccgtctcgcgtgcaccagctagcagctgcgcgcgaccaagatcgggttacaacagtcgaccagaaactggtggacgacaactcggcaactggcttgcatgcgccgttgcgtcggcgtctgcgtccaaaagagaaatcgct

SEQ ID NO: 40960 - DNA, 344 bp, Oryza sativa
  Clone ID: PAT_MRT4530_44351C.1
gataaattacccagtatgaatatttcttcagtattgatcttttacatcacaattgtgcagatgtgcctgaaggatctttcattgtacgtgcccatacaccaatgtctaatctgttttcatgcctttggtttaatgaggttaaccggttcacctcacgagatcagttgagttttgcatatacttacctgaagctaaggagaatgaacactggaaaaccttttcacctcaatatgtttaaggattgtgaacgaagagcgataactaaactgttccatcaccgagctaacgagactgcagatccacctccagctaatccttgatttaagattcacttaccaatatca

SEQ ID NO: 40961 - DNA, 1255 bp, Oryza sativa
  Clone ID: PAT_MRT4530_44352C.1
gtagagagcaaagcaagagaagagagggcaccaccagaaggggggaaaaccgccacctctacgcgtcgccggagagcgcgccggtggcatgccggagcgccgcctaccaatatccactccggcggcggccggaccccgccgtcacccccgacggcagcggcgtcactgccgcctactcgtcctcccggccttcgccctcgcgcttgtctccctcgcctacctctccttctcttcccaccccaatctccccttccatgcaaaacatcatgatatggctagtataaaggatgttaaggagagaatggatcaaagacaaactctcgatgctaaggttaaggcaaatttgtctatgactaaagttgagtcggaacccttcaaaagacgaaagaaatctcgcaagcattatgtaccatgtcaaattgagtttttgccatcagttgatgatctagtggagcctggtatctacaacaactttacagggttttctttgaactatatctcgaaggagaatgtatcatctagtaatggtatttttgaaccattgtttggtggacaccagagccttcaggaacgagaagagacatactacgcaagaaaccaaaccctccactgtggttttgtgcaaggaccagaggattaccctaatactggatttgatctggatgaaaatgacaagatttatatggcttcctgccgtgttgttgtttcatcatgcatttttggaagctctgattacttaaggagaccaactaagagcaagattggtccatactctaagaagaatgtatgcttcgtcatgttcctggatgagctaacactgggaactctgtcctctgaaggaactggccctgatgaaactggattcattggcctgtggagaattgttgtagttgaaaaattaccgtacaaagatatgcggagagcaggaaaggtgccaaaatttctggctcacagactcttcccctttgcaatgtactctatttggttggatagtaaactgcgccttaatgctgatccaatgcttatcgttgagtatttcttatggagaaataaagcagaatatgccatttcagtgcactatgatcgtacttgtgtctcggaggaagtgcttcaaaacaagcgactgaacaagtacaaccacactgctattgatgagcaattttacttttaccaatctgatggtcttgtgaagttcaatgaatctggcagagagcctgttcttccaagttgttcgtatcattaccttatgatctga

SEQ ID NO: 40962 - DNA, 249 bp, Oryza sativa
  Clone ID: PAT_MRT4530_44353C.1
atggaaaggaagaaaaggaggggaataaaaacggaagctcagggcggcggcgacacacagggcgcggcggcagcgcatagggcggcagggcgcagtggggaggcgagacaggcaagggcacgcggcgaggttgcggcggccggcgagacatgcaagggcgtggcgaggcgacgggcgcagccggcgaggttgcagcgcacaggcgtggcggcggccggcgattcacgtctccaatactcccaaatactc

SEQ ID NO: 40963 - DNA, 1170 bp, Oryza sativa
  Clone ID: PAT_MRT4530_44354C.1
ccaggaatcagttctgaatgcgaatccatccatccacacgtgcatgatcaatttcagtgcagaatcggatcaaacaaggggacacagattgcacaggcatatggagaagatcaagatagacagatgctactaatattacttgcatatacatatattccttcttctagctagtgaggagggaggggggccaaaagaacagcattgaggaggcactgctaatgctaaatactgtcccaattgacatattttgccaaaacaacaaatcggcagacccgagctaggggccgcctttggctaaatcttttcggttagtggatgttactttcccctggctgagaaaaacaaacttcctccaggatcatattcggcttcggcacgagaagaaggtatcgtcgtccgccggttagaagcttgggtaagaatagggccagagccgagagatcaggatgaggtgatcctggtctcgaggtcaggcgcgaagctgtgcggcatctgatcgtcccaaaccaagccgacctcgtactcgggaacatactcctcaagcttcagaactagctccctggcagttggagccgagatgataatgcgccgcgcatcctccgctatgaatccttcgctgacagccatgtcaatgaaggatagaaaaggatcataaaacccgtcgacattcagaaggccaaccggcttcttgtggattcctagttgggcccaggtgatgacctcaagcaactcctcaagagtcccgtagccgccaggcagtgcaatgaacgcatcagcaaaccgggccatttcagccttcctctcgtgcatgccagagaccgctctaacttcaccaacaggctcaccagtgacctctctgggcatcaaggatttcgggatgaccccgccgagatcccgaccaccgtcgtgaacagcgtgggagacgaggcccatgaggccgatggagccaccgccgtagaccaggtctatgcccctctcgaccagttccttgccgagctcgacggcggcgtcctggtagctggccttcctccccttggcgctgccgcagtacacgcagatccgcctgaaccgcgaccgcctctcccctgcaccaccgccaccgctctccggcgccgccgtcgccgccgcccctgctccggcgctcctctccgccgcagcctccattgccat

SEQ ID NO: 40964 - DNA, 507 bp, Oryza sativa
  Clone ID: PAT_MRT4530_44355C.1
atggcggcgactaggggcggcggacgatcggcggcgaggtgtcgccggcgccttctggatgcgttgtcgggatcgatggagcagagggcgcgtcgccattggtggccaaattcaacgagtggaagtcatctaattgccatcacccctagtgcgttgtcgctacgaaattccgctggtgctatcttcatccgcttcaaacccctagcccgttgccgccgctattggagtcctcaacagctgtcaccgaggatatcctctttcgtcctgactccgaggcctttgccgcccctagctagggccactgccaccgccgggatcggcctcctcctcactaagatccttgtaccggcacttaggccaccgccgcccctagggccgcagttaccgaagctgaggaggtcttctacccggactcgcaggccgctatcgcccctagggtcgctactgcctacgaaaccacctttaccggattcgccttcttcttgccgaggactattcgtcgacgct

SEQ ID NO: 40965 - DNA, 1566 bp, Oryza sativa
  Clone ID: PAT_MRT4530_44356C.1
atggccaccgtggtgagggcatgcatgccgctgccacctgccgccgtcgcctcctcatccgccgctccctccacggacgcgcaggcgcagaggagtccctcctcctccagcgcgcgcgtgctcgtgctcggcggcaccggccgcgtcggcgggtccaccgccaccgcgctctccaagctccgccccgacctcaacatcctcatcgccggcaggaaccgagagaaaggtgaatctttggcatctaaactcggggaggaatcggagtttgtccaagtagatattcgcgacaggaacatgttggaggaagtgctacaggatgtggatttagttgttcatgctgctggacctttccaaagggagaatgagtgcactgtcctacaggcagcaatagcgaccaagacggcatatattgatgtttgtgatgatacagactattcgtggagagcaaagggtttccatgaacaagcaaaagattgcggtatcccagctattacaactgccggcatctatcctggagtgagcaatgtgatggctgctgagcttgttcatgctgctagaagtgaaaatgctggtgaacctgaaagattaagattcttttattatactgcaggcactggtggtgctgggccaacaatattaacaactagttttctgcttcttgcggaggatgtaatcgcatataacaaaggagaagaaataaagttgaagccctacagtggagctctcagcattgattttggcaaaggggttaggaagaaagatgtttacttactgaatttgcctgaggtgaagagtgcttataaggttttaggtgtgcctactgttagtgctcgcttcggtactgctccttttttctggaattggggaatgcaggccttcgcaaactttttacctgttgaattcttgagggatagaaataaggttctaaaattggttggatttgttgatccttttgtccgagctatcgatggtattgctggagagcgtgtttccatgagagtagacttagattgttcaaatggaaagaatactattggattattttctcatagaaagctatctgtatcggtgggctatgcaacagcagcatttgttttagcagttcttgagggcagcacacagcctggcgtatggtttccagaggagccagagggagtagcaattgaatcaaggaaggtgcttcttgagcgggcgtctcaaggaacaacgatcttcgtgatgaacaagccttcctggatgatagagactgatccaaaggaagttggcctgggaatatatgtgtaggggaatagtatgtttccctcactatatgtctatattgaagtttacagctcctaattataattttgacggtgaaatcttagcacttactacaaagttcttgggtatgagtaagagcaagagcgacaaataggacagggcaatgaacaagtaaattcttatccattttcaacaaggcacctctgtctctttgttaatcgcactgttctgaatgtggctgtaaataatagaacgaatttgtaatgctctaagagtatggggtggatgaatgaaatgaattggagc

SEQ ID NO: 40966 - DNA, 342 bp, Oryza sativa
  Clone ID: PAT_MRT4530_44357C.1
atggcgagatacaagtggcagaaagagctccggggtgaagtctctaatgtcactactgctcatggcccactgaaattagaagagaaaccactccctctattgccaattgaactgatctacgggacaagctacctccacagttgtgggcctgtcctgagcctccactgttacaacaattcgtgcacgaagctgactgccgagggaaagagggaaatgggcattggtacatggcggcataatgaagagccattactgccacctcttgtggcatgtcctcaatgtgttgcgctacccctggaagagaagggatgggtctccatgagcacaccctactaccgttga

SEQ ID NO: 40967 - DNA, 1792 bp, Oryza sativa
  Clone ID: PAT_MRT4530_44358C.1
ccacgcgtccgctctaactccactcggctactcttcgccggaggcccggagcggagcgagccaaagagcgaatggccaccgtggtgagggcatgcatgccgctgccacctgccgccgtcgcctcctcatccgccgctccctccacggacgcgcaggcgcagaggaggtcctcctcctccagcgcgcgcgtgctcgtgctcggcggcaccggccgcgtcggcgggtccaccgccaccgcgctctccaagctccgccccgacctcaacatcctcatcgccggcaggaacctggagaaaggtgaatctttggcatctaaactcggggatgaatcagagtttgtccaagtagatattcgcgacaggaacatgctggaggaagtgctacaggatgtggatttagttgttcatgctgctggacctttccaaagggagaatgagtgcactgtcctacaggcagcaatagcgaccaagacggcatatattgatgtttgtgatgatacagactattcgtggagagcaaagggtttccatgaacaagcaaaagattgcggtatcccagctattacaactgccggcatctatcctggagtgagcaatgtgatggctgctgagcttgttcatgctgctagaagtgaaaatgctggtgaacctgaaagattaagattcttttattatactgcaggcactggtggtgctgggccaacaatattaacaactagttttctgcttcttgcggaggatgtaatcgcatataacaaaggagaagaaataaaattgaagccctacagtggagctctcagcattgattttggcaaaggggttaggaagaaagatgtttacttactgaatttgcctgaggtgaagagtgcttataaggttttaggtgtgcctactgtcagtgctcgcttcggtactgctccttttttctggaattgggtaatgcaggccttcgcaaactttttacctgttgaattcttgagggataaaaataaggttctaaaattggttggatttgttgatccttttgtccgagctatcgatggtattgctggagagcgtgtttccatgagacaacttttgtatagaaaatttttgcctgtgtgttttagaagtactagttccttccaaggcttcaagctatttccagagttaactgcatactctttcaagctgtggccagaacaggtagacttagattgttcaaatggaaagaatactattggattattttctcatagaaaactatctgtatcggtgggctatgcaacagcagcgtttgttttagcagttcttgagggcagcacacagcctggcgtctggtttccagaggagccagagggagtagcaattgaatcaaggaaggtgcttcttgagcgggcgtctcaaggaacaacgatcttcgtgatgaacaagtgactgatccaaaggaagttggcctgggaatatatgtgtaggggaatagtatgtttccctcactatatgtctatattgaagtttacagctcctaattataattttgacggtgaaatcttagcacttactacaaagttcttgggtatgagtaagagcaagagcgacaaataggacagggcaatgaacacagtaaattcttatccattttcaacaaggcacctctgtctctttgttaatcgcactgttctgaatgtggctgtaaataatagaacgaatttgtaatgctctaagagtatggggtggatgaatgaaatgaattcggagcacaatacaaccaaacgagggttcacagttttgatgaaaaaaaaaaaaaaaaaaaa

SEQ ID NO: 40968 - DNA, 320 bp, Oryza sativa
  unsure (1)..(320): unsure at all n locations
  Clone ID: PAT_MRT4530_44359C.1
aaaaacgaaccaaagcagagagggganncncacagcacaaangnangnangacanncagaancaangncnnnnnngcncancaagncaagaaagcaaacnaancacaaccacacnnggcccaacaaagagagnacgagacngcncngnngngagncaagagacaccaancaannganacanganangnncacanncaagaangggcaggaagaacaangaggngncaccagncagcgagcggcagaagaagcagagaaccaccgcgaccannangaacaggaggaggagcggcagcgagaggaacaacacgaaccgcaag

SEQ ID NO: 40969 - DNA, 4992 bp, Oryza sativa
  Clone ID: PAT_MRT4530_4435C.1
atgtcaggagacaagcaaactccgccgtcgacgggcaagtcgacagatcctcaaaacaagctcctgaatccaactgggtctgaagtacatgaaggtaacattgttccactcactatagaaaaactatcaccagaaaagaaaaaggatttcgacttaatgatgaagaatgctcacgagcaattcatgaagtccttcgcagaaacctgccggaaagtttaccaaaagtacaaggtgataaaggcacttactggtgaacccggcgacaaaggtgatggttttcaggaaggagtggttgaagatcttggtccagatggcaacgaagtgcaaccacagttcaacaacttccaagatcggattgactacgcagtgcaacatgccttgatcaaccaatcaggagtactagtcaataccttgacaaacatggtaaagtcactggttgatggaacaattgctgaatatcaagctaccgggccagtctatttaccaggtggtgttttcccaaactatagtcctttggttatagctaaccaacaaggtacttccaatatgccaccagttcagctgacggcatcaatttcagctcctgcaccagctgcaccgtcgtcggcacaaaggcaaatgattaatcctcgcttactgaccagagaacagccacaacatggtgggcaaaatgtcaatcggatgactcaggagcagccagatcagtcggttgtgcctcaagtgattcctgaacatttggtggacaatatacagccgaattttcagaattatcagggtggtaatttgaactatcagtaccagcctccttcaccccatgtccagtatcaacaaggaggatcacctcagccccaatttgctcgtcagtctaatcaattcgagccaatgtcacagcaagtgcaaggagtacctcaacagagaccttgggccgatatgattgcagatgtgatgagggagcagtttgggctcaagccaaaggacactggaaacttgtatcggcatccataccctgagtggtttgaaagagtcccattgcctggccgatacaaggtgccagacttctcaaaattttcaggttgggccgatttggagaaacaatttcatagctacttctatagtgggatccatgagatgaaattatttgacctaacagcaatcagacaaaggcatgatgaacctgtgcaggattacattcagagattcagagagatgaggaataggtgctacagtttggctctgactgattctcagctagccgatttggcttttcagggtctgatagctccgatcaaagaaaaattcttatctcaggagtttgaaagtttgtctcatcttgcacaaaaggtgactctgcatgaacaaagatttgcagaggctaagaagaatttcaagaagatcaatcatgtgtgtccctatatgtacggttctgatgatgaagaagaccccgaagtagcagcagccgagtgggtcaggagcaagaaggttgtgccttgcccatggataaattcggctagaattatcaacaagtatcagaggaaatatgacaaacagcaggagaggtgttacgaggaagatgatggtggttttgatcctcattgggactatgatgttttcagattctgttggaatgaaggtatgaggctgccatcgatagaagattgccctggatgcagtgatattgcagaaagttcgagccgatcttacaatagaagcaatcggctgaggcaaacaagggttcctgttcatcagaggttgggcccagtaaaccaagtccataatcaagatgacgatgagggtgtgatgactcaatggtgtccttctggtattttcacaaagaatcagaagaggagggttaagagattgaggaacagggaacgctttcaagaggtggagcaggaaatcaatcatcggctgaagaaagcaaagcccaagcaagagtggcgtgttaaaagccaggttccaacagccgatgaggttgaagctgacagagcaaagaggttggccaaagggaaaagtgttgtaactgcatcggtaaatatggttttcatgttacctgcggaattcggagccaaacaagccgatgtggatgaagttgaagaagcctctactagattgattttgtcgccagagcaggcagtttttgagaaaccggagggaacagagaatcggcatctcaagtcattgtacattaatggttatgtcaatgggaagccgatgtctaagatgatggtcgatggtggggctgctgtgaatttgatgccatatgctacatttagaaagttgggcggaaattcagaggatctcatcaagacaaatatggttctcaaagattttggtggcaatccatcggagaataagggagttttgaatgtagagctgacagtcgacagcaagactgttcctacaacattttttgtcatcgataggaagggttcctatagcctgttgctaggaagggattggattcatgccaattgttgtattccttcgaccatgcatcagtccttgattcaatggcaaggcgacaagattgagatcgtgccggccgataggtcagttaacgttgccagtgccgatttagctctttgggagatggatgagtgtccgattgtgatatacaaccaattgaagatggagagcccaaattattattttgagggcgtcgtggagggttcaaacgtctacaccaaggacacagtagatgatctcgatgacaagcaaggacaaggtttcatgtcggctgatgatttggaagaaattgatataggtccaggtgatagaccaagaccgacatttatcagtaagaatttatctccagaatttagaaccaagttgatagagcttttaaaagaatatagagattgctttgcttgggagtattatgagatgccaggactcagccgatcgattgtcgaacatcggcttcctatcaaaaccggggttagaccataccagcaaccaccgaggaggtgcaaagccgatatgcttgaggctgtcaaggctgaggttgcacgtttatatgatgctgattttattcgtccatgccgatatgctgagtgggtttccaatatggttccagttatcaagaaaaatggcaaagtcagggtgtgcattgactttcgtgatctaaacaaagctaccctgaaggacgagtacccaatgtcagtagccgatcagttggttgatgctgcttcggggcataagatattaaattttatggatggcaatgcaggatataatcaaatctttatggtagaagaggatattcataagacagctttcaggtgccctggtgcaatcggcttgttcgagtgggttgtaatgacttttggtctgaagagagctggagctacatatcagagggccatgaattacatattccatgatttgatcggctggttggttgaagtttatgttgatgatgtggttgttaaatcaaaggaaatagagaatcacatagccaatttgaggaaggtttttgagaggactagaaaatatggcctgaagatgaatccgacaaaatgtgcttttggcgtatcagctcgccagtttttgggttttcttgttcatgagagggggatcgaggtgactcaaaggagcattaatgcaatcaagaagattcaacctccagaggacaagaagaagttgcaggagttgatcggcaagttaaggcattatccattgttcaatgaatgcactatgatatgcaaagccgatgtggttaaatacatgttaccggctccaattttgaaaggaattgttggaaagtggatatttgctttaacggagtttgatctgcggtatgagtctccgaaagtgatcaagggacaagctatagccgattttattgtagatcatcgtgatgactcaattggctcggtcgatattgtgccttggactttgtttttcgatggatcagtgtgcactcacggttgtggtatcggcttagttataatttctcctcggggtgcaagtttcgagtttgcctatactattaagccttatgcaactaacaatcaggctgaatatgaagcggttctcaaaggattgcagttgctcaaggaagttgaagctgatgctgttgaaattatgggtgattctttgttggtgatcagtcaattggcaggacagtatgaatgcaaaaatgatacgttgatggtttacaatgaaaagtgccgagaattgatggatggatttcggctagtaactttgaaacatgtgtctcgagagcaaaatattgaagctaatgatttggctcagggagcatcggggtacaaaccgatgacgaaggatatcaaggtggaaatcgctactatatcagccgatgattggagatatgatatttttcaatatttgcagaatccatctcaatcgacttctcggaagttgctctataaagctttgaaatacaccttgttggatgatgagttatgttatcggacgattgatggggtgttgcttaaatgtttgagtgctgatcaagccaaggttgcgataggcgaggggatgctatacaattcgttcaagagcatattatttaccggtttggtattcctcagaccattacaaccgatcagggctcgatcttcatgtaccgatgagtttgttcagtttgccgatatcatgggtatcaaattattgaattcttcgccatattatgcacaagctaatgggcaagccgagtcatctaacaagagtttgatcaagctcattaagaggaagatttctgattatcctcggcaatggcatactaggttggccgaagcattgtggtcttatcggatggcttgtcatggatcaattcaagttcctccttataagcttctttatggacatgaggcagttttaccatgggaagttagaatcggcttaagaagaacagaattacaaaacgaattgacagccgatgaatattacaatctcatggccgatgaaagggaagatttggtccaatccagattgaaaggattgctaagcattataacaagatggtag

SEQ ID NO: 40970 - DNA, 747 bp, Oryza sativa
  Clone ID: PAT_MRT4530_44360C.1
ctaccaccggctgccactccgatccttagcgccaccgcagccggggccacctcccgccgccgtcgaggtcgccgacagccgacggagccacgccctctcctctgcgcttcctccttttgcctgcacttgttgctgggtcgggctgtaacttaggtaagggatctcgtttgcagtggttttagaaattggaggatacgttttatctgatttttttggttcagggacgattttgtaactcggtaagacggtaacaaggtaagggacctcaggtatactttttcctgcactctgttgctgggtcgggctgtaacttaggtggagcttggagccgggggcctcttccgcgtttgggccttttttaggcggactaaaagaaagcccatatgtaaaaggattcgaaaaactcccaatatagacccgtttataaaaatccattttcacaggtggacgtcttaagaggcatgcctgtgaatatttgcacccgaccggctccatctcttttctttctcctgttaagtcttttcctctcctctctactccatagccctctcccccattttctctcctctcatccatcgactctccttgacgaccgacgatgggagcgaccagcaggcggcaacgcgaggggcagtccaccattggaggcctgcgggaggagagcgttgctgatgggcaccagtgagtgccagtgccataatgggcggattcgccgttgatgactaggtggtggtagtggtgcctcat

SEQ ID NO: 40971 - DNA, 297 bp, Oryza sativa
  Clone ID: PAT_MRT4530_44361C.1
atgaacctcctagccaccaatgtggtaggaatcaaatttccacggagaggaatcaaatttccacggttggaagagaaaatcgccgagaggagcactatagcggcggctagggtttgggaatcggggaggagaagaagtgaggagagagagaccaggctcgggctccccctgggtatttatacccccgacccccggaagttccggactggggtgaccggaacttccggcctgacagaacagagggcagtcaggcccaagttcaatggaatagatgagaattcaaagatttggaaatga

SEQ ID NO: 40972 - DNA, 220 bp, Oryza sativa
  Clone ID: PAT_MRT4530_44362C.1
aaacccacccacccacgcgaaacgaggtttttgagcagcagacgggaggagaaccacggccggctaggcaaggaccaccggaggcatagccagcgatccgccaccgggaggaccagaacagcgcccaccagctggaacgtgagcagagacggcggcgagagggaggcctcctaccacgagacggcggcggaagggacgagcccgccacctcgagcaggga

SEQ ID NO: 40973 - DNA, 576 bp, Oryza sativa
  Clone ID: PAT_MRT4530_44363C.1
atggccgacggcggcggctatggtgcggctccagcggcggcgagcggcggccggaggagtggaaaaggcggcggcggcaggtatagcggcgcggaagcgatagagggcacgggagggagcggtggaaagaggaaaaggtggaggggagtggagggatggtttatatgggctcgggaggggcggacgaggcccggaaaggtggccgatttggccggcgacccgtgggccttcgccgccgccttccaacccctatataaggatccccgagctgtcctctttctgccgccaccctcgccttcgtctctcgccgtcggaagcgctctagcgccgtgtaacctcgagccaccgtcgtcgccgccgctccagccgtgcgccgccgttgctccagtcgtcgccgtcgctcgaggaggtcgccatcgtggtcgccaagtcgccgccgtcctcgtccgtcccttcgccgccgccgaagaccgccggagcaccgtcgccgtcgtcgacccgatctccgccgccgcttcttcctcgtcgccggcgctgtccgttgttcctccgccgcttctttggtcatcgggttga

SEQ ID NO: 40974 - DNA, 231 bp, Oryza sativa
  Clone ID: PAT_MRT4530_44364C.1
atgagctccttcttgcagcgctgcttcctctgccgcagggagctcgccgacggcaaggacatctacatgtacagaggggacagagcgttctgcagcgtggattgccggtgcaagcagatcttcatggacgaggacgccgccgccgccggcggcaactgcgccgcggacataatagtgcccaccaagtcagacacttcttgcataccctctgcggtctccctgacagcctag

SEQ ID NO: 40975 - DNA, 1356 bp, Oryza sativa
  Clone ID: PAT_MRT4530_44365C.1
gcacgagggcgtcgtcctccgcgacgacgcgaacaaattgcgacgcgacgcagcggccgccggagggctagggctagggtttgaggtcgggcgcgcgcggcatggcggggatacggtggccgcccgaggacccggagatcttcccgtcgaggatggtgaccggcggcggcggcgggggcgcgggaggaggaccccccgggcccccgggggagatggcctccgacgacgaccggtcggtggcggcggactcgtggtccatcaagagcgactacgggagcaccctcgacgacgagcagcggtacgccgacgccgccgaggtcctcctcgcctcctcctcctcctcctccgccgccgcctccggccccgccgccgccacgacggcgtcggtcgccgccaacccctccggagatttcagctttgacaaggacgtgccagactccgccgatatggagccgccgttgctgggcctgccgaattatcatcaggatggttcttatgcagaataccttgctaattttcaagaacggagccacacagatgactggtttggcacggagaacatggatgtcctcgtaagctggacgaaaaacttatgttccaacaaggatttgcgtagctgcagtgtactcgacataggaactgggagcggtcgactctcgcaacagcttgcaaagcaagggttctctgatctgactgggatcgaccacagtgaaggtgcaattgaggttgctcgtaatcttgctatccgtgatgggtttgagcacattaatttcttggttgatgatgtgttagagtcaaagttggagaggagatttgaacttgtgatggatgaaggaactctggacacgattgggttgcaccccgatggacctgtaaagagaatgatgtattggcagtcggttgcagggctggtttctcctggtggcatactggtcatcacatcatgtagcagaaccaaggatgagttggtccaggaggtagagagcttcaaccagagaaagctcagtgctatgggctccgaaggtgcgcaggccagtgatactgcggtgttcaagtacatcgaccatgtccaaacgtaccccatcgtggatagttcctgcatcacgaccgttgctttctcgcatagctgaaacatatatgtatgctctctctttttctccctaactttgccatcccagtgtgtatcccctttaccctagttctcttcgggtgatagtctactttgccagataggttattcagttgtaacgttgctttgttatgtcttgaattcttgatggatgtactcttttgaaagcgtgacaagcaacactattacatcagatatgcagaactctgtgctatgaaagctgaatc

SEQ ID NO: 40976 - DNA, 690 bp, Oryza sativa
  unsure (1)..(690): unsure at all n locations
  Clone ID: PAT_MRT4530_44366C.1
attaccagctcagttttttcgcgaacgcgcaaaaggattacacgtcaatatattagaagaaaaagaatttttgttacaagggaagggagaaaaagcaaagccaaaaactgaagcttaggaactactgcggcagctaaaagcaactcctaaacagcgggaaggggcaaagccacgctatcagctcagcttcacatagttcttttcacttagccaaagtagagttattcacactgttccctgaagctggagcaaattagaggattgcatcttccggctgtctttttgatgtcacaaattttcagactatttgagatcatttgcagtatgaggaatctccgatgagcccgctggcatgatggagaagtcctacttagagttgtagacaaagcattggacataaaagaaaaaaaaatcctacagacagagcaacaggatcaacgagtagtgaacctccaatgttgccaaacaagtgatgatgtgttgcttcagatgttcatttgatcagatatgctcagatccttacaacttggcaggtgaatacaaatnggtggatcctgcttacgatatctgaaacaagtttcaacaatcaacaccgatgaaacttccacgtacctctgttggtttcggtctttttgggcttttgtcatccataagaacccaacagtacaatctcttgagcgtgcagcttac

SEQ ID NO: 40977 - DNA, 428 bp, Oryza sativa
  Clone ID: PAT_MRT4530_44367C.1
gacagccaaagggagaccaaatctcaagaacaacaggcccagaaacacccgctccaaaacataatcccccacaaaataccaagagaagacacccccgcctagagccgtggggacccgcctgacaaaatccgactctgctggggaccccgacaaactaagcctggagctagcccaaaaacccctatttctcgccaggggcccggaaccccccgcgcccaaaccgggaccaggggcccatcaaccctgcgctggcacccccccgagcgcaaaacgagaggccccctcaaccacggccagggagaagggggaattaaattattttttgggggttttatataagttatattttttgtttttttggggtcccccaaagacaaaattataaaacccacccccccccccccccggcgaggaaaaagaattatatg

SEQ ID NO: 40978 - DNA, 330 bp, Oryza sativa
  Clone ID: PAT_MRT4530_44368C.1
atggagcggcgggacgcgtacggccggaaggcggtagaatccgacgagcgtgccggcggcggcggcggagacaccggccgttcttggcttcttgcgcgacggaaattggttcgctaccattggttgcgattcgacgtggactgtcaagttgggccaaatctgtcgccacgtccgcaagtaaatgggtcaggagatggggttcccaaccctgatgagcgaacacaacccctagatgtggatagaattgagtgcggtgctcggctattaggatttggttttgggctgttccgctataccttctttgttggtttagcaatgaccggtcacgta

SEQ ID NO: 40979 - DNA, 1087 bp, Oryza sativa
  Clone ID: PAT_MRT4530_44369C.1
atgggttcaagagatggattctttaacaaactcctcaacgacttcatatgctggagtacatgccccgacaagatcggaaccatcatcgtcatcgacaacttggtctatcgagatcacccaagccttaagatacgcggcgtaccaaaagatgtcagatcatatgatgtcgaacgagtacgcaataaggaacaattgagcattcaattaggttgtggtcaaacacacacacattatcgagaacgttctcgataaatgtggagttgtcacacccaacctaccaacgaagaccgatgacctatctcatagcaccggccatagatgggctattcgagaaaagcacatgtaacaaaccaactctagcaacttccattggtgctcaagagataattctactcgctggttctcgaaccggtaaatcatagcaatctctcgcaccgcagcttcaattggtgttcgagagataactctactcgctggttctcgaaccgcggtcgacttatggctacacctggttcttgaccagcggtgtagcaatactcccactacctttacttctagtggtcgagttaaggctacacctggttctcgaccagcggtgtagcaattctcccactacctttatttatagtggtcgagttaaggctacacctggttctcgaccagtggtgtagcgattctaccactacatccacttcaggtggtcgagttaaggctacacctggttttccaccagcgtggccgagtaatgactacccctgcttctcgaccagcggcgtagcgattctcccactacctctactccaacaaagttgatatcaggtacataatatcgccaagtattttgcccagagatcccttaccacgataacacctcgagttgaaaccaatcctactgtccctttacgccgccctggcaaggcctccgaggaacctaagggaactttcgctggggacgcccagagcagataaggccttgtcaggtaatgcagagacgaacgaccatactctgcgccttctcgatcactcgagaatggctggtggatctcgacaaggaatacagaatgaagagatagtgtacccgccaaga

SEQ ID NO: 40980 - DNA, 972 bp, Oryza sativa
  Clone ID: PAT_MRT4530_4436C.1
atggctgagaaaccaccaccatcaccgtcttcggctggtaaaggatttcctcctaagactgataatcaaaagtttggtgcatctaaagttaatgagggaaatattgttcccatcaatttaggtaaactgacaccggaacaaaagacagagctcgaacagatgatgcagcaaacacaacaccagttcttaaactcgttcatggagacccgtaagggaacagttgttcagaagtacaaaatcaaattagtaactgatgttcctgggatagattcttctaaggatggagaagtgcaacaagccccggctggtacagctgaaacgggaaaccaaggcattccagagggctcaggagataaagataatcagccagctacttctaatgtaccaccagttcagccgactgcgccgatattagctcctgcatttgctgcaccagcatcggcaccagggcaattgatcaatcctcggttgttgcctaccgttgatccagcacagcaccaaccgattcagcagacgccatcgaggcaacaggttatccagccgattcaacagacaccaccaaggcaacaggctattcagccgattcagcagcaaggttcgctgaatgcatcggctgggttgatgacgcctggtaatcagccaaggcagcatgtcatgactcaagttgtccctgagaatttggttcataatgtgcaaccagatcaatcagtgatacctcaagtcgttcctgaacatttgatcaatcaattcaagcccatgccgcaacaagtgcaaggagtacctcagccaagaccatgggttgatatgattgcagatgtaatgagagagcagtttgggcttaagccgaaggatgctggaaatttgtatcggcatccataccatgagtggtttgagagagttcaattgcctaatcgatacaaagttccggatttttcaaagttcttgggggcaggacagtgtttcaacctatga

SEQ ID NO: 40981 - DNA, 436 bp, Oryza sativa
  Clone ID: PAT_MRT4530_44370C.1
ttatgactgcaatatgtgcttgaaggcacttgctgatgcttactcaaacgcagcgatgaatgactgcggcagcgatatgcatggcgggcctgaacgcgctactgggcctgtatacatgagcctgcgtccagataacgtgggacgggctaacatgccagagagtgcggctccagttccgatgggggcttatggccatagtcggcaactggctccaggtcgtggacgaccttaaccaccgtaacctgatggcgctggcgcggcggttcggcgacatcctcctcctccgcatgggcgtccgcaacttgggggtggtgatcagcccggacctcgcaaggaggtgctccacacccagggcgtattgttcggctcccgtacccgcatcgtggtgtacgacatcttcaccggtaaggggcaggacatggtgatcaccgagtac

SEQ ID NO: 40982 - DNA, 601 bp, Oryza sativa
  Clone ID: PAT_MRT4530_44371C.1
cttctctgtcggtgtgggtgagtacctgtctcccctccttcctcctctcctttcccctcctctattcttccctctcaaagacagatagatagtcatactctccccagctgaggattcattcatgaagggagtcaaatccaagggcgccatcaagtccgacgccatgttgtgtgtgaagagtaaaggcgtggacaatgccgccgccaagggaaggaaggggaaggccggcaaggaccccaactagttcaagagggctccctccgctttcttcgattttatggaggagttccgtaaggagttccaggagaataaccccatgaataaatctgttgctggtgtaggaaaaacaaccggtgataggagtaaatccctgatcgaagtgcacaaggctccctatgtatactatggccaacaagtctcaaggccgagtacaactaggccattgctgcctacgacaagggtgtagagcactgtaccagaaggtacccgactaagtacgtaataggattgaccacgaggaggaatctgacaagctcaagtccgaggtcattgatgagtatgacgacgaggtcagcgcataggttgtcgactatgacgagtg

SEQ ID NO: 40983 - DNA, 1752 bp, Oryza sativa
  unsure (1)..(1752): unsure at all n locations
  Clone ID: PAT_MRT4530_44372C.1
atgaacgccgccggagatacggcttcccctgctcttacgccgcgtgagccctgcagatccaagcccgcctacctcctccccgtcgggccccgcccgtcgccgccggccgccctgctccgagtgagcgcgatgggagggcggcgggcgagcgcgacggttggtccgcgcagtagccgagcggcggtaggtgagcgcagctgtgggcggaacgacggcgggcggagcggcgtcgggatgcgggcagagcagcgatgggcgatggtgggcgagcggaaggcaagcgcgacgggctgcgagcagagcggacggcgggcgagcggacgagcacggggggcggaggaggggggcgcaacggcggaggtggccgaagcaggaacgtggcggcagtgggcgagctccgcgcggcttactctgccagtcgcgtcggcggcggcggcgagagtggcgcgcagagcggacagagcgaacgagcatgtcgttcttgccgctagttccccccgccaagccgaccgacgggtcacggcgtcacgccacgcacgagacgctggcgtcacgcgagacgggcgggtgcgctacgaggagggaggggacgaggcccacgaggcgccaacgggagaatgcgctgcgggcggcgggggaggcgaagagtgcgggtggcagggggaagcgcagtgcgcgggcggcggggggaggagcggcgcgcgggcggcgaaggagcgactgccgacggcggaggagcagcgcgccgggcggcggcagacgacgcccgagtcaggccgcccacgcgtgccgagggcgacgtcgtccgcagtcacggcgacggcagcccgggtcgatgaaccccgcctcggcgtcgtccgcgttgctgtaccgacgctggactacgagcaaagaatagcgctgcggtggagcagcctgtaccggcgcatcgtggtggggcacggtggccggccagtgaggcgcacactgaggacctgggatgagggcgagcgttgcctcggcaatgattcctggtacgtcacaagcaaagcatgtgcaggatggccggagtggcaggagacgctgcagccggcgccggggatgccatcgctgcacgcctgcacatgtcgcttttgtcgtggaacaactctggcgcggcggaacggtagcacatcatcttcgatctcgccctggttcgagtcaattcatcactagtcttatgatgtgtaagagtacacatagtccttccagctacaaggtcccagaacttgatagttgaatcatgtgagcccgtgacaacttgtggatccgtaggacgagcaaacactgagcatacggtgttatcatgaccagttaaagcagaaacatgagctttcgttcggatgtcccagaccctacaagctaatacgcagaccgccagctcacctcanacgtcgactgctnncanctacagccacccccccnnccccggaggtgttgagcttgtcgggctcgaaggggagcttggggtggcgcgcctcgtggtggatctgcatggacttgatgtcgggggcggtggtcttgcagagagggcactcgagcttggcgtggccgcccttgtcctgccccagccggtccttctgcccggccttcccgccgcccctgttcgtcgtcgccgcgtcgatcttcgccgcgatctccttcgccgtgtgcttcttcggcttcgccttccccgtcatctccgcgcccccccgccgccgccgccgcggttgccccctcctgtctactctccgc

SEQ ID NO: 40984 - DNA, 458 bp, Oryza sativa
  Clone ID: PAT_MRT4530_44373C.1
atgaacgccgccggagatacggcttcccctgctcttacgccgcgtgagccctgcagatccaagcccgcctacctcctccccgtcgggccccgcccgtcgccgccggccgccctgctccggtggtgtcgctgctcgccgaggcggaagagagagggggaagcagccgctgtgacggcgcttcgcgaaccgcgaagtgagcgcgatgggagggcgggggcgagcgcgacggttggtccgcgcagtagccgagcggcggtaggtgagcgcagctgtgggcggaacgacggcgggcggagcggcgtcgggatgcgggcagagcagcgatgggcgatggtgggcgagcggaaggcaagcgcgacgggctgcgagcagagcggacggcgggcgagcggacgagcacggggggcggaggaggggggcgcaacggcggaggtggccgaagcaggaacgtggcggca

SEQ ID NO: 40985 - DNA, 596 bp, Oryza sativa
  Clone ID: PAT_MRT4530_44374C.1
ctagaaccccttccccagagtcccaaaacccccctttctcctaggcctgggcctcctttttatctggtcaggggtcaccacatgggcctctctcttggaagaaaggcacagcagtacagcagccagcagcctcagctccctcgccaagcagagagcgcgaggaagaagaaggaagaaggcgcggaccgggatccccccgtcgggccccacatggccgcgccttgagccccgccccgtcccgcccactccggacccagggcaccgagatgccgccgcggcgagcggcgctgctcctcctcgctctcgccgtgtatggtatgttccttcaagattgtgtgtttcttttcttttttttttctttctacccgctgttcttcttgcccggccgggcgggcgatttcttcggggtttgaggttgcaatgcggagtggaattgttgtctggtttgtttcgttgcaatgggatcgccggcctggaagaagagcggtcatggctggctggcttgcgtggcacgttccccaggggttgtggaaagatggtttcgcctttgcttcatggagctgttcctcctgtgattcgtccgagcgcatcggcat

SEQ ID NO: 40986 - DNA, 303 bp, Oryza sativa
  Clone ID: PAT_MRT4530_44375C.1
atggttgtcaaagcagcgttcgcagttgccatgtttttgctcacaaccaatatgctcgtttctgttgccacacggtctccggataacctcctaaactcttttcctgaagaaacgggtcacgtctactcagcgtcaactgtgcagaagatgaccgaatacaagcccacgactgctcacgaacctgctaaatcaaccacagcttttgctgcatgcgacgtcgctgagatgatcaaaatatctttctatatctgccattttctctgtattgtcgaactgctgatgaactatgctcggaacgcttaa

SEQ ID NO: 40987 - DNA, 414 bp, Oryza sativa
  Clone ID: PAT_MRT4530_44376C.1
atgcggaggcgcgcagatctggtggcgttcgggggtgggattggccttgcggcgcagcggcggagaggttggggatcagcggcggtgcatggcgagatccgcgaggcggagaggatgggtggggatatcagatggacgaactggacgagaagaagagcaggaagggggagaggtagtagacgacgtggcgcggccggcgggttcacggtcacgggtcgcggccgctttccagtgtcgcagcctcgcacccagtcgcaggcgtttggactttggtgccgcggtttgggccttcgcggcgcattgcgcccgttaaggaagctgactaacaagttgggcctggtggcccatgtgacagagacagacaacgaacaccaattcaacgagcaggaatatacacttgttggccaggcatga

SEQ ID NO: 40988 - DNA, 243 bp, Oryza sativa
  Clone ID: PAT_MRT4530_44377C.1
atggacttggtgcaccagaggtggtccccaatgtctagcccctcggtccaccgtgagtggggtgcatcgaagggtctcaatgggaacaatgaggagtcgatggcagctggcttggtgacatggaggatgaggcggctggctcaggtcgatgtcaaggaggagggagggggtccagggtgctctgagcccggggaaggtgcagacggggaagaggaggaggcagcgaagacaacggtggcctag

SEQ ID NO: 40989 - DNA, 573 bp, Oryza sativa
  unsure (1)..(573): unsure at all n locations
  Clone ID: PAT_MRT4530_44378C.1
cggaacntgtacatgaacgcgtnggcggctccacctccgcggcggcgtaatccatccaactcgcaatagatatacagtccccccaatcgacggaaccctaattctctcccgcacgcgcgtcggcgatccgaggggaagtagggtttggaggaggaggaggggagaccaccggaggtaggcgaatcccccaaggccgggcaagatggtgctcgcgcagctcggcgggagcatctcccgcgcgctggcgcagatgagcaacgccaccgtgatcgacgagaaggtgctcagcgactgcctcaacgagatctcgcgcgcgctcctgcagtccgacgtccagttcaagatggtccgcgatatgcagtccaacatcaagcgcatcgtcaacctcgagacgctcgccgccgggaccaacaagcggcgcatcatccagcaggccgtcttcacggagctctgcaacatgttggatcccgggaagccttccttcactcccaagaaggggaaacctttgcgtggtcatgttcggtggtttgcaaggttctggtaaactactacttgtaccaatatgcatattat

SEQ ID NO: 40990 - DNA, 267 bp, Oryza sativa
  Clone ID: PAT_MRT4530_44379C.1
atggatgaaaaaggagagctcaccggcgagcgagggaaacggggcttcgggggtgattggcggcaaccaagcggcggccgaggagcggacggcacccgcgagcgcgacgacagcggcttcatggcgcggcacgtctctagcggcggtggcgcgcggccggagacggcggtgcgggagggggcggacgtggccggggaggtggccgatttggctggcgacgtgggggatgttttctgggattatgttacttttgctcgtgctcattag

SEQ ID NO: 40991 - DNA, 3531 bp, Oryza sativa
  Clone ID: PAT_MRT4530_4437C.1
gctccgattaaagagaaattctcatcccagtagtttgaaagcttatctcaccatgcacggaaggtaactctgcatgagcaaaggtttgcagaggccaagaagaatttcaagaaaatcaatcatgtgtatccttacatgtatggttctgatgaagaggatgattccgaattgactgcggaatttggagctgaacaagccgatgttgatgaagtcgaggaagcttcggctaggttggttttgtcactagagcaagcagtttttgagaagccaaaagggacagacaatcggcatctcaaaccattgtacattaacggctatgtcattgggaagccgatgtctaagatgatggttgatgtggggctgctgtgaacttgatgccatatgctacattcaggaagctaggcagaaattcggatgatctcatcaagacaaacatggtgctcaaagattttggtggcaatccatcggaaacaaaaggggttttgaatgtggagctgacagtcggcaggaagggttcctatagcttgttgcttggaagagattggattcatgttaattgttgtattccttcgaccattcatcaatgcttgattcaatggcaaggcaacaagattgagatcgtgccagtagacagccaattgaagatggagagcccaaattattgtttttagggcatcatggagggttcaaatgtctacaccaaggacacggtagatgatctcgatgacaaaaatttatctccggaatttagaaccatgttagagttgttaaaagaatttggagattgcttcgcttaggagtattacgagatgccaggactcagccgatcgattgttgaatgtcggctccctgtcaaaccgggggttagaccatatcagcagccgccgaggagatgcaaagcctatatgctcgaacctgtcaaggcagaggttaaacgtttgtatgatgctgggtttattcatccataccgatatgctgagtgggtttccaacatagttccggttatcaagaaaaatggcaaagtcagagtgtgcattgatttccgagacttaaacaaggctactcgaaaggatgagtacccaatgccggttgccgatcagttggttaatgctgcctcaggacatgagatattgagttttatggatggtaatgctggttacaatcaaatctttatggcagaggaagatattcatatgacagcttttagatgtcctggtgcaatcggcttgtttgagtgggttgtaatgacttttggcttgaagagtgctggggctacatatcaaagggccatgaattatatattccatgatctgatcggctggttggttgaagtttatatagatgacgtggtggttaagtcaaaagaaattgagaatcacatagccgatttgagaaaagtttttgagaaaactagaaagtatggcctgaagatgaacccgataaagtgtgcttttggcgtatcagctggtcagtttttgggatttcttgttcatgaaagggggattgagataactcagatgagtgttaatgcaattaagaagattcaaccaccggaggacaaaacagagttgcaggagttgatcggcaagataaattttgttagaaggtttatatctaatttgtctggaaggttaaggcattatctattgtccaatgaatgcactgtgatatgtaaagccgatgtagttaagtatatgctatcggctccgattctgaaatgaagggttggaaagtggatatttgctttgacagaatttgatcttcggtatgaatcaccgaaggcgattaaagggcaggctatagccgattttattgttgatcatcgtgatgactcaatcggctcggttgaaattgtaccttggtctttgttttttgatggatcagtgtgtactcatggttgtggtatcggcttggttataatttctcctctgggggcaagtttcgagtttgcctatactattaagcctgatgcaactaacaatcaagctgagtatgaagcagttctcaaagggttgcaattgctcaaggaagttgaagctgatgctatcgagattatgggtgattccttgttggtgatctgtcaattggccggggaatatgagtgcaagaatgatacattaatggtttacaatgagaagtgccaagaattgatgaatggatttcggctggtgactttgcagcatgtgtctcgagagcaaaacgttgaagctaatggacttggctcaaggagcattggggttcaagccgatgatgaaggatgtcaaagtagaagttgctacgataaccgccgatgattggagatatgatgtttttcaatatttgcagaatccatctcaatcggcttcacgaaaattgcgctataaagctttgaaatacaccttgttggatgatgaattgtattatcggacgattgatggggtgttgcttaaatgtttgagtgccgatcaagccaaggttgcgataggagaggtacatgaaggaatttgtggcacaaatcaatcggctcataatatgaagtggtctcttaggcgggcaggatatttttggccgataatgttggaagattgtttcaaatattacaaaggatgtcaagattgtcagaagtttggagcaattcagagagcaccagcatcagctatgaaccctatcatcaaaccgtggccattcagagcttggggaattgatatgatcggtatgattaatccaccatcgagcaaaggacacaagtttatattggtggcaaccgattactttaccaagtggatagaggcgattcctttgaagaaagttgattcgggggatgctatacaatttgttcaagagcatattatttattgatttggtattcctcagaccattacaaccgatcaagtctcgatcttcgtgtccgatgagtttgttcagtttgccgatagcatgggtatcaaattgttgaattattcgccatattatgcacaagctaatgggcaagccgaggcatctaacaagagtttgattaagttgattaagaaaaagatttctgattatcctcggcaatggcacaataggttggccgaagcattgtagtcctatcggatggcttgtcatggaccgattcaggttcctccttataagcttgtttatgggcatgaggcagtgttaccttgggaagttagaatcggctcaagaagaatggatttgcatgaccagttgacagccgatgagtattataaccttatggccgatgaaaaagaagatttggttcaatcgagattaagagctcttgcaaaagttaccaaagataaggagaggattgctcgacattacaacaaaaaagtagtgcccaagtctttttcagaaggtgaacttgtttggaaattgattttgccaatagggactcgagataacaaattcggcaagtggtcaccgaattgggaaggaccgttccaaatccataaggttgtgtccaagggagcttatagagaagtttatggacgagcgctaaacggcaaatacttgaagaaatgttacccaagtgtttgggttcataca

SEQ ID NO: 40992 - DNA, 398 bp, Oryza sativa
  Clone ID: PAT_MRT4530_44380C.1
gtttatttctctcaaatctgacagctcactgcatcaatggccgtggccaccatggcgctctccttcccggtgatggcccgggcggtgccttcaaccttctccgcgctcttcggcgaggcacgtatcaccatgcgcaagaccgccgcgaatcccaagccggtagcgtcgactgggagcccgtggtacggggccgaccgcgtactctacctcggcccgatatccggcgagccgccgaactacctcaccgaggagctcccggacgactacgggagggacaccgtggggctctgcgtcgacccggagacgttcgccaagaaccgggagctggaggtgatccactcccggtgggcgatgctgggcgcgcttggctgcgtattcccggagctcctcgcccggaa

SEQ ID NO: 40993 - DNA, 882 bp, Oryza sativa
  Clone ID: PAT_MRT4530_44381C.1
ctcccctcgccgccgtctccactccaccgccaccgcctgcagtgtcgcccccacccctcagccaccgcccgcctctgtcctcgacgccctcagcggtctccgccaccgcccgccacaatcccaccaccccaagctccgtccgccccgccgccgttcgttccatgcgtgccgctgcctctccgccatggccgccgccgccgccgccagcgctcgagcgtcgtcctcatcgtcgtcctccactcctccgtcaccttcctcgtccgcgtcaccctcatccccgccgtcaccgactccgcgtcccccgccgcccccgccgccattttgtcccccgcttgccgccgccgctgccaccgccgactctgctctgtcccccagctgccgcccgtgagagagaggaagagtgggaggaaaaaccctaatcctagatccgggcaccccgccgccaccgttgctagatccgggcggggggcagtcgccgccgccagatccgggcggggggcagccgccgccgccggatccgggtgtggggagggcgcgccgctcctagccgcctccccggctgccgcctcctcatcgtcatcgttgacagcggccctcgtctgcccgctgccgcctccccacagtccgcccgctaccaccgagctagccaccgcgtgcacgctgctctcgcccgccaccgctgtccaacgccacaccacgttgcaacaggcccaaccaaccacctgaacaccctccgcataaccctcccctaaccatccacaccacgctaaggtttcacccccacccctcaaaaggcagtgggcggtcccctgttgcgccgcagtgaatccggcagctggacagccggacaccccggccgacccaattccatcacgcccaccc

SEQ ID NO: 40994 - DNA, 209 bp, Oryza sativa
  Clone ID: PAT_MRT4530_44382C.1
aagaaatatctaacccccactaaatggtgatctagaggagaaattatacatgatctgatgcgatcactatctcatgccattgcacgccagaactagttatcagctactagctatgaagcaagccagctaagcctaatgctggccagcggggaagaatctgttctgtaggggctcaacccggcacatcgacggcagctgcgccgcgtact

SEQ ID NO: 40995 - DNA, 388 bp, Oryza sativa
  Clone ID: PAT_MRT4530_44383C.1
ttgggtgttttttatttttttgggggtttcttcttttttttttttttttttttttttttttttttttttttttttttggacccaaaaggccccaaggcatttttaacaacccggccccaaacaaaaaatttcaattaccccgcccattattccaaacccccaaaaacaagaattaggttaagaacaaccttttcaaaataaaataaatttacacatgggggggggacaaatgaaaaaaaaggaacaaaagggaaaaaaaagaaaagctaaggaaggcctgcccatggttagcttcccagaccatgggggcccaccccccttttcaaaggggggcccaacaccgggggggagcccgggaacccccccaaacctggccttggggttgggg

SEQ ID NO: 40996 - DNA, 922 bp, Oryza sativa
  unsure (1)..(922): unsure at all n locations
  Clone ID: PAT_MRT4530_44384C.1
gacatctctgcagctgaggaacctgctgtgggctacttccaagcatgacgtgtatctgatgcagaactactctgtcatgcactggtcttccctgctccagagaggaaaggaagtgctcaatgtcgcgggccaactcgctccctctcagaatgtccggggagctatgccgttgtcgcgggtgcagatcagtaccatggcggtgaaaggcaacctcatggtggccggtggtttccagggtgaactcatctgcaagtatgttgataaacctggagtggcgttttgtacgaatctgaccgggaacaacaattccatcacgaatgccgtggacatctaccaggcaccaaatggcggtactcgaattacgaccgcgaacaacgactgcgtagtcagaactttcgacaccgagagattcagcctcattagccactttgcctttccatggtcggtcaataatacgtcggtgagccctgacggcaagctgctcgcggttcttggtgacagctccgactgcctgatcgccgattcacaatctggcaaggaaatggcgaggctgaagggtcacctggactactcgttctcgtcggcgtggcaccccgacggccgtgtggtcgccacggggaaccaggacaggacgtgccgggtgtgggacgtgcgcaacatgtcgcggtcggtggcggtgctggagggccggatcggcgccgtcagggggctccggtactcgccggacggccgcttcctcgccgcgtcggagcccgccgacttcgtccacgtctacgacgccgccgcgggctacgccgacgcgcaggagatcgacctgttcggggagatcgccggcgtcgcgttcagccccgccggnaataatggcggcggcggggaggcgctgttcgtcagcatcgccgaccgcacgtacggcagcctgctc

SEQ ID NO: 40997 - DNA, 2225 bp, Oryza sativa
  Clone ID: PAT_MRT4530_44385C.1
tttttttttttttttccaacaaaaggtactcttattatcatcagcaacaagtttctcaaagaaaagattatcagcaacagtagaaggtaaaggtaaggcgacgctgacgctgcagatcacggatacatgatacaccagtacaacaccgattgataaagatctcatccccaaatagaatatcaaacactcagcggcatactcttagtgagtgtccgctggggtcatcacagtaggcaataggagtctcatctctccacttactaagatttcaggacttttaatttaaagtttcacaggactctacccactgttccaaaaacagcgacaggaaaccgtatgcaagcgcatcatcatcttaaggcagcgtagtgacatggtacggtatgttacttaaataaacccccccaaaagaacaagaagcgtatctcagctcctccacttcatggactcggtgcattgtggcgagagttgggcttcaaccttcaatcatctgatgccttcggggagttctcgggtgtcttgagtgtgccggacgcctttttcgccttgtgcatctccaccgcagctttgaactcctccctgatgctggtatccctgaacttcagagcaaatgtggcaagcccgctctgcgagtcgccgatgctgttcatacaggcaaacgtcacgcccttcttgtccatgtccttcagcgacatgtcctcgtaaaggcttgcgttaagaactagcctgtaattgcccttggttctcatgacgagacgagacctctcgccaccagatactgggatgttcaactttagttccccctttcctctttctttccaacccccatccaagtattcatacaatgctgagtcggctgtgaatatggccttctcattctcttcaccagtttcaactgggccctctggcatagcaaatttcttgggagcttctgccgaagtcgcaagcgcaggggaggaactcccattattcgaagcaccaatactaaaagatgggaatgatgagccatcagtctttagcccaaacaggggagcactcgagctttctttagagcctgatccaaatgaaaatgaagagcctgaaaatccagttccagccagtcctgtgaaggcattttggccactcgacaggttcttgaaagagaaaaggggtgttggtgatgacgactgccccttgttatcagcatccttctgctcctcagacgatccatcctttgtctctgattcatctccatctttcttctcatcatcacccttgctaattttgtcttcagctccagcctcatttgctccatcctcttcttcagcatctccctcttttgctgttttgtcctcgatatcagatgccttgctgttatcttccttggcctctccagctaccactgatccgccccccaagtcttttgcttcgtcagtggtctcaacaggttgagaaggtggttcaattgagtcactggacttggctttttcatctgatcctttcagatctgatccatccttttctgtctcagctacctcactagaacctgcactcttgtcagttacaggtaaagcatctttcccactgccattgcttccctcatcagctttctcacttgaactatcctttgcattcgctgtaatgacatcagaaggttgaggctctgagacagggatagttgcttgggcgctggtatcactgggggtaaatctgattgcagagaaaggattagaaggagctgatgagggctgctggcgtcgaacctttacaattctccgtgttgccatcacttcctcactagctctcttaaatgtccccatctcttgctcagtggagtcatcatcaggctcaggattatccttgttgatttgggtacctgcaaccctcttcctagacgttggagcatgctcctcgtctgccatttcaagttcctgagcttaacagatacgggggtcgacggcggcgtacggagtgaccacgggccgcggtccaacgtcgtgccggacgggcggctggcggatggcggagcgtggcggctgagaggcccgggtggcccgcccgacgctcgcgtagtcgcagaactcgaggacctcgccgacggcgcagccctgtggcaggaactgcgcggcgagggcgcctgctgcatcctgcatgtcgacggcagcggtctgtgccggctgctgctgatgatgatgtggtggtgacgctcggaggacccatgggcggggcgtggtggtcggagtcat

SEQ ID NO: 40998 - DNA, 295 bp, Oryza sativa
  Clone ID: PAT_MRT4530_44386C.1
gggtggcggcgccgacaagcaggccacacatgccaatgaatcaaggcgtgccggtccacggtggaccaagtccacgggaccgggaggggaagcgccgcgcaggcggccacgtgggcagcgacagatggccctgatctaccgcacgcaatggagaagctcaccagtgcacgacgaaagatggcttccggtggcggatttcgacgggggaggggtggacggcgtggccctcgggctcgcgaacccgacggtggcgacggcgaggcttggcggcggctctaacggcggtgagcggtga

SEQ ID NO: 40999 - DNA, 450 bp, Oryza sativa
  Clone ID: PAT_MRT4530_44387C.1
atggcggcgcgggcggtgcgtcctgaccccaaccacgatcagcggcgagtccgcgaccgcgagcgagacgcggcaccaccggaccaccccctcccgaaccaagcaggctgctcctcctccctccgaacggcgaccaatgcagcggcggcggcggcggcgatcgatcgatcggcgcggggaggggaggatgcgccccccagcgacaccgcgcctccgcccttatccccctctctattgaaccccccgggattccggggcgctgcctgccgccgcaatggcggtttgctgctgcttttgcctttgctccgcttcctccttccttcgcaagccacacgcgctccccaagagagagacaccactcgaggggaaatgcaaataaaaaggaggagcgtttgcttcggtagcgccgcgccaccgcgtcttccggtttctgatttgcgggcccattag

SEQ ID NO: 41000 - DNA, 2706 bp, Oryza sativa
  Clone ID: PAT_MRT4530_44388C.1
tttttttttttttttttttttttttttttttttttttttatcagaggggggaaaaatacatgcttattatactagatcatcaattaatttaccagcgtatcctctcagcggccgtgatcagtacacacggtactgtatgtataacgaatcaaatgaaatcaatcggggccgggcatcgtacaaaaccggaacaagattatacattcaaatgctacaacagcgtatgatcaagccacgtggggaaaaaaatgtgtaacaattacacaagagatattagacctcttcacactttttttttaatactccatttgattgtttctcattaagccttgttctgctttgttttggcaatgctaagaagatctccaaacagcttgtcctcaggcttcgatggttgccccatggaagatgatgatgaaggtgttgtagagtagggcgagctgttcatccccatgtaagagctgtcttgcatggagaggccatacattttctgggagaggtcattcataccagcgtagtatgttggcctcccttggctgttgctgtagtattgtgccgcttgctgctgcacaagccggtactgggacatctgggggccatacattcgtggttgcggcatggctgcaaactgcatacccggcatcatcatcggttgcgcatacatcatgactggctgcgctcctggcatcggcgaaggttgcatcccggggaattgcattcctggcatggagtgtggtggcatcgaaccgaattggttcgcaaagcctgattgcatctgggttacagcaggttggctgggttgcatggctcccggttgttggttgttgtacatttggtgggcttgtggacctcccatctggttcatctgcgggtgcaagggctgcatcccacccatctggtttgatggtgttgggagagatggcatacctccaaattggccgtttgacaccgggtgagactgcataccgccatttgacatgtcgccgcttggcgctgactgagcttcccaaggaggtgggggaagggctccactttgctcatcataattcactgtttgctgcgctggaggcgtcgcattgttcgcaatttgaccattccacccagaacttgtggggtatgatgttccagggttcacagctcccccattaggatagaggcccacctgctgaggctgctgctgtgcttgcagaggatgctgggttggagcattgtatggctgtgatccaggaagagtagagctagaattaacaccaaagggatccgcaggtttggcaatgttattggttgtgttgttttgagagaatatgtcaacgatagctagtgcattttgacttggagtagaatcaactactggatcagtaactgggacaagcgctagtgaattttctgttgtagatgggttgtcatcccagctaagaagatcgacgccaagatcggattttggtgctggggttgctgagccatttgacaccggaggtgctggaagcgctagttgctcaaatggtgactgcacactggcactttggcttggttctttattagtctcttgggttgtaggatcctcaatatctacaagtgcctgctctttcttagagtcttggttcatagaatcctcagtgtctacaagtgcctgcagagacttaggtttcttctccactcgaactgcaatgcctgcagcaattgcatcgtgttttgcgagaacacgttgcaagtcatcattcagtgcaagcccttgtgacataagttcctcatccgcggtagcattaactagtagtaccactctctgcttgtaagtgcgacactgatcaacaagctccacaattacctcctgccttagtccctctctgtttccagggtctaaagcatttagcatctcggctagcacatccattataccacgagcattctgaatctctgacatgctcaaagcaggaaaatcatttccagcagacgattcagcttcatcctgctgatcaggactacgcatatttctgcctgctggagactggccattaaacaatggtgcaggtcgatcagatctctttggaaatgcagctccagcacgcaccaagtcatggtacgctgcatagtactgtggatatcttgcacgtggtcccccgaatgcttcttgccatgtatctatcatagttaataccttctctttgacattctgatcagactttttcttcactatcttcaccatctcatgcaacacatctctttctgcaacatgcatgtggaatatatccccacagttcttgattgcagtttccaagagagtcagcgcaagaatttggacttttggatttttgtgcccaatccttttcttgagtgccttaacaacatcttttgattgcccggggtcgcggttgcagatgtcgcagatctccatgttcttggcccagtcgggcccgatgagcatgtcgctggtcgcccggtccaccatggagcccgccatgcttcccctcctcccaccggccgccgccgctgcccacgctccggcggcgcggaggaaggtggtgcggccaaccacccacccaccctagctccggccagccgccccccctcctggccggattcgggtcgccggcgagcgagcgagcgagcggattggcctccacctccagatgcgatgcccccccaccccccttgtctaacgatttcctcctattttcttttcttggaaatttctccccgccaaattag

SEQ ID NO: 41001 - DNA, 535 bp, Oryza sativa
  Clone ID: PAT_MRT4530_44389C.1
gcacgagactcaatgctgtaacagacagccaaaagcaagaaaaggattgccaaagaactgagcatagtactgacctaaaggaacactcaaagaatgtatagtacaatgccttcctggttgcctaggcttggacaacaagccagcacggctcagcttggtccagctagtttagataatgagctagcttggcttctaaatgatgtctcgttattacggttatgcgagaagaaaagggcacccctatctttcttttccctcatcttctgcaggatgtcttggtattggatagtttcatgtttgtttgttttttgcaatgatgcactgttcctttcttgtgcaggtttcttccacatgtacatcaaggcagatgtccgcattccatttgatgtatgctttgtcacagcaaattaaagttgggagagctccaccaatgtgaggacctggcttgtttaatggatgaatgaattaacatgcatgcttcccaaactcctaaacgacagcactagcacagcaaccgatcaagcagtagcaggcc

SEQ ID NO: 41002 - DNA, 204 bp, Oryza sativa
  Clone ID: PAT_MRT4530_4438C.1
atgtcgaccgccaccacccaccccacacgcctccacgccttcacgctgcgtgcccccaagacagatggccctgccaagctcttatcagaagacaatgaagcagcactagcggctccgtttcctcctctttttggaatctctgccctctgcagcttctctgctaggggctccatccccatttgtaacaacaggagccatacaaag

SEQ ID NO: 41003 - DNA, 586 bp, Oryza sativa
  Clone ID: PAT_MRT4530_44390C.1
atggcagaggagagagaaagctttgagagtcaatgggcaccctccgatgtcacagagaagaacttgaaggaaatggtggcgcacggcgttctcccggcgaaggaaatcatcggatggcgtccagcatatggcgaagccttcccgacccccgacactcatgaggtcgttgtattctcccactacttctatggtggttttgcccttccaacttcgaagttctttgggggattcttgaattttatggaatcagtttgcatcaccttaacccgaactccattgtgcatattgcaaactttgttcatgtatgtgaagccttccagggaattaggccgcatttcgccctattccgtcgcatcttctttttgaaaccccaaccaaataaaaacaagccgtgtgttatcgggggagcaggtttccaactacggggtaccttgagccaaaaatacttctccatgccttttaaaacatccaacaagggttggcacgcaaactggttctatctccaaaatcctgaaccggcgcttcccgagtactcttgtcttcccccaaaatatcaggaaacatggaactcactttcaatgggaga

SEQ ID NO: 41004 - DNA, 556 bp, Oryza sativa
  Clone ID: PAT_MRT4530_44391C.1
aacacatatgtaatggaaaataatattcagtgaaaacaattaacaaaataattattatcgctatttcatgtattgcattagttttgcttgcaaaattttttttgttgcagtatcacagaggtattaatagtgtcaatatttcataatgacacaaaatattttgacataaattttatatttgtttatattaattttcacatattcggttttaaaacatgaggtcaaaaacaagcttggcatgaaattttatcatgattttggtatgaattttagcactattaagagacttaggctcggctcggcggccagttttcccaactcccctccctcgtgtttcgcgtgcacgcttttcaaactggtaaacgatgtgctttttaaaaaagtttctatacgaaagttgctttaaaaaaatcatattgatctattttttttaaaaaatagctaatacttaattatcacgcgctaatggactgctccgttttccatgcggagtagatttgttcccaacaagtcctaccgaactcagccttaacggaataagggcaaacccaagctt

SEQ ID NO: 41005 - DNA, 305 bp, Oryza sativa
  unsure (1)..(305): unsure at all n locations
  Clone ID: PAT_MRT4530_44392C.1
attgaactggngttaattcattacaaggtatcgggcacatatttatacccaaaatacagaatatgnccacatctgacacgactccactcctattacaactntaaaacacaaacaagtcccttagactgactcttacggggaatatctataagaaatgnctaaaatatcctaattagtagatacaatngcctccntcagactcaattcaggcctggcaatacttgtgcaacggcaaagtttccaaggtcactttgccgaattcggttacatcggctttctcggtattagcccgntgcagacgggta

SEQ ID NO: 41006 - DNA, 204 bp, Oryza sativa
  Clone ID: PAT_MRT4530_44393C.1
cggacgcgtgcgctggcggccactcaatcacgcggctcacgtgatccacaacaccctcgcgggcggcgacacagcttactttggtttgatatttcaataccaaatcttcgcctccaatgatgcagactgcctttctctcctctttttgaaaggggggggtgtgtacattacttcttatcacagtccaacatataatacatatct

SEQ ID NO: 41007 - DNA, 3028 bp, Oryza sativa
  Clone ID: PAT_MRT4530_44394C.1
ggagagaagaaggaggagaagaagaggagagagaggagctctgagctctgtgctctctcttgctgctgctgctggctgctgctcacttttccttttgggattgttacttattttaatcctgggatctgattttgtccccatattgggaggatcgattatctttctcccctcctctcctctcctctcatcccctctcccctatctatctgtcttgaagaagatcagctggctgctttggtgtcaatcgctgctgcagttcctgttgcctttgccctgcgccccatcaggagcacaccctcagattttgattggtagctgtgttcgtagcaataacagcctggcagagaatctttgagaagttgcagtctattagttcaacaagggaagttgaacgggatcaagtttagtctggataacaaaatattgatgtcctgctggaatcatcaatcaagtcaacgtcaaagctggttcttcatatacatatatgcttttgcagtaatctcgagcaataagtagttataattgcgagatggctacttactattcaagccctggtagcgaaagagactcgcagaccatgtactcaagagacccaggcagtgcatcctatcctatgtcatcagctctagggaacttgctctatctgaacaatccatcttctggaccttatacggagttcagcggcattctgcagcctcagcagaattgcatggagatgcctggccctgggcatgcgtcagcaatgtcacaagacccctcttcaagggagtccgacatgctttcttcgcaccagggtcaacgctctttcagccatgtcaaagatatgaaaaatgagatgttgatgcatatgatggatggagcacaaggtagtggctctgagctcatccatgatgatgcccacactggttcacagcttgagtttggtgttctgaataatcacaactcatcaagtgttccatcaatgcaaagccaagggctatctctgagcttgaacacacaaatcatggcgccttccttaccgtactggtctataaagccagacatgttaacgccgcagtcttaccatgacaaccttagaggggaagacatgcggatgaagaatttgcagtccgaagcttcacgcgcaatccggaactcaaggtatctcaaggcagcacaagaactgcttgatgaggtcgtgagtgtttggaagagcataaaacaaaaggctcagaaagagaaggttgaatcaggaaaagcagatggcaaagagactgatggagggccaaaaagtgagggtgtatcttctaatccacaagaatctggcgctaatgcagcacctgagctttccactgctgagaagcaagagcttcagaacaaaatggcaaaactgatggcaatgttggatgaggtggaccggaaatacaagcattattaccaccaaatgcaaaccgtggtttcatcgtttgatgtggtagctggaccaggatctgcgaagccttacacagcagttgctcttcagacaatctcacggcactttcggtgcctgaaggatgctatcaatgatcagatcaatgttatcaggaaaaagcttggcgaggaagagaactcatctggcaaggagggaaaattaacccgcctccggtacattgatcagcagctaaggcaacaacgtgctttccaacagtacggtatgattccacaaaacgcctggagaccacagaggggactgcctgaaaactctgttacaattcttcgcgcttggctgtttgaacacttcctccatccgtacccaaaagattccgagaagttaatgcttgctaggcagactggcctgactaggagtcagatttcgaattggttcataaatgcccgtgtccgcctttggaaaccaatgattgaagacatgtacaaagaagagattggtgatttagagcaagactccaactcttcctctgacaatgcaccaagaagtaaggataaaatggcatcttcagaagacaaggaggatctcaaaaactccagggcacggatttgcgaaacaagccaattgagcgagtcgagaaccagcattggagcaatgaatgttggcggagcgcctgttggcttccagaatgagcccaatcctgatgacagtttcatgaacctgatgctgaaggaccagcgatcgaacgaagtggatggcggcctccttctccacaacactgtcgcgcagcactcagacgagaacgcccggttcatggcctatcacttggcagagcttgggagatacggcaatggcaatgtgtcgctgacactgggcttgcagcactccagcagcaacctcgttcctaatgctcagccaggtttccctggtgttaatgaggatgacatctacaatgctactgctcctcttggtgtcaccgtcgcatcttcggactatgattcgatgaatcagatggatcaacggcaacggtttgagcattcacctcttctgcatgattttgtggcctgaagacagcagagaaataatcaggaccatggacattaagagagagaattggggggcagcatttgtaacacctagtgggagaataacatgcctgaaagggcatgggatttgtagctttgtagttgccatttaatacagaagaggaggtatagcaggaaatgtaatataaggttagatggtgggggtgatagggtaaagaatcatatgtaaagataaaatccatcattactatatatatatatatatatacgtgtaaaagcttgtgatttgagcaccatattgtaaagtaatggttacttagggctgtccaattatacactctcacactactattagagcttttctgtcattcttttacacgtgtaagtggagctgaaaacttgctgtgtccagcacagttatgcagatttgcgttaagatctgatgattttgttgtggagcactacagctcagctgggtgaaaataaacttgagttcactgttcatgtcaaaaaaaaaaaagctagagaaaagaaaaaaaaaaaaaaaaagggggggccacgagccgaaaaccagcag

SEQ ID NO: 41008 - DNA, 1485 bp, Oryza sativa
  Clone ID: PAT_MRT4530_44395C.1
atggcgccggcgccgctcgccggcggcaggctggtgctggtggtggtggtggcggcggcgtgcatggcgcggtggtcggaggggatcggcgtgaactggggcacgcagctgagccacccgctgccggcgagcacggtggtgcagctgctcaaggacaacgggttcgacagggtgaagctgttcgacgccgaggacggcatcctggcggcgctcaaggggtcgggcatacaggtgatggtcggcatccccaacgacatgctcgccgacctcgccgccggcgccaaggccgccgacgactgggtcgccacgaacgtctccaaccacgtcaacaacggcgtcgacatcaggtacgtagccgtcgggaacgagccgttcctggagacgttcaacgggacgtacctgaacacgacgttcccggcgatgcagagcgtgcaggcagcgctgaagaaggccgggctcgccgacaaggtgaaggtgacggtgccgctcaacgccgacgtgtaccagtcgccgacggggaagccctccgacggcgacttccgcgccgacatccacggcctgatgctcaccatcgtccagttcctcgccgacaccggcgcgccgttcgtcgccaacgtgtacccgttcatcagcctctacaaggaccccaacttcccgctcgactacgccttctttcagggctcgtcggcgccggtggtggatggtggcgtgacgtaccagaacacgttcgacgccaaccacgacacgctggtggcggcgctgcggcggaacgggtacccgaacgtgtccatcatcgtcggcgaggtcgggtggccgaccgacggcgacgccaacgcgaacccgcagtacgcacgacagttcaaccaggggttcctcacccacatcgcctccggccagggcacgccactccggcctggccccgtcgacgcctacctcttcagcctcatcgacgaggaccagaagagcatcgagccgggcaacttcgagcgccactggggcgtcttctactacgacggccagcccaagtaccctctcagccttcgcggcggcggcaacggcaatggcaatggcagcacgctgatgccggcgaagggtgtgacctacctgcagcggcggtggtgcgtgatgaagccgtcggcgagcctcgtcgaccagaaggtcggcgacggcgtgagctacgcgtgcgggctcgccgactgcacaagcctcgggtacaagacgtcgtgcggcggcctcgacgccaaggggaacgtgtcgtacgcgttcaacagctactaccaggtgaacgaccaggacgaccgtgcctgcgacttcaagggcatcgccaccaccaccactgtcgacccctctgccgggtcatgccgcttcatcatcgagattgcgcccaccgccaacggcgtcgccatggcggcaacagttagggtcgccggcgtcatggctgccatcctcgccgtgttcatacacttggtggtgcccgtgttctga

SEQ ID NO: 41009 - DNA, 3482 bp, Oryza sativa
  Clone ID: PAT_MRT4530_44396C.1
ctatgcttgggagtcactatatccgttgatcctccgtgatctaacgatcagcaggtggagcacgccggcggccacgatggcccggtaccgcccgaggcgcgagtcggcggcaagcgcgccgacgagcgtcagcaccagcaccgtcccggcccacgcgttcgcgccggcggcggccgccgccgtcgacatgcccatcggcccggccaggtacatcaccaggttgctctgcacgccgttgaacccgacgcgctccaggaacccgacggcgatgaggaagcgcgcggcgcgccacccgccgcggcggccgtcggcgtcggcgtcgggcttggagccggcgtcgcatggctcgtcggaatgtgcaaggagaccggactccatggctagcacggtgacactgtggcactccctctctaatgctttgatgtggacaaatgcttggataccattatggttttgtttgatgaaaaattcaccagtatggttgcaggcttgcagcttaattataagcagcacatctaaagcactaattccggccaaaagccagtagaagtagtcaaggtgagcacggttgagattgtcggagaaccagctctctcccctactcctcgtcgccgacacgagcatgccactcgcgtagctccccacgccgacgacgctcatgcacgctgccacgccgacgctgcggagctcgtcgggcacctggtcgtagaagaactcctcgaggccgaccatggtgaacgtggtggcgacgccgagcaggacgaactgcggcgccagccaccacacgctcattggcaccgcgacgcccggctcgtccaggaggccggcgtccctggcggcgcggagccgcgcggcctcgaccagcgccgcgacggccatggcgaggcacgccgtgaccatgcccgtgccgacgcgccgcagcgtcgtgatcccggaggggtgcttggtgacgcgcctcgcgagcggcaccagggcgcggtcgtaggccgggatggtgaccatgacggcgaagctgaccaagctcttcagcgccgccggcgggacgagtaggacgccgccgccgccgcccgtgccgatgacgatgcgccggtccatggtgctggagggagcgcgggacagcgtcttggcggtgccgtgtcgtccatggcgtcgccacgacgcggctgggcgcacggtcgaggttgctcagggcggtaggttcccgtgccgagcaagaggacgaacaacgacaggaccataatggcccagcacgggcccagcccgatgccccagctgacgtcgtcctgaacgtagcggatccgggcggttgatagatcgcagccacccgccccggcgaagttgctccaatcgaagacggagctccgctgcgcgagcccgccgggattgctctccgagaaatggccgtccccgagagctcccccgcacggcctgtggaagccctgcccgagcgcaagcaggtacagcgcgacgtagcagaacgccacgcggcccgccggtgctgccgccggcgacgagcacacggcggcaaccaggagatagagaacgccggaggccacgacggcgcggggccggccgatccacgagtcggcggcgagcgcgccgagtagtggcagcataaacgcggtccctccccacgcgttcacgccggcggccgccgccgccgtggacatgcccagctggccggtgaggtacatgatcaggttgccctgcacgccgttgaacccgacgcgctcggcgaacacagccgcgaggaggaagaacgcggccggccacccgccgcggccaccggatttggagccggtggacggctcagcctcaggcaggagggcgcattgttcgacgcagatgccatcatcatcaactcccctgtaatcacaattgccatcagcatcgttgcccttcttcttgtaggtgtacacccgcgagaagaggaagaaggcgacgagctcgacggcacagaggccggcgaggagccagtagaagtagtcgaggtgggcgcggttgaggttgttggcgaaccagctgccgccggcgcgcctcgccgtcgcgccgtcgatcaccgagatgaggaggctgctgaggaggtggccgacgccgaagatgctgaggaacagcgcgaggccgaggctgcgcacggcgtcggggacctggtcgtagaagaactcctgcaggccgatcatggcgaacacgtcggcgacgccgacgagaacgtactgcggcaccatccaccacaggctcatcgggagccgcgccttgggggcgtccgccatgccggcgccggcggcgacgcggaggcgccgcgtctccacgagcgcggacaggacgacggcgacgagggagagggcgaggccggcgcccaccctctgcagcatggtgatccccgacggcctccccgtgtagcggcgggcgagcggcacgaagaggcggtcgtacaccgggatgaagacgacgatgctgacgctgatgaacgtctgcagcgccgccggcggcacgttgaagctccggccgatccgccggtccagcgtcgccgcctgcttggtgaagaacgtcgacgtctgggagaagattatcgcgtagattatgcacgacgcccatatcggcagcagccggagcacgctcttcacctcctccacgaggtcaccggcgtcgccgtcgccgtctcctttgccgccgctcgccggattggtgcgacggtttgatctccagctcttgatcaatgtcaagaacgccttggcgacgcgggcgacggggctggccgtcctggctgtgtagaacctgtacgagcgggtgccgaggaggaacgcggcgagggagacgacgatgacgatgcaggggatgccgaagccgaggccccagccgacgttgtcctgcacgtagctggacaccatggtggtgacggcggtgccggcgcacatgccgaagtaccaccagttgaagaaggagctccgggcggcgcactccccgccgtccttctcgtcgaactggtccgccgcgaacgcctgcgcgcacggcttgtgcgcgccctcgcccagcgccaccatgtacagcgccacgtagaagacggcgacgtggccggcgcgcgacaccgggaacgccgacgacatcgacagcgtgcccatgctcaggacgaagatgacggaggcgaggacgatggcgcggtagcggccgagccaggcgtcggcgacgcaggcgagcggcagcggcagcatctgggagacgcccttccacgcgtcgatggacgcggcggcgcgcgccatcggctgccccagcggcccggtcaggtacgtgatcaggttcgccgccacgcccttgtacgcgaacctctccgcgatctccatggccatgacgaacaccgacgacttccagccgccggtggcggcgcgggaggccggccggccacggtaatcgacggctccggcgacggtgtccgccatgccggagtccaagaggtgagacaccagcttgctccggtgatcggccat

SEQ ID NO: 41010 - DNA, 299 bp, Oryza sativa
  unsure (1)..(299): unsure at all n locations
  Clone ID: PAT_MRT4530_44397C.1
aaaaaaaaaaaaaaaaaaccaagaggggggaggggggaaaaaaaagaaaaaaaatataaaaagataaaaaataaaaaaacgcaatgaatgcaaagaaaataactaatatgtggggcctccttaattcaattcacttggccgtcgcgtttccttcgtttttttttggtgaaaaccctggcgtctccggggtggagtggggtgtgctctttttccccctttcgccggggggtgtaatggcgggggaggcccagttccgttcggtttttcccaacagttgcttctgcctgattggngaatgg

SEQ ID NO: 41011 - DNA, 1479 bp, Oryza sativa
  Clone ID: PAT_MRT4530_44398C.1
atggaatccagcgaacaatgcgccctcctgcctgaggctgagccgtccaccggctccaaatccggtggccgcggcgggtggccggccgcgttcttcctcctcgcggctgtgttcgccgagcgcgtcgggttcaacggcgtgcagggcaacctgatcatgtacctcaccggccagctgggcatgtccacggcggcggcggccgccggcgtgaacgcgtggggagggaccgcgtttatgctgccactactcggcgcgctcgccgccgactcgtggatcggccggccccgcgccgtcgtggcctccggcgttctctatctcctggttgagccttggcatgctgacggtctcatccatggtagcaccaccacaagcgacaatggtgtgccaggatacagccgccgtgtgctcgtcgccggcggcagcaccggcgggccgcgtggcgttctgctacgtcgcgctgtacctgcttgcgctcgggcagggcttccacaggccgtgcgtgcaagccatgggcgccgaccagttctcggagagcaacccaggcgggctcgcgtcgcggagctccttcttcaactggatcaacttcgccgtgtcgtgtggctacgttctctcaaccgccgggatcagctacgtgcaggacaacgtcagctggggcatcgggttcggcgcgtgctgggccatgatgctcgtgtcgttgttcgtcttcttgctcggcacgggaacctaccgcccggagcaaccgcgaacgttcgccgagacgcgtcgtggcgacgccatggacgacacggcaaggtggccacccttttcacaaagcagggcagcaccatggaccggcgcatcgtcatcggcacgggcggcggcggcggcgtcctactcgtcccgccggcggcgctgaagagcttggtcagcttcgccgtcatggtcaccatcccggcctacgaccgcgccctggtgccgctcgcgaggcgcgtcaccaagcacccctccgggatcacgacgctgcggcgcgtcggcacgggcatggtcacggcgtgcctcgccatggccgtcgcggcgctggtcgaggccgcgcggctccgcgccgccagggacgccggcctcctggacgagccgggcgtcgcggtgccaatgagcgtgtggtggctggcgccgcagttcgtcctgctcggcgtcgccaccacgttcaccatggtcggcctcgaggagttcttctacgaccaggtgcccgacgagctccgcagcgtcggcgtggcagcgtgcatgagcgtcgtcggcgtggggagctacgcgagtggcatgctcgtgtcggcgacgaggagtaggggagagagctggttctccgacaatctcaaccgtgctcaccttgactacttctactggcttttggccggaattagtgctttagatgtgctggtgttcttgtattttgcaaagggttatgtctacactaagaacaaagtcttatcagttgatatttaa

SEQ ID NO: 41012 - DNA, 318 bp, Oryza sativa
  Clone ID: PAT_MRT4530_44399C.1
atggagttcgaatgggtcctgcgacggcctatgcggcttgctgattcgcctaggcacgagaaggggctgcccgctgcctgttgaggaccaggggcgaaacctaaggtgtggtgtgcttggttagagggggttatgcgaagggtcctgtcacggcctctttccgacgtggacctgtatgtcaactttgtcgtttgtgtaccctggccagtcctggacaggggttttaatgcacattctgcttggaattctattcgggaatttctgggcgtgacaggtttggccaaactagagggttctggcaggccgactcctcgtttg

SEQ ID NO: 41013 - DNA, 1563 bp, Oryza sativa
  Clone ID: PAT_MRT4530_4439C.1
gtcactacctcgcctccgattcagatctccctcccccccttccattccacgcccatcggattccctcccgattccgctccattcctccccgcctccgcccccatctccgccgacctcgtcgtcgtcggcgtcctcatccaggcagtctcggcggcgattcgatcgccgccacggtcgccgatggaggccatccggaagcaggcgtccaagctccgggagcaggtcgcccggcagcagcaggccgtgatgaagcagttcgggggcgggtacggcgcggacggcgcgttcgccgacgaggccgaggcgcagcagcactccaagctcgagaagctctacatctccacgcgcgccgctaagcacttccaaagggacatagttcgcggggtggagggatacattgtcacagggtcgaagcaggtcgaaatcggtaataagttatgcgaggatggcaagaagtatggagcggagaacacttgcaccagcggaagcacgctgtcgaaggcggcgttgtgtttcgccaaagcacgctcactgatggagaaggagagagggaacctgctgaaagcactgggtactcaggtggcagaaccgttgagggctatggtgatgggagctcctttggaagatgctcgccatcttgcccaaagatacgacaggatgcgtcaggaagccgaagcacaggctattgaagtctcgaagcgccaaatgaaattaagagaaacatctgggaatggtgatatgatttcaagattagaggctgctgaatcaaagttgcaagagttaaagtcaaacatgggggttctaggcaaggaagccgttgcatcaatgactgctgttgaagctcaacagcaaagactgaccttgcaacgactaattgcaatggtcgaatctgagagaagttatcaccagagggttctgcagattcttgatcaacttgaaagagagatggtatctgagcgccaaagaattgaaggagcacctcctccagctgttgagagttctatgccaccaccaccttcatatgaagaaattaacggtgttttcatgaggaatccaacagtcgctgaattggtggaaactgtggaattcttcttggctgaggccatccagtcttatcgtgctgagagtgaaactgagctcaacctggcagctggtgactatatagttgtccggaaggtgtcaaacaatggatgggcagaaggtgaatgcagagggaaagctggctggttcccttacgactacatcgagaaaagggaccgtgtgcttgcaagtaaagtcgcccaggtcttctaggcgttcaatgagccatacatacataaccctggtgttgtacactgtattatgatcgttcgtgatcttcaaagaccctctgatcagagaaatcacaaatattcttttgttctattattgtcattatcactaccccttttgtcaaaaccagtgcagccttttgtatgacatcttgttgcatggctagctttctgaatatttcaaaatatacagcggagaggacactgttcatataaaaaaaaaaaaaaaaaaaccacaagatccaaaaaaaaa

SEQ ID NO: 41014 - DNA, 1785 bp, Oryza sativa
  Clone ID: PAT_MRT4530_443C.1
atgcccgacctcaccaaacccccttcccctcgcccccgccgccgccgctgccgcctctgcggcatctgcctcggcaccgcgctcctcgccctcctcgtctcctccctcgcccacctcttctccccgccgcagccgcagccgcagctgcagccgccgcggccctccccctcctcctcgccaccgcgcttcgcggtcatcatcgacggggggagcaccggcagccgggcgcacgtcttcgccacggggcccggcgggcggccggatctggcgcggtcggccgtgatgcgcgtcaccccggggctctcctcgttcgccgacgagcccgcgcgggccggggattcgctgcggccgctgattgatttcgccagggagaaggtcgggggcgccgcggcggaagtgcggctcatggccaccgccgggctgcggctgcaggaggggcgcctccaggaggccatcctgtcgtcctgcagggacgtgctcagggcttccggattccggttcgaggactcttgggccgaggtgatcccaggctctgatgagggtatctatgcttgggttgcggcaaactatgctcttggcacacttggaggggatccacacaaaaccattggaataattgaacttgggggcgcctcagcacagctgacatttgtttctgatgaagtacttcctccggaactgtcaagaaatttcacttttggtggaacaacatatactctctatagcaacagctttctaaactttggacaaaatgctgcacaagaatccttccgtgaaatactgcggtcaaaagactccaaaaatggtacacttgttgatccatgtgctcctaaaggatattctcgcatcaaagaagtaatatcaagaccaagcagtgcttcaaaatcaaaattagagaatcaatttgctgatagtggggatggagactttacattctttggactgaagcaatcttcatcactgtctgattttgtgcttgctggagaacaattttgcaacaaggacttgtctactcttaggaaaatgtatcctaatcggattgagtattcaaatcaggttggagacactcaagttgaatgggccctgggggctttcatctcaaacataaaaggcgtaattgtagagccatcagcaactggtagatcagcccatagaagtagaccattgcttgctgtgctgctgggggtgtttcttctaggtggagcactttgcttggcaagatggaggaagcccaagacgaagatcatatacgacttggagaaaggccgatgtttgaggtgttatattgtcaatgttctgcaagctagtaagagtcaagatggccgagttggtctaaggcgccagtttcagagtttaactgccattctgataatttgtttttttgggtttatacggagttttaagtggtgtaagaactctattcatccttccttatgcggaacttctcctatattcgaaggttgtttccgtataagacatggttggaccagggcttatcccttgggccaccaggaaagcctcctcggcccagtccacgtgaagcgcttgtttgtgtggagggggcgagtccaggcgtgtgtatgcgtcgacgcttggtggggagcagcgacggcgctacagcttccgccccttaaccaagggcatttctgtcgactggtgatcatcggcaaggtggatcccaacgtcatcctgtacaggagcgtaaccaatgttggggccaagggccacgacttccacgccgaatcgccgatgccgtggtgttctgttcatgcatatgacccctga

SEQ ID NO: 41015 - DNA, 235 bp, Oryza sativa
  Clone ID: PAT_MRT4530_44400C.1
tccggaattcccgggctcgacccacgcgtccggacaaagtgttcttacctgcttaaagagagagagcgctagcgtacagtctgcgctcgcctaaaacaagaccgcgacacctctgatctgcgtgctcggtagtgcgaagtatggccacctgagcataagcatcatgatgcaagacccagctccccagaatgtactagtccaacatcgctgagcacccacaaggcgacggggcaga

SEQ ID NO: 41016 - DNA, 2925 bp, Oryza sativa
  Clone ID: PAT_MRT4530_44401C.1
atggcggcggagacggtggtgagcatggcgatgtcggtgctgggcagcgccgtcgggaaggccgcctccgccgccgccgacgaggccaccctcctgctcggcatccagaaggagatctggtacatcaaggacgagctgaaaactattcaggcattcttaagagctgctgaagtaacaaagaagaaagatgacttgctaaaggtatgggcagagcaagtacgagatctgtcatataacattgaagattgcctagacgaattcaaggttcatgttgagagccaaagcttggcaaagcaactaatgaagcttggtgaacgccatcgaattgctgtacagattcgcaacttaaaatcaagaattgaagaagtgagcaacaggaatacacgctacagcttaatcaagcccatttcctctataaccacagaggatgagagggattcctacctagaagatgctcgcaatcaatcaggtagcaacactgacgagtcagaacttgtgggctttgccaagactaaagatgagttgcttaaactgatagatgtcaatactaatgacggtccagctaaagtgatatgtgtggttggtatgggtggattaggcaagactacccttgcaaggaaggcatatgaaaacaaggaacacatgaagaacttctcgtgttgtgcttggatcactgtgtctcagtcatttgacaggaaagaaattctgaaacaaatgatcaggcaacttctgggtgctgattcattagacaaactcttgaaagaatttagtgagaagttgctcgtgcaagtccagcatctcgctgatcacttggttgaagggctaaaggagaaaaggtactttgttgtccttgatgacctatggaccatagatgcatggaattggattcatgatattgcttttccgaagattaacaacagaggtagtcgcataataataaaaacgcgagatgctggcttagctggaaggtgtacctctgaatcacttatttaccaccttgaaccgttacatatagatgatgctatacacttgctactagcaaagacaaacataagacttgaagacatggaaaatgatgaggacttgggcagcatagttacaaaattggtaaaaaggtgtggttatttaccgctggctatactcacaataggaggcattcttgctactaagaagataatggagtggggaaaattttacagagaacttccttcagagcttgagagcaatccaagcctagaagccatgaggaggatggtgaccctaagctacaatcacttaccatctcatcttaaaccatgctttctttacctaagtattttccctgaagattttgaaattcaaagagggcgcctggtagatagatggatagcagagggttttgtcagagccacagatggggtgaacattgaggatgttggaaatagtcactttaatgagcttatcaacagaagtctgattcagccctcaaaagttagtacagatggagttgttaagagatgtcgaatccatgatatcatgcgtgatatcatagtttcaatttctagagaggaaaattttgtgctgttgactagggagaagatcactgttgtagcggaggagagcatccgccatctagcatttcatgggagcaaatgctcaaagatatgcttggagtggaaccatctgcgctcagtaactttgtttggcgacagacctgtggggcgaacacctgcactttgttcaccacaatttaggatgctgagagtgttggatctggaagatgcaaaattcaaattcacacaaaatgatatcaggaatatagggttgttgcgccacatgaaatatttgaattttgcaagagcctcaactatttatacacttccaaggtccataggaaaattgcagtgcttgcaaattttgaacatgagggaggcaaatatctcagcactaacaactgaggtgactaaactccagaatctccgtagcctccgatgcagcaggaggtctggttctggttactttagcataatagataatcccaaggaatgcttgatgatcaccatgtgcttaccgatggttttcttaacttcaataaatttcagtgaccgtgtgaagttaattcctgagatatgcatgtcatgttctacccgttggtctgatacaaagggtgtgagggtgccaagaggaattgacaacctaaaagagttacagattctagaagtcgtggacatcaacagaactagtaggaaggcgattgaagagctgggggagctaattcagttaagaaaattaagcgtgacaacaaaaggcgccacaaataagaagtatcagatattttgtgcagcgattgagaagctctcttctctgcaatctctccgtgtggatgctgagggattctcagatactggaacacttgagtggctcaattcgattgcatgtcctcctccattcttgaagagactcaagttgaatggatctcttgcagatacaccaaactggtttgggaaccttaagcagctggtgaagatgtgcttatccagatgtgggctaaaagatggtaaaactatggagatacttggggcactgcccaaccttatggttcttcgtctttatcgcaacgcatatgctgacgagaaaatgacattcagaaggggaacattcccaaatctcaggtgtcttgatatttacttgctgaagcaacttagagagataagatttgaggagggcacctcgccaacgatggaaagtatagaaatttatggttgcaggttggaatcagggattattggtatcaagcaccttccaagacttaagattatttcgcttgaatatgatggtaaagtcgcgaagcttgatgtgctgcaagaggaagtgaatacacaccccaatcatactgaattgcaaatggcagaggatcgaagtcatcatgacctaggaggtatataa

SEQ ID NO: 41017 - DNA, 1773 bp, Oryza sativa
  Clone ID: PAT_MRT4530_44402C.1
atggagaagctctccatggtgacctctctcctctgcgccatcactgtcgcggttctcgccgtggcggtggtcagcggcgaggcggctgtggtggagcacaccttcgtggtgcacgagatgaacgcgacgcacctgtgcaacacgaccaagatctacgtggtgaacggacagttcccgggccccacggtggacgtgacggagggcgacacggtggttgtccatgtcatcaacaagctgccatttgggcttaccatccattggcatggtgtccgccagatgaggagctgctgggctgatggggctggttttgtcaccgagtgtcctatcccacccggaaacgagcacacctaccgcttcaacgtcaccggccaggtcggcacgctgtggtggcacgcccacgtcacctgcctccgggccaccatcaatggtgccttcatcgttcgccctcgtgatgggaagtaccccttcccgacaccggccaaggacgtgccgatcatcataggagaatggtgggagcttgacctcatcgagctagatagaaggatgatggatggcaacttcgacgacaacccgttgtctgcgacgatcaatgggaagctcggcgacctcagcaactgctctcgcatggtggaggaaagcttcatcctcgacgttaagcacggggagagctaccttctccgggtcatcaacactgcactcttctctgaatactacttcagggtcgccggccacacgttcacggtggtcggcgccgatggcaactacctgacgccatttaagacggacatggtcaccgtcgcccctggcgaggccatcgacgtgatcatggtcgccgacgcgccaccggcgcactaccacatgatcgcgctggctaaccaacctccggagccggacccgcagatcccggtgttcacctctcgtggccttgtccgctacgccggcaccaccgccaacaacaacggcctcccggtaccgatgccgatcatgcccaaccaacacaacaccatgccgtcctactacttccacgccaacctcaccggccttgcccacccagagcgccatcgtgtccctatgcatgtcgacgagcgcctcttcgtcaccttggggctcggctccatatgccgtggccagaacaccacctgcaagcggcggcgcagcccggagaccatcgtggtggccaccatgaacaacgtctccttcgcccacccgaaaaccaccgcgctcctcgagcgctactacgacggcacatcgaagggcgtgtacacggaggacttccccatccggccgccgcggcctttcaactacaccaaccgtgatctcatccctcccggcccgctcgaggaggcgttggagccgacgttcaaggcgaccaagctgaagcggttcaagtacaacacatcggtggagatcatcttccagagcaccacgctgatgcagagcgactccaaccccatgcacctccatggctatgatgtcttcctccttgcacaggggctcggcaactttaacgccaagagggatgtcaggaagttcaactaccacaacccgcagcttaggaacaccgtgcaggttccacgtggcgggtgggccgccattcgcttcgtcacagacaatccagggatgtggtacctacactgtcactttgagttccacatcattatgggcatggcgacggcgttcatcgtggaggatgggccgacaccagagacgagcctgcctccaccaccaccggagttcaagagatgtggcaacaatggtctgagtcaaccatga

SEQ ID NO: 41018 - DNA, 504 bp, Oryza sativa
  unsure (1)..(504): unsure at all n locations
  Clone ID: PAT_MRT4530_44403C.1
ctccccgtgggcgnnctgccgnntctctccttccgcgccgnggccngcnccgccccggcgntgctcgtgcccttgtcgcgcgtcgcccnngccgngctcctccnctggctccncttgccgtggttccttgtcgtctcggngtccgccgtgtggggggtcgcctctctgnngctccccgtggtcgtgccggcctcggcggccgtggccgtcngcgcgctcnccctgnggctgcgcttcggcgnggggngcgncggcctggtgncgcggcgggccgccgnggtgcccgggtcggtggtggtgnggccggnggggnggctggnncctgcgtggntggtgcncttcccgctgngnnggggttctgccggggctggcgccnctcngntgngtgnngccctgntggcnctgctcgttgggtttgggggggggtnntgcttgctgttctgntcttncngtttcttgggtnnntttggggttggtcttgggtgtgngccgtgcttggggggc

SEQ ID NO: 41019 - DNA, 529 bp, Oryza sativa
  Clone ID: PAT_MRT4530_44404C.1
aaccttcccctgttgtcaagccatcgcctcctccctacttatggagctccctacagaagaagggaggacgtccacaaagagggaaatgcctggccagtgtcaaaggagaggacccgccatcatcctcaaatccgtcgctgcatgcacgctgctggtctgcaatggacgagctaggccagacagaaggttggggtggaagctgaggaagagtttactcatctttccctcaattgtgctcctgcagtccctctacgcctgagcgcttcttgtcctgttaattgctgtgcaggtgagccggcaacatcgatgatgcagcagcgacgatagcccaacagtggggactggtcctctttttctttttactaaacttatctagattcttctttgccccaagttttttttcttaccatttatcttatcctatggctacgatactttctccctatattgtcgtcgtttgaatcagacggtcattattttgttgctaaaaaaaaaaaaaaaaaaaaaaaaaaaaaaaaaaaaaaaaaaa

SEQ ID NO: 41020 - DNA, 851 bp, Oryza sativa
  Clone ID: PAT_MRT4530_44405C.1
atggctgcgccctcgaacctcatcgccgacgacaatcctggccccgatcccttcctctgccgcagcgtcaagcccgccgcggcgcgccggtgtcttgcaagtaaagcttggtactggtgctggtgcctgctccagagcaagatggcaagaggggctcagccatctgcatccctcctgctcttctccctggggcttgtgctcctctacttctcctcaggaagcaccattcgacttgctgagggacagaaaacttggtgcgtggcgaagccgtcagcagatgacaaggttcttacggcgaatctcaactacgcctgctctcaggtgaactgtggagtgattcagcaaggtggcccgtgcttcaaccccaacaacctggtgtcgcacgccgcagtcgccatgaacctctactatgctgcccatggcaggaatgcctggaactgctacttccagaactcagctctcgtcgtgcagtctgacccaagttatggttcctgcacgtactactgattttaaaactgaggtcgaggtcgaggcagggcctacgcagctgagtttgtattaggatgtcttttactcccatgttagcagtgccgagatttcgtggcgatgccctagatcctctgatgcttagtttattgataagatgaacattgatttgctcggatcttggatgctgtttgtggcgtccattcccatcaaccttcattggatgtttggaaattcagacttgttgatccacatgcttcattgcttcctgtttcctagcatctcttgttttcagtttgatggaaaccggggattcgttgaatgaatatatgatttgtcaaaaaaaaaaaaaaaaaaaaaaaaaa

SEQ ID NO: 41021 - DNA, 3430 bp, Oryza sativa
  Clone ID: PAT_MRT4530_44406C.1
ccacgcgtccgccgacacctagacggaaagggcggagcggcgaagagaggggaggagggatcccgccttttccgtcggatttgacggccccccgcgctctccctctctctgtctctctctctccgggagcgagccagccagcagcaaaagccgaccaccaccatcgccacgcacccagtatatcacaccgcgcgcctggggtcgtcaacggctacctgcgccgcggccccctcccatggaacagcgggaggcgcggcaagaggaggaggaggaggaggagcgcgacgcgccggcggttcctcccggggaaaacgacgaggaaagagatcgaaacctatcctctcgtgtggtttctttgttatttggtggtgatatctcagcgcagacattcgagaaatgggtatcattggtacgtaaacgaagtggggcattccggccatcagggttcccacgccggaattcgaggattgaagtcatgccgagtgggagtttctcacttttcagtgcagcagacttaagtgagcaagtggttacagcagagctaataggcaaagaagatataccattgacaagcagtcagcctacagaaataagtttgtgggagagacttggaaatgcttctgcactagatattgaatcacctgacttttcatggaatatgctgtcatctctgcaccatacagagcatagtagtagttcggaccactctgaagatgaaatgtgcaaacctcttgaggtgactgtgaactctggtggtgtagtgttctttgctctatttaattcttcaagtaatgtcttaccaaaagaagcagctgctgttataaagttctcatcatcaaagatgtcaactcaggcagaacggttgggttatgaatttgctagattgcttggagttcagacaccacaagctagagtggtacacaattctagcctagagtggcaggatattagaaaggctgcagaaaatgcacgatcagtagcagtttcaaatagtgatgaggttggtgagatgacatgctcagaattgttggaagctcttgagctaagccgttgtcttcttctaatgagttatattcatggatctccccttcttgagagttcaaaggcatttagtccacgggaagctgcttgcgttactgcttcatcattgggtagggtcttgatgctagatctgatactcagaaatgaggacagactcccatgccgtcagcttggttggcgtggcaatcctgcaaacctgatgatttccgatagaccttctgcacccagtgtggacagattggatgattccaagtgcactacagaaagttctattccaacgattactcaattggtgcagagtgacaagcggactcacactgcaaatgcaaccataaattctccagaattggtgtccatgtcaccaaaaccagatgcattgaaaagtgtaagaggaaatgctgatagtttggatggccctgtccacattgtagcaatcgacactggagtgccacgtcgcccccctgcagggagacgggtgaaagatcatgagcgttatcccaaagttgtgcagcttatgttgaataattcagattactcctcgaatatattgtatgagatttctggtggtaagctagggactccaggacctgatgaagcaatcgctttcactgattcttgttgttccatttctgatgaagacaatactgctgcgattcatgaattccgaggggcatttcgtgcagctctgagggatcttgaggggttccatctatttcttctccagctataccaaaaactagatggtgttttgcgagttttcttgtccatagttactaaaggctctgaagaatccgacaacaatgatgctacagttcctgattttccatcacccggtgctaactacagtactccttgcgctcctagtaagcagcagaatagtgaattgcacggtgattctgaaatactgaaatcaacgacaaagccttcttctgcgggatcccgtggaagctcagactcagtatctcctctgtccagggagagttggagtaataagtatttcaaagggagtgcagagggtccccgaagtttaagaatgacaatgaagctccgtgatttttacaagactccgaaggttgatcctgaattagtcaaagaaatagaacaatggaatgaggcgcttaagtctgatgtgatcaaattttgcgaggagaacaattttcattctggattttttgatggcaatgagaataacatggtagctgatgcatatgaattgaaggtgcgtctagaacacatcattgaaaggatagccttggtctctgacgctgcaaataccgagcgaccttctcttgttatcaacaacttgttcataggtggggctctggctgcaagatctatgtacacccttcagcatctgggcattacccatatactatgtttgtgttcaaatgagattggtcaatctgattcccaatttcccgatctttttgaatacaagaacttttcaattagtgatgatgatgatgcaaatatcagtgatctttttgaagaagcctcagattacttcgatcatgtagatcatgttggaggcaaggttcttgttcattgctttgaaggaaaaagtcggagtgccacaattgtgcttgcctacctgatgctcagaaagggcctcactcttgcgaaagcttggaacttactgaagaaagtgcatcgtcgggcacaaccgaatgacggtttcgcaaaggctctgctagcgcttgacaggaagctgcatggaaaggtgtctatggattggcagcacaagcgacctgagatgaaggtgtgcccaatctgcagcaagaacgtcggactgagcacgagctcactcaaactgcatctgcagaaggctcacaagcggctatctgcaggtagtgtggacagcgccatgaccttggagattcagaagtcgatccagtcgctccggatcagccgcggtgggagcctgagcccttctcagaagcttaccaaggcgttcgctgatgagctcagcttctgaatctgttcttagtagtttttttttttctctctcgaggatgctagtgttgtggcagtgtggtgatgtgcacggtacacgttttcaaaccgatgtaatttagcggtagatgtatcaagcagaccgaactttaggtgtggacagaataggtgtgatacaaggaaatgttcacttttaactgtatacaaccagtttattagcaggagaacgtttaggttttgtaataccaagaaataatcagcgcagcagtatcatttttgcgtttgcctggtaatggcgcatgaataagagaaggatgtaatttgctcggtttgaaaagttgacggtgaaaaacaccggattttagctcaccggtgaagagcacattcataaggaaaaatgtacactacgtatgagttcaaaaaaaaaaaaaaaaaa

SEQ ID NO: 41022 - DNA, 408 bp, Oryza sativa
  Clone ID: PAT_MRT4530_44407C.1
atgcggcaggctgaccgcaacgtcggcgccatcgtcatcaatccgctcttgccaccggggccgggcggggaggagggcaaggtggttcggcggcgaggtggggagagcaaggagaggacgtcatcgacgctgtcgggcggcagcacagggaggagtggcgcgtggtggaggggtcgtgggaggtggtggtgcaagcccaaagattccttcagcctgatcttcaattggatctgtggtcggagctccctcatctgccatgaagagctggggatccataaatacacggggagggggaggtcgtcttgggtcgccacgttcttgcttgacgccatgggcacaaccatcggagaagcaacggcttccccactcaaccagatccttgaacccctcacatccatcgcgccctga

SEQ ID NO: 41023 - DNA, 4521 bp, Oryza sativa
  Clone ID: PAT_MRT4530_44408C.1
atgaggttggctcaagctcgtctcagggcgataaaggtgctgcagctggctcgggtgataaaggtgatggtcttcaggaggggatggtcgaagatcttggaccagatggcaatggactagaactgcagtttgacaatttctaggatcaggtcaattatgccgtgcaacatgctttgatcaaccaatctggagtgctggttaatactctaacaaacatggtgaaatctgtggtcgatggttcaatagctgagcatcaagctacaggaccagtgtatttgccaggtggtgttttccaaattacaggcctttggttacaggcaatcagcaaaatcctgctagtgcaccactaactcagccgatggcatcggttacggctcccgcttcagctgcacaagttgcaccatcatcggcatcaagacaaatgactaatcctaggctactgaccagggaacagccataggatgccggtcaaaacatcaatcggctgactcaggagcagaacttgctaaatgcatcggctaggatgaggacgcctgataatcagctaaggcagcatgttacaactcaagttgtcccggagcacctggttcataatgtgcaaccagatcagacaatgatacctcaagttatacctgaacacttggtgcgtaatatacatccgaatattcagaactataatgggggatacttgaattatcaatatcagcctccttcacctcatgttcatcaagggggatcacctcagcctcagtttgctcctcagttcaatcaattcgagcttgtgtcgcaacaagcacaaggggcacctcagcatagacagtgggccgatatgatcgcagatgtaatgagagagaaatttgggctcaagccgaaggatactgggaacttgtatcggcatccataccctgagtggtttgaaagaattccattgcctgcccgatacaaggtaccagacttctcaaaattttcaggtggagtccatgagatgaaactgtctgatttgacagccattcggcaaaggcatgatgaatctgtgcaggattatatccagaggtttagagaaacaaggaatagatgctacagcttggctttaacagattctcagttagccgatttggcttttcaaggtttgatagctccgattaaggagaaattttcatctcaggagtttgagagcttatctcaccttgcacaaaaagtgactctgcatgagcaaagatttgcagaggctaaaaacaactttaaaaagatcaatcatgtatatccatgcatgtataattcggatgatgaagatgatgattccgaagtagcagcagccgaatgggttagaagcaagaaggttgtgccatgcccatgggagaggagttctggaaaagaagagaagtttgattttgatatcaccaaggctgacaagatttttgatttattacttcgggagaaacagattcagcttcctgctggtggccattgaaggaggaaaaatcaaatttgatgattccaagaagccgatgaaaaagaagtatgacaagcagcagcaggagaggtattatgaagaagatggtggttttgatcctcattgggggggctgtgagtttttcagattttgctggaacgagggtatgagactaccatctattgaagattgtcctggatgcagtaatgttgcagaaagttcaatccgatcttacaatagaggtaatcggctgagacaaacaagagtttttgttcattaaagattaggcccagtaaaccaggggtatgatcaaggagatgatgaggatagaaaggcttaatagtgtccttctggtattttcacaaagaatcagaagaggagggttcaaaggttgaggaacagagaacgttttcgagaggtagagcaggagatcagtcatcggctgaggaagacaaagccagggcaagagtggcgtgttaagaaccaagctgccacagccgatgaggttgaagcggatgaggcaaagaggttggctaaagggaagagtgtcgtaattgcatcggtgaacatggtttttacactacctgccgaatttagggccaatcaagccgatgttgatgaagttgaggaaacctctgcaaaattggttttttcaccagagcaagcagtttttgagaagccagaggggacagagaatcggcatctcaaaccattgtacattaacggttatgtcaatgggaagccggtgtctaagatgatggttgatggtggggctgctgtgaatttgatgccatatgctacattcaggaagttgggcagaaattctgaggatctcattaagataaacatggttctcaaagattttgggggcaatccatcggaaacaaaaggagttttgaatgtggagttgacagtcggtagcaaaaccgtccctacaacattttttgtcatcgatgggaagggttcctatagtttgttgcttggaatggattggattcatgctaattgttgtactccttcgaccatgcatcaatgtttgattcaatgggaaggcgaccagattgaaattgtgccagccgacaggtcagttaacgttgctagtgcagatttagctatttgggagatgggtggaattgattgcctgtctggaaaaggagtcgtggagggttcaaacgtctacaacaaggacacggcagatgatctcgatgacaagcaaggacagggtttcatgtcggctgatgatttagaagaagttgatataggtccaggtgatacaccaaggccgacttttattaagaaaaacttatctccagagttcagaaccaagttgatagagcttttgaaagaatatagagattgctttgcttgggagtattatgagatgccaggactcagccgatcgattgttgaacatcggctacctatcaaaccgggggtcagaccataccagcaaccgccaaggaggtacaaagccgatatgcttgaagctgtcaaggctgaggtcaagcgtctatatgatgctggttttattcgtccatgccgatatgctgagtgggtttccaatatagttccatttatcaagaaaaatggtaaaattagggtgtgcattgattttcgagatctcaataaagccactccgaaggatgaatacccaatgccgattgcagatcaattggtcgatgctgcttccgggcataagatattgagttttatggatggtaatgttggttacaatcagatctttatggcagaagaagatattcataaaacaacttttagatgtcctggtgcaatcggcttgtttgaatgggttgtgatgacttttggtttgaaaagtgctggagctacatatcaaagggctatgaattacctaatcggctggttggttgaagtttatattgatgacgtggttgtcaagtctaaggaaatagagaaccacatagccgatttgaggaaggtttttgaaagggctcggaaatatggcttaaagatgaacccaacgaagtgtgcctttggcgtatcggctggtcagtttttgggattcttagttcatgaaagggggattgaaataactcaatggagtattaatgcaatcaagaaaattcaacctccagagaataagaagaagttgcaagagttgatcggcaaggtaaattttgtcagaaggtttatctctaatttgtctggccgattagaactgtttacacctttgttaaggttaaaggctgataaagaattcacctggggggcagagcaacagaaagctttggataatattaaggaatatcttagttccccaccagtgttgattcctctacagaaggggattcctttcaaattgtatctatcggctgaaacaaggtattctcctgtggaaaatttgtgcttgtgtttgtatttctcttgcactaagttaaggcattatctattatccaatgaatgcactgtgatatgcaaagccgatgtgatcaaatacatgttatcggctccaatcttgaaaggcagggttggcaagtggatatttgctttaacagagtttgatcttcggtatgagtcaccgaaagcggttaagggacaagctatagccgattttattgtggatcatcgtgatgactcaatcggctcagttgaaattgtgccttggacattgttctttgatgggtcagtttgtactcatggttgtggtatcggcttggttataatttcctctcggggggcaagttttgagtttgcctatactattaagccttatgcaactaacaatcaagacaagtatgaagcggttctcaaggggttgcaattgcttaaagaggttgaagccgatgctattgagattatgggtgattccttgttggtaatcagtcaattagcaggagaatatgagtgcaaaaatgacacattgatggtttacaatgagaagtgccgagaattgatgaatgaatttcggctggtgactttgaagcttgtgtctcgagagcaaaatgtagaagctaatgatttggcccaaggagtatcagggtacaagctgatcttacctgatttagccttatatttcatgtgcttaattg

SEQ ID NO: 41024 - DNA, 381 bp, Oryza sativa
  Clone ID: PAT_MRT4530_44409C.1
atggtgaggaccgggactatgctcagggaggagcagatgtctagtgcagtcgggataccatgtgagaaggtgattagagtcagtattcttggaggtcaacttcggttaacggtggggatcgggactaaacttagggaggagttgagctccagacggttaaggataccgagtgacgaagttggatacgagatggcatacggtggatggacaccgtgtaggagagatctttgcaacggacttcacgagctggctggaggccgagctggtccaggagtaggaggcccagctggcccatgcatgaggcaggaaggacgtgcgcacgaggagtccgagtggcgtacggaacacgtgtcgacagcggagaggagtccgtttcgatgc

SEQ ID NO: 41025 - DNA, 1519 bp, Oryza sativa
  Clone ID: PAT_MRT4530_4440C.1
atgcttgaagctgtcaaggctgaggttaaacgtttgtatgatgccggttttattcgtccatgccgatatgctgagtgggtttccaacatagttccagttatcaagaaaaatggcaaagtcagggtgtgcattgattttcgggatctaaacaaagctaccccaaaggacgagtacccaatgccggttgccaatcaattggttgatgctgcttcagggcataagatattatgttttatggatgtcaatgcagtatgcactcatggttgtggtatcggcttggttataatttctcctcggggggcaagtttcgagtttgcctacgttattaagccctatgcgaccaacaatcaggctgagtatgaagcggttctcaaaggattgcaattgcttaaagaggttgaagccgatgctgttgaaattatgggtgattccttgctggtgatcagtcaattggcaggagaatatgagtgcaagaatgatacattaatggtttacaatgagaagtgccgagaattgatggatggatttcggccggtaactttgacgcatgtgtctcgagagcaaaatgttgaagctaatgaatcggctcaaggagcatcggagtacaagccgatgataaaggatgtcaaagtagaagttgctacgataacagttgatgattgaagatatgatgttttccaatatttgcagaatccatctcaatcggcttcacgaaaattgcgctataaagctttgaaatacaccttgttggatgatgaattgtattatcggacgattgatggggtattgcttaaatgtttgagtgcctatcaagccaaggttgcgataggcgtggtatatgtggcactcatgaatcggcttataagatgaagtggttgcttcggcgggtaggatatttttggccgacaatgttggaagattgcttccgatattacaagggatgttaagattgtcagaagtttggagcgattcaaagagcgccagcatcggttatgaatcatatcatcaaaccgtggccattcagaggttggggaattgatatgatcggaatgattaatccaccatcgagcaagggacacaagtttatattggtggcaaccgattactttaccaactgggtagaagcgattcctttgaagaaagttgattcaggggatgctatacaatttgttcaaaagcatattatttatcgatttggtattcctcagaccattacaaccaatcgaggctcgatttttgtgtccgatgagtttgttcagtttgccgatagcatgggtattaaattgttgaattcttcgccatattatgcacaagctaatgggcaagccgaggcatctaataagagtttgattaagttcattaagagaaagatctctgattatcctcggcaatgacacactaggttggccaaagcattgtggtcctatcggatggcttgtcatggttcgatccaagttcctctctataagctttatggacatgaggcagttttaccataggaagtcagaatcggcccaat

SEQ ID NO: 41026 - DNA, 3473 bp, Oryza sativa
  Clone ID: PAT_MRT4530_44410C.1
atgaaactgtctgatttgacagccattcggcaaaggcatgatgaatctgtgcaggattatatccagaggtttagagaaacaaggaatagatgctacagcttggctttaacagattctcagttagccgatttggcttttcaaggtttgatagctccgattaaggagaaattttcatctcaggagtttgagagcttatctcaccttgcacaaaaagtgactctgcatgagcaaagatttgcagaggctaaaaacaactttaaaaagatcaatcatgtatatccatgcatgtataattcggatgatgaagatgatgattccgaagtagcagcagccgaatgggttagaagcaagaaggttgtgccatgcccatgggagaggagttctggaaaagaagagaagtttgattttgatatcaccaaggctgacaagatttttgatttattacttcgggagaaacagattcagcttcctgctggtcatgtcataccatcggctgaagtgctaggaaaaaggaggtattgcaagtggcataattctggctctcattctactaatgattgcaaagtcttcaggcagcagatccaggtggccattgaaggaggaaaaatcaaatttgatgattccaagaagccgatgaaagttgatggtaatccttttccagttaatatggtgcatacatctgggagggcagccgatggaggaaggaatagaaattttcagatgaattcggctagaattatcaacaaataccagaagaaattttgctggaacgagggtatgagactaccatctattgaagattgtcctggatgcagtaatgttgcagaaagttcaatccgatcttacaatagaggtaatcggctgagacaaacaagagtttttgttcattaaagattaggcccagtaaaccaggggtatgatcaaggagatgatgaggatagaaaggcttaatagtgtcctcctgccgaatttagggccaatcaagccgatgttgatgaagttgaggaaacctctgcaaaattggttttttcaccagagcaagcagtttttgagaagccagaggggacagagaatcggcatctcaaaccattgtacattaacggttatgtcaatgggaagccggtgtctaagatgatggttgatggtggggctgctgtgaatttgatgccatatgctacattcaggaagttgggcagaaattctgaggatctcattaagataaacatggttctcaaagattttgggggcaatccatcggaaacaaaaggagttttgaatgtggagttgacagtcggtagcaaaaccgtccctacaacattttttgtcatcgatgggaagggttcctatagtttgttgcttggaatggattggattcatgctaattgttgtactccttcgaccatgcatcaatgtttgattcaatgggaaggcgaccagattgaaattgtgccagccgacagccaattgaagatggagagcccaagttattattttgagggagtcgtggagggttcaaacgtctacaacaaggacacggcagatgatctcgatgacaagcaaggacagggtttcatgtcggctgatgatttagaagaagttgatataggtccaggtgatacaccaaggccgacttttattgatagagcttttgaaagaatatagagattgctttgcttgggagtattatgagatgccaggactcagccgatcgattgttgaacatcggctacctatcaaaccgggggtcagaccataccagcaaccgccaaggaggtacaaagccgatatgcttgaagctgtcaaggctgaggtcaagcgtctatatgatgctggttttattcgtccatgccgatatgctgagtgggtttccaatatagttccatttatcaagaaaaatggtaaaattagggtgtgcattgattttcgagatctcaataaagccactccgaaggatgaatacccaatgccgattgcagatcaattggtcgatgctgcttccgggcataagatattgagttttatggatggtaatgttggttacaatcagatctttatggcagaagaagatattcataaaacaacttttagatgtcctggtgcaatcggcttgtttgaatgggttgtgatgacttttggtttgaaaagtgctggagctacatatcaaagggctatgaattacctaatcggctggttggttgaagtttatattgatgacgtggttgtcaagtctaaggaaatagagaaccacatagccgatttgaggaaggtttttgaaagggctcggaaatatggcttaaagatgaacccaacgaagtgtgcctttggcgtatcggctggtcagtttttgggattcttagttcatgaaagggggattgaaataactcaatggagtattaatgcaatcaagaaaattcaacctccagagaataagaagaagttgcaagagttgatcggcaaggtaaattttgtcagaaggtttatctctaatttgtctggccgattagaactgtttacacctttgttaaggttaaaggctgataaagaattcacctggggggcagagcaacagaaagctttggataatattaaggaatatcttagttccccaccagtgttgattcctctacagaaggggattcctttcaaattgtatctatcggctggagaaaaatcaatcggctcggtgctgatccaggagcttgatgggaaagagagggttgtattttatttaagccgaaggcttttagatgcagaaacaaggtattctcctgtggaaaatttgtgcttgtgtttgtatttctcttgcactaagttaaggcattatctattatccaatgaatgcactgtgatatgcaaagccgatgtgatcaaatacatgttatcggctccaatcttgaaaggcagggttggcaagtggatatttgctttaacagagtttgatcttcggtatgagtcaccgaaagcggttaagggacaagctatagccgattttattgtggatcatcgtgatgactcaatcggctcagttgaaattgtgccttggacattgttctttgatgggtcagtttgtactcatggttgtggtatcggcttggttataatttcctctcggggggcaagttttgagtttgcctatactattaagccttatgcaactaacaatcaagacaagtatgaagcggttctcaaggggttgcaattgcttaaagaggttgaagccgatgctattgagattatgggtgattccttgttggtaatcagtcaattagcaggagaatatgagtgcaaaaatgacacattgatggtttacaatgagaagtgccgagaattgatgaatgaatttcggctggtgactttgaagcttgtgtctcgagagcaaaatgtagaagctaatgatttggcccaaggagtatcagggtacaagctgatcctgtcgcggtttcaacgttcggtgagctatgcttcgaccgatt

SEQ ID NO: 41027 - DNA, 1463 bp, Oryza sativa
  Clone ID: PAT_MRT4530_44411C.1
gcggcgacgacaggacgttggcggcgattgcttggcgtcgaaggcaatatggcggcggcggtagctgagttgtgcacggcggcagtagcgggcgcatggcggcgcctggaagcgcccacggaggaggaaggggcggctcggctgggcgggccgtgccgtgccagcccacgtgccgcactcacggcccaggcacggcccaacacgcctcgggccttgccgagccggcccgaaggcacgatgggccgtcgtgcttttcctcagaataagtctaaatttcctccctcctattgggcgggcctggcctgtcggcccatcgtgccgggccagcccagcgtgccggtggggaggcccaggcacggcccgacggtcgggccgggccagcacgggcccgacccaagtcgggccgtgccgtgcttgggccgggccaaaaaggcgtgccgtgggccgggccttcgggcctcgggccttatggccaactataggctcaagcagtcaagtcaagctcatcgtttggtcctaccatggtgcattgagcaggaaggtggagccgtcgcacctcgcgccgtcggcggcggcgcagctccggctaagcagcgccgcctcggcttcggcttcgtcggcgccagcaagggcaagccgcttgggtttggggccggggatgtcgtcgtccggggtaacacgctcgctcagctcttcaccgaccacgtcgtcccccacctccgccgccgcggcgccggcgacggcgccgggatgcagatcttcgtcaggacggtgacggccggaccgctcgccgtcgaggtgaacccgtgggacaccgtcgggaaggtgaaggccaagatccaggctaaggggggcatcccggcggcgcagcagcggctcatgttcgccggccggcacctcgaggacggccgcaccctcgccgagtacggcatcaagaaggaggccaacctgcacctcgccctccgcctccgcggcggaggcgctgccggcggcggcggcgacgcgcgtgcggctgactccggcggctggggtcactgggcgaccaccgtcggcctcttcgtcaccatggtttccctcgccgtggcggtgaacgccggcgacgctggcgacctccaactcttctttctttgggcacttgctgttgccggagttaacctgatcaccgccggcgtctacctctccagcagagacgacgtgagccggagctgcaccgtagtgctcgccatggcggctgcgttcgctcgtcggaatttggccgtgttgggtaccatcgccgcgtcgtcggcagcgaccggagtcatgttcagcgccacgcaaccggtgctctgcttctttttcttcgctctgtttgtttcctctctttctcttgtcacaaaccactgttctgatggacacaactacacaagactgttttttgacctcactatatactccctccatattttaaaaaaaaaaaaaaaaaa

SEQ ID NO: 41028 - DNA, 442 bp, Oryza sativa
  Clone ID: PAT_MRT4530_44412C.1
atggaaacgacaaggactactcggattatatccatattggtttccctagttcaacttggacaaggggacacctatgggtataaatacaagcccccttaggaggagagtggggacgaggcaatcaacacccaacacaatagacatagaagcctacatacgccaagacacgtcgccggatatcgacttcagggataggcatggctagtcccctacggtgtctctagatactgtcaggagagacgaaagcactatctctgatctcgccaggcacggatttgaggaggaaggctaccctgttgtcgactacgagttatatcatcataccgccatgtcgacaacagttagataggctaccccaaatattatactgtctcgcgtatatcctagtaccaatgatccccataccatgcaaataccgtagtcgagacatcaaacgtcgaca

SEQ ID NO: 41029 - DNA, 570 bp, Oryza sativa
  Clone ID: PAT_MRT4530_44413C.1
tttagggccccccccctgccggtttgacacatgttatggtctttctccggcgtctgtgattgtttgtggttggaatttggtgatcgcgggatttaccaattgttcgctctcccagggatcagcgtatggacccaggagttacccccacagccttatacgactgccctatagggaaaatggtgaccgcactcgcaaggtgtaccacggtgcccggaattgcccgggtgcgacaccacagcgtgcacgggagacatctgcacaattgtgtgtgtgggtgtggtggggggttcgtgggtgagataggtggattttgttggagcagatgttgtgcgagatgtcgagaagcgtggagggatgttgttaattgggcggtgaactgctgcccacgaaaatgaggggtgtattgaaaactcccccgatggcagctgtgtcttgccatgagaaaaaagttggaaaaattgtgtgattgaagctggagcatcagatgggtggtggagttgggggtgaggtgttgttatgttgggaacttaatggagatattttttttttcaaaaaaaaaaaaaaaaaaaa

SEQ ID NO: 41030 - DNA, 639 bp, Oryza sativa
  unsure (1)..(639): unsure at all n locations
  Clone ID: PAT_MRT4530_44414C.1
antcactanagggngaattgggtatcgggncccccccccaatttttttttttttttttntntttttaaaaaagaacntccgaattcancntttattcnccacacntntgcttccaaanaaaaggaaaacnctaattnttttantaaccncnccncattcntncacanctanctncagtaccctngctagtanccnnatctcgncncccaatatcnnaaacnccnccgccggtggggaagtncccttncaaaacnccgggaaggtncncgncgctcnctccaagttcccttttcggncaccccngaacccnctganntggggtncccnancnccgggggnccnaactccctgtncancccncccacntgtngncgatnggctccccnctcgcaccnctcntctnccaacggcggggtancccccgggtntcaattnctcncccgganacttnctcttgnggnngccngnccntntccctngccngaacncntttggctcctccctctctccccgnatnccctgggancgggtttatntggttcccactcctccctnaaaaacnggcccggntttttaccacttctnttngtnnggtacncncaagttccccccnccactttananangnaaanacctcct

SEQ ID NO: 41031 - DNA, 363 bp, Oryza sativa
  Clone ID: PAT_MRT4530_44415C.1
agagaaagatttatgcccaatgactaacactagcgattaacaccgtaggcaggggggagaccatcgggaggtacctaacctaaaacgctgatgttttcatggggggggacatacataacgtccaaaatttccaaagcggaaagccttcctttgcaaataaagggtccaggagggagccccacagaggcacggcaaaacagggggactggaacggcaagtggagagggctcacggcggccagctcttttgtccaccaaagcccaaaggaccttccttcccgggtggggacccaaacgaacaacaagcctgacttgacctagcttggtttggcagcccaccattgctttgaagtaataagcaccc

SEQ ID NO: 41032 - DNA, 391 bp, Oryza sativa
  Clone ID: PAT_MRT4530_44416C.1
ggaaaaaaacttttcatccattagttctccattttgcattccgcatgaagaccggtacttttggggaaaagagaaaaaaacgaccaaacacgagcacaagaagtcctttatctccaacacatacgttcggatctccactagaacggggaagctatctagaaaagggaaaccggaccataaattcagaagcactttactactagggccgcccacaccagcacggctttgtcgatgttctgacttccaatcattcatcggacaccccctttaaccagagcggcgattgcaaaacccgctccagagctgatgacgatctatcgttgaatgccgaggagggtcctaacactgcgtagtaccgctggatcgagcgaatgatcagtcccttcagctt

SEQ ID NO: 41033 - DNA, 336 bp, Oryza sativa
  Clone ID: PAT_MRT4530_44417C.1
atggcggctcgggcgaatgcggcgggtgcggaagacagcggcgagctcaagggcaagggcggtagcgcagtgtggcgcaagaggaatggcggcgaggctctgccgctgccggaatgggaggggaacgagtcgttggctcaggtggctcggcttggctgggtgttacaaggttgccgagcgggaggagtgcaacaaggcaatcaggcacaatgggagcacttccaacacgaggtggagaccaccaggacaatgcggggtgaacttgttgatgccctgaagctgacgctccaactgttattcctaggttttcgcgaggaggggggcatgtgggcgtag

SEQ ID NO: 41034 - DNA, 531 bp, Oryza sativa
  Clone ID: PAT_MRT4530_44418C.1
atggaagggggacagccaataaggatatactgcaagggagatacaaccttgaatgtggccgtccgtgggaacgagctgcgtctcgtccgggacgaccccaacgacgaatcccaggtgtgcgacggcgtggggaaactgacggacgacgaggagcggccagcgttcgcgctggtgaacaggacgacggggcacgccctggtgaacggcggcgacctcgagctgggtctggctccctacagcggccatgtcgccgtggagctctcggtactgtggtcactggggcacccgcgcgccgacgggttcatggagatcaggacgctgagggacgtcaggtacaccctcgacggcgtccacgggttcgtcgacggggggtacaggctcaacggcatccacgggatccccgagcatgggacgctcgtcgccatctatcactcgcagcccacggctgattatgccgtctggaagattgctcccgtcggccaccaagagccgcacagccacagcgagtctgatgatgctctggagtcttag

SEQ ID NO: 41035 - DNA, 440 bp, Oryza sativa
  Clone ID: PAT_MRT4530_44419C.1
gtttttcaactgtaattttctatgaaatatcaaaaaaccataaaccaaattttagatttgccaatatagaaacccaaaatgtaattatactgcttataaggctaagtacaagcctgattcaagtatgctttgctacaaggtaatcaaacaaggagtactggttactgaggtttaaaaccttatagcaaatttgaatggttggcatctactgatctgtaaatgatgaaagttatacatgtgaaatatttatcaatgactagttgcctactgcttgcactttttaccttgttgtagtatattttctaggaatatatggctacttatttttacttcagttccctttttctcttattgcaagcattgaccattctttgacttctgttgttcttttcagtaatgccccttatctttggagcgatgttctaaggctttattcaact

SEQ ID NO: 41036 - DNA, 2826 bp, Oryza sativa
  Clone ID: PAT_MRT4530_4441C.1
tcaccgccggtctgaccggtggtcgatctgaccgaggctgttcagccggtccgaccggtcgccgatctcattatcttcaaactctatgtcagattcaccacgcgccatgaagcaaacatcggagatgttcttcctcttatcatcatctccactttcaccatctacatcacttagtggctcgaaagcagcacaaacttgttgaaaagccttcctgagattctccatcttcttcccttgggatgaactcttcgacctgttgttgtagggcttgttgttgcttgtcttctcaccatctttgtcttctcttttgcctctcccaagctcttttccagttcctagcattatcatagctcgagcaatacggttagcgaccaaagccaaatcctcctcctcgatttgtttgagttgatcatcggatgtggcattaaaagcagcaagaaaagaaggcatagatgaagaagcatcaacaacagaagaagaagtagaagaaaccaaagcactagacttagaatcagcttttcgagaaagaacattcatctcatttgttttcaatttggtgtaaagtgaatccaaagtcaaagtagacatattaacagactcctgaatagatgtaactttcatctcccaaatagacatatcgagaccattcaaaaagtgacgagaaatctcagattgtggataattagcatcataagaagaatcaacagatctaagatcactcaaaattttgttaaacctagaaagatagtcatccaaagcttctccaggtttcatctcaaatttaatgtactcctttttaaaaacatctcgacgaagctctttaatgttatttgttccttgatgaaaattacttaaagcaacccaaatctcattagcagtttgaagatgagcaacacgatcataatccgaacgagaaataccactcaaaagaatgttgtgagctttgcaattttgttcaaaagcagttttttcagcagcagtattaatagcttcaggaatcacataagcatgagaaacttttctccaaatatcataatcttcagccatgatgtaagattgcatcccggtctgaccatcgatgtcgcctgccgcgcctgtcgccgccgccgatctgaccgccgtcctccaatcatcggctgttaatgtggcaacttctactttgacatccttcatcatcggcttatatcccgatgccccttgggccaaatcattagcttcaacattcagcaaggaatcacccataatctcaacagcatcggcttcaacttccttgagtaattgcaaccctttgagaaccgcttcatactcagcctcaacaacagtgtaaggctccaatctcccagataagttagagataaaccttctaacaaaatttatcttgccgatcatctcctgtaattctgtcttgtcttccggaggttgaatcttcttgatcgcattaacactcctctgagttatctcaatcccactttcatgaacaagaaatcctaaatattggccagccgatagaccaaaagcacactttgtcggattcatcttcaggccgtacttcctagttctctcaaaaaccttccttaaatcggctatatgatccgcaatttccttggacttaacaaccacatcatcaatatagacttcaaccaaccagccgattaaatcatggtaaatgtagttcatggccctttgatatgtagctccggcacttttcaagccaaaagtcatcacaacccactcaaacaagccgattgcaccaggacacctgaaagcagtcttatggatatcttcttcggacataaagttctgattgtaccctggtccaatatcaatttcttccaaatcatcggccgacatgaaatcctgtccttgcttgttatcgagatcatctactgtgtccttggtgtaaacgtttgaaccctccacgacgccctcaaaataataacttgggctctccatcttcaattggctgtcggatggcacaatctcaatctttttgccttgccattgaatcaagcattgatgcatggtcgaaggaatacaacaattagcatgaatccaatcccttccaagcagcaagctgtaggaacccttcccatcgatgacaaaaaatgttgtagggacggttttgctgctgactgtcagttccacattcaaaactccttttatttctaatggattgctaccaaaatccttgagaaccatgttcatcttgatgagatcttcagcatttctgcctagcttccaaaatgtagcatatggcatcaaattcacagcagccccaccatcaaccatcatcttggacatcggcttcccattgacataaccgttaatgtacaatggcttaagatgccgattctctgtcccttccggcttctcaaaaactgtttgctctggtgacaaaaccaacctagctgaagcttcctcaacttcatcaacatcggcttgtttagctccgaattccgcaggtaacgtgaaaaccatgttaaccgatgcagtcacaacactcttccccttagccaatcttttcacctcatcggctgtgggagcttgattcttaacacgccactcctgcttcggctttgctttcttcagccgatggttgatttcttgctcaacctccgaaagcgccccatgttcctcaacctttgaacccttctcttctttaatgaataggaacccgcgtttgccacagccgattgcttcaattgtaagatcggcttgaactttctgcgcctcggtaaatattacaatcgccctgctcggcgtaagtttgcctcttggcaattttatgtcggttggaacagtactagccacccggaaatcaaccat

SEQ ID NO: 41037 - DNA, 662 bp, Oryza sativa
  unsure (1)..(662): unsure at all n locations
  Clone ID: PAT_MRT4530_44420C.1
gnaattgtaatacgactcactatagggcgaattgggtaccgggccccccctcgagtttttttttttttttttgtcactcaattaattagttctgcataccatttctttgaaagatactagctagtatataccaaatgcagatcaaaaaaggataaagctctccttgacactgacaaagcatcgcatgtaggagtagtgtcttatcatggactcatcgatttatcatgacaagtactagacatgagtgccccatgatatatacatactacacactatctgaccggtgaagaactactccgtctctgacccagcagagatgtaaatgtggtttggtggaggttcagatataccagtagtagagtagttattttacctcccatattccaagctgtatttttggcagcagtaactactccacaaatgcnacatgttctggtatacaagacttggcagtgcttactttttttggaaatacatccttatcgatctgccgatcgccatatgcgcctgaatttagcatatccctggagttccactcatcnccagttttgtcccnccggtggtgaccacggaaaaccccctgaccttcttggcacaccgccaagctgttntgcnatcctnaccnggattcctattctaacgcncccgngngancncttttt

SEQ ID NO: 41038 - DNA, 123 bp, Oryza sativa
  Clone ID: PAT_MRT4530_44421C.1
atgatatcggaggtcgcgctagaaaagcttcagttggaagtgatattgctactaagaaaggtggcctctgatttctacagcccaagtcatggatggaacccatacatcaagcgtctggaatag

SEQ ID NO: 41039 - DNA, 650 bp, Oryza sativa
  unsure (1)..(650): unsure at all n locations
  Clone ID: PAT_MRT4530_44422C.1
ttggctgcaggattcggcacgagctctcttccaaaaccctaaccctancggcgggcgggagcggcggaagaagatggcgcggcggcngtggggtggtaatggtggtgggtggaatggacngangcngggcgcaccgcacgccggangacgtgttccnggacttccncgcgcngcgggccgggatnatcnaggcgctgaccncacatgtgganaagttctaccancagtgcgacccagacaaagagaatttgtgtttatntggtcttccccatgtagacatgngaagtnaacttncctgctgaggangttcctccanancttccanaaccanctctgggaattaattttgctcgggatgggatngatnaaaaanattggctgtcacttgttgcggttcatnctgatacctgnctgctancantaacctttttctttggaacaagattcnggtttgacaaagaatccncnaaacngctttttaccatgattaacaaccttccaaccatatntnaagttgtcactnggactncccanatnccnaacttanaaaaaaccccccngaccnntngccanaacaatnantcccggcncnnaacccttccccncccncccggaaacccaactcctaaggggtccanaaattccccccc

SEQ ID NO: 41040 - DNA, 1140 bp, Oryza sativa
  Clone ID: PAT_MRT4530_44423C.1
atgcaagagcagcagcaggacttcaagaacgtcttctgtatggagggtggccagggcgagtccagttacatcaacaacagccaatctcagtcccgaaacctgaaaatgatgctgtacgcccttgaggagacactggacaagatccagctccctcgtcaccgtccggggaacaagccgctactgacggccgccgacctgggatgctcatgcggccaaaatactctcctgatcgcggacgtgatcgtcgaccacatgaccgacaaatccttcggcagcaaggacgacgacggcctggaattctgcttctacttttccgacctcccgagcaacgacttcaacaccctatttcacctcctcccacagcaagctgctgccgcgggcagagatgggcggcagagccggcgctacttcgccgccgccgtacctggctctttccatgatcgcctgttccccgagcgatccatcaacgtgttcacctccaccttctcattgcactggctctcacaggtgccgaagagagtcgtcgacaagcaatcgccggcatacaacaaaggtaaagtgttcgtgcatggtgcctctgaggagacgggcacggcataccaacgacaattccggtctgacatgatgcgctttctacactgtcgtgccgccgagatgaagcctggtggtgccattttcattgtcagccttggccgcctatcatccacccgcggccccacggagcaaggctacatctatgaagtgtattgcagcatgttcgaggactcattgcgtgatctcatcgaagaggagatggtcgatggcgagaagatggacaactttaacgtccccctttacgctgctacagtagaggagttcaaggaggctgtggacgccgacggctcgtttaagatcaaccagttggagctcgtgatgggaagccctcccgtcgtggatgatcccgctaaccgcggcgtggtcgggcgcatggtagcgaactacatgcgtgccctctttgggccactcgtcaacacgcacatcggcggggcgatggctgacgagctgttcatccggatgcagtgccgcgcagaaatacgtgccgaggagcttgtggatgaaatgtgcttcgcccatattctatgctcgctttcactggtgtaa

SEQ ID NO: 41041 - DNA, 295 bp, Oryza sativa
  Clone ID: PAT_MRT4530_44424C.1
ccggccgggatccttctcacaactcaaacattacagcgtaaaggataacaactagaatgccaccataatgaagatcattttcttctttgctctccttgctattgctgcatgtagcgcctctgcgcagtctgatgctgtaaccctcgcctacaggcaagatccgctgcagttgattctcctgctgtagcaactgatgttttatccatgcaacccagtgaacaagagagcagagcactatagtgggaaacccatgctggataaatctagggaacaaatgagaaggcggcaagcccaa

SEQ ID NO: 41042 - DNA, 775 bp, Oryza sativa
  Clone ID: PAT_MRT4530_44425C.1
ccggccgggaacacacacccagacgcaaaatcgccctcctcgtcgcctgccggcgagatggcttcgtcggcggcggcctacctcgacgccgacgagaacctcgaggccatcatctcccgcatcgagcagaagtcccgcaagatcgagaccctcctcaagcagtcgaagccggtggaggccctcaagacggcgctcgaggggacgcccctcaagacccgcgacgagcgatgcaagtcggcgaactggatcgtggtgcaccgcgcgatgatggcgatcagggacgtcgacggcatgttcaactcgctggatcccgagtactacgacatcctgatgaagtacctgtacagaggtttgtcaacaggggatcggccaacatgtgaccagtgcctcaaaattcatgaaaaactcaccgagaaagcaggtttaggatgtatattgcgctcacttgctgataccgtaaacaccgtgtgagtttcatctctgtggagggtgggcaacacaaggttttttctcccagctgccccatgatatgaaaatatctcattagggccaattagttgtatggaaaattgttgtctagatgatgttgattgttatcctcttccctttccatttggcagctagcttctgatagagagcttccttgtactctagtactagagttgctgaactgctgtactactagtatatatatattgttgtttccaacacgttatgtggcatgaactatgataatgaaaatgttgtggttttcaagtgaaaaaaaaaaaaaaaa

SEQ ID NO: 41043 - DNA, 2760 bp, Oryza sativa
  Clone ID: PAT_MRT4530_44426C.1
tcaaatagcttctgtgtatttcttttgaaaaaatctttccagtttccaggcacgggaaggcagtagttgaactagatccagcttgctcttgtaaattcttctcctcccgcgcacgccatctgaatttggcatgggtcccgcatgtagtcgatctcccgcgcgagagcgcgcagtcgagtccgcgcctgccgcgtgtccctcacgcgcgcgtcgtcgccgagacctcctgccttgacgcccttgcttgccgagctgggccgtcgttgcttggatcatgctggcctctgctccatcttggactgggccagtccggtccagccgtgtggcatcctggccgagcccatgatcacgatggattggtggcctccctaccaaccaatcacaacacacatgcacatcaccttgtccatgcatgcacttgtcacatggcctcttgaccgtgccggacctatgctcctccctgagcatagtcccggtcctcgccattgaccgaggttgacttcgatcaccatgtgattgctttgctgtatcttttggaccatttctgctctcctttcccctcctaaagcttcttgtcttgagctcttctgaactctcgattccatcctcattagctggctcatccataggtataacatttctggtttcagtactgctttcttgaggtacttgagaattgttttcaaatgcttcatccttgtgccacaggctgctcttttcgatgccacagtgccaaagcaatgcccagattagagtaatgaactcgcctccagactcgagattattcttatgatctgatgcattccagcttggggcgatgtgcacaagtaaatcagcccaaacctcagctaggatcttccaacaggcttcatcatccttcattccgatcaggtccttggctagagtaacaccttgctgcagtatgttcattttcaatttctcatctacactgcttggtgttgcttgcagtgcaattcccatgagtttgttatatctacaccatttcaggttacaatccttgagttgttcgcgggcatgctttaaggtttccacaaatagcacttcagggacaagaaaactatctggtaacagttcagaacgaaaaacctgtagataagcgcaataccgtgacaagctgatcgcgatatggtagtttgttttgagcccagcagacaggccactgttctcgctggtgaggccgatgcggcggattgcctgtaggattgctagctttacacattgagggatcttgatggcttcaccagtttttttcccatccaatttgcctttaatctttcccagggtgatgacatttgccagtttccataatgttggcttgtaagtaatttgctgcaagaagtcatactgatcgatacgtccatgccatggttcgccaatttttgactcgaaaaatgaccttactagatgcttcgtgagtcgttcactcacaaaccaagcctggtcctgcacatacttgcacaggacaagtaatcttgtccagtttgataccaggtatgtgactatttcccagatctccttgaacatcacacagaacatgaacacccatgtcatgatgatgtcaaaattacatccatccacccagagcacaagattgccctctgggggttgatagaccttgcggattcctacggccagccagaaggcaatggcgaaagttgcagcggacaggagcagactcaaacagagagaaccaagcccttcccagaagaccaatgggtagagggtgtagaagtagtctctgacaaatgcaagctccaactcaaggatcctgaatgtccgctcagcctcgacagcctggtgcccgtccaccttctcctcctgccgttgtcctcggctgtcaggaatgaactccgagatgattagatgctgcatgtcgttaatgctatctttgttcagtgtcacatcttcaagcctgcaccgaagcagccttgacagtgagaaggccatgctcaagtctttaaacttactgtctccatctctgttgttcatccccttccaattgtactcctgaatcttgcccagtgtgaccagtgactgagcgctgctgttgctgatatttatagtgtattgaggcttctttaaggtgatgtctttgttggactctccgcagatcagatattttttgcctggcatcatagttgatgtgtttctatcatcatgattgacgcctgtctcctggtcctcaggaatgaaggtgcgcatgtactcaggaataaactctgagctccggccatgccacaaggattcgtttgccatgccatgtgcgaagaaccggtacatgctcttcagttgcaggatggcccaaaatgaccagagtggccttgcatacttcaagccacgagtgccagccaagacccctgcccctatgaacttgatcacatttgccagctccatgaattgtcgatcacggtctgagatgccatacccagagagatagccgaggctggtacggagactcaccagcacgatggcccagaccgggaacagctcattctcaaacctcgcggattgcatggctccaatgaggtacactactatctgatcagataattcgtcgatgctttcaagaatggtggtcaagattgagctacgagttcggcagcggtagaagtctatgatgaacattgcaaggaatatcaatgtcaccagtgccaccaaggactcaatgcggatcaagacatagatgttctctttcagcatgacaaaaaatgattcaatcacagcacggacgtccaccat

SEQ ID NO: 41044 - DNA, 333 bp, Oryza sativa
  Clone ID: PAT_MRT4530_44427C.1
tcgtggagcgccagtcgggccggcccgcgcgggggccatttttacagaagggctggcctaggcaaccctctggtggcgggcggcctagctgatgaggacggacacgcgaggggcggcagttgccgggcggagcttctgctggttcctccggcggacagcaggccggacaaggccatacggcagtagacggctgacgacgaggcggccggccatgagaaccacatcaaggacatccgtctcgacatgggaaactgcgatctggatatcatattaacaggcgtttgacaaggatatgaagaacatcatgcacaaaatcaccagaaactgacttgt

SEQ ID NO: 41045 - DNA, 950 bp, Oryza sativa
  Clone ID: PAT_MRT4530_44428C.1
tcagtactggcccaattctaagaccttgccaacagcccagctaaactccaggaatgtataaccatatatgtatagatcatattgtatcattgtattccttgtattctcctccatttgaggatcttgtaccttagctatacttcccctctctcctgtgccgacggccatctccggccgcccctgccgcggcgcctgtgtgccggccggccgtgccgtcgccatccgcgacgtcgcagctgcctcctcttcctcggcttcgcctccgtttcgcggggaaatcaccggagacgcgtcttcgccggcaaaacagtggcgttgccgccactgtaccgccatcagtcgccccggtcgccgcgtcagagcgtcggccgatgtcgccgtctccttcgtcgacgtcgcggcgtcgccctccaccccggcctgccctcggtttcgccggaacgccgtcgcccgcgccgcctctccctcggtcttgtcggcacccactccggcagccccttccgccatgccagtgcgccggccgacgtcgccgtctccacctctggcatcgcagcggcaaggtcgtcctcggcatcgcttcccctccatccaaacccctccgcggtccatcatcgtcgcctctgttcgttctcgtcgtcgacgtcccgtcggtcgcccggctcgtcgtctcgcggcgtcgcctccgtcgtcggattcgcagcggcgcgttccacgtcgtccccgtctccgtgcagctgctgccggctgccctcgtcgcttcctcgccggccccggtcgtcgtcgtcttcgtcctcggctccgcgtcgtcaagcgttgcaccggccgcgtctcgccttcgtccaaggatcgccgctgaagtcgtcccctcgccgtttgtctccgtcgttcccggccgcctccgccgcgcccgttcgtcgttgtcgttcccacgcctcgtcgcatggtggtaa

SEQ ID NO: 41046 - DNA, 1818 bp, Oryza sativa
  Clone ID: PAT_MRT4530_44429C.1
atgggttccgtctccagcatcgacgacttcgtcttccctcccgggcaggcattccggttcggcagcctcgacttcatcaccaacgacttcggcaagatttctctccttgactcggattcaaaccaggcgtcttctccccgtaggcctaggccagatccggcttcagcaccgatccggcctagctccagggaagtcggcgtcatactccagccactcggcacggtttcgacggatcaattggaagactacttcagctcccccggcgtcgactcacgaccaacagagatcgtagagtatgatgaattcggctaccgctatgacaaccgcgacctcgacgacttcgacgaaagctttgaagataactacacccctctctatttcggcgtcttcatggccaataacgagaaggaagaacaacaccaagcccgagaagcagaaggacgacgcgtacaacaggaggccgaacgacgccgactggaagaggagtgccaggcacaagagcaagaacggctgcagcgtgaacaacaagaactctttcacacccctcaacaaaacgcgattgcggcgatcaccctcctcgacaccctcctcaaggaagatgcgctcaaccaagctgatcacgtcgtcaacatcttgaaccagaccaagaccatgattactgcctcggtcccggatccaatcgcaggagcagaggtcacaacgagcgatctgtccactcgcctcccgaacgacacagggagcgtcaagttgaacggcctcgctccccacctcgtaggcgccccatcgatctccgtgatacaatcaaccagcgctgtgcagcatgaggctacgcccgccaccattcaccggatcgctacgacgacgacgtggatggagtcgctgcatttactaatgacctgcgtcgagtggattggtgtcacccccttcccgagcttccccgtggccgcatcacctctccccgccgtcctcctctctctcccgtgccgccggccgcctccagccgcctttccctcctcgtccgagcgccgcccggccgtgccgtcgccttccccggcgtcgcagccgcctcctcttcgccggcgctgcctccgattcgtggggaaatcaccggagacgtgtcctcgccggcaaaacagtggcgttgccgccactgtactgcctccagccgcccctgccgcgccgctcaggtgcgggccggctgcgccatctcctccctcagcgtcgccgcgtcgccctccaccccggcctgccctcggtttcgccggaacgccgtcgctcgcgccgcctctccctcggtctcgtcggcacccactccggcagccccttccgccgtgccagtgcgccggccgacgtcgccgtctccacctctggcatcgcagcggcaaggtcgtcctcggcatcgcttcccctccatccaaacccctccgcggtccatcgtcgtcgcctccgttcgttctcgtcgtcgacgtcccgtcggtcgcccggttcgtcgtctcgcggcgccgcctccgtcgtgggcatcgctgcggcgtgttccacgccgtcctcgcatccgtgcagccgctgctggctgtccctcgtcgcctcctcgccggccccgccgtcgtcgtcttcgtcctcggctccgcgtcgtcaagcctcgtgccggccgcgtctcgccttcgtccaaggatcgccgccgaagccgtcccctcgtcgttcgtctccgttgtgcccactggttataaacaaaagtacacggatggagatggacgaagtcgggggtcgatggacatctctaggacaaatgaaggctacacgagctgcggcccggcctga

SEQ ID NO: 41047 - DNA, 360 bp, Oryza sativa
  Clone ID: PAT_MRT4530_4442C.1
atggatgcttgcatgggtgagttagagaatcggctaaacacccggttcctaggtggtgcatctacttcctacaataatgagcgcatgtatggtgtttcatcggcttatagtataccatcagtacctatacaacaagattggcctatgagaagtacctacaattctaaattcatccctacgccacaatacaactcagatcgctacgacactgccggtcagactggtagtagaggccgatcaaaccgctacaacattgccggtcagatcggacgtggtggtcggtccaattgggagggcaatgctgcccaggctatagctggaaagtcttttaggatcgactcctacattgaccgttcctag

SEQ ID NO: 41048 - DNA, 282 bp, Oryza sativa
  Clone ID: PAT_MRT4530_44430C.1
atggcccttaagtacatggaccatctaattctaagcacatgtgaccccaaaattcggatttcgtacaagcgtgtgaagcttttggtcttgttgttcaacaaccaaataatgatactactagctcaagactctgaccaaaatgtaaacttcaaggtaccagttatttgcatgaacctgacagaaaacttagatgaagcaaatgtcatgtgtactttaccttcagaagatgcaacggcaataccaacacagccatcatcatataatgtatgcttcattaattag

SEQ ID NO: 41049 - DNA, 258 bp, Oryza sativa
  Clone ID: PAT_MRT4530_44431C.1
atgatatatagataccttggactcgagacgcggtggatctggctgcgggagcggggccgccgccgcgcgtccaccccggcgagggcggcacagggaggagaggcacccccagcgcctcctcatctcatctcatctcaaatccggcagcggctgaggaggaggagcaagaacctgccggtgggtggactactgcctaccgggctcgctggcaaccaagaattaaaccccaaggaaatgaacagaaagaaaggcgcgtga

SEQ ID NO: 41050 - DNA, 606 bp, Oryza sativa
  Clone ID: PAT_MRT4530_44432C.1
atggtgatgacgacgacgcgccacacggtccgcttcggctccgccacgatcgacacgacggtcaccagcgacgtcgcggccgccgacgagtgggcgcgcggcgtccgcgccgcggcgaggggcggccgcggcctgatcgtcggcctcgactgcgagtggaagcccaaccacgtctcctggaagacctccaaggtggccgtcctccagctctgcgccggcgagcgcttctgcctcgtcctgcagctgttctacgccaaccgcgtcccgcccgccgtcgcggacctcctcggcgacccgtccgtgcggctcgtcggcatcggcgtcggcgaggacgcggcgaagctggaggccgactacggcgtctggtgcgccgcgccggtggacctggaggacgcctgcaaccgccggctcggcctcgtcgggaccgggaggaggctggggctgaagggctacgcgagggaggtgctcgggatggccatggagaagccgaggcgcgtaaccatgagcaactgggagaagcgggagctggacccggcgcaggtcgagtacgcctgcatcgacgcctacgtttcctacaagctgggcgagagggtccttgccaactga

SEQ ID NO: 41051 - DNA, 289 bp, Oryza sativa
  unsure (1)..(289): unsure at all n locations
  Clone ID: PAT_MRT4530_44433C.1
ttggcccgccgggtggctggaggtagggtcggttgccgcgtcggccggctgcgccgggtcggtaggtgcggcgggaggaggcacggcggcgggcggcggcggctggccacgtgcgattcggtggggggtgttggcgatgtgacgattttttttcgctattctaatacactgacgattttgtgaatttgtgttgtgagacatttgatatgtaaatacgtgatgcccatttgatttgtgataagcnttcgatatgtgattttgtgatatccaaaaaaaaaaaaaaaaaaaa

SEQ ID NO: 41052 - DNA, 309 bp, Oryza sativa
  Clone ID: PAT_MRT4530_44434C.1
aggaatacggcacgaggcataccgcgcccgcgaggaggagggagccggacgccgccgcggggagagcaggggagagaaggagaggaggagatacgccgtcgccgtcgccgtcgtcgatactacgagcgggagcggagataggggctacacgttcacgaagctagtacagccgcctctaacgccaagaaggagatagaggatacctacgataggtacggtactacgatagcggccggtaaaaaccaccatacctactaacaagctacaagctacggcgagatacgtacaccactaataccccaccatacg

SEQ ID NO: 41053 - DNA, 212 bp, Oryza sativa
  unsure (1)..(212): unsure at all n locations
  Clone ID: PAT_MRT4530_44435C.1
gatttttttttccccccttcctttaattgttggacantggaantgttacctaattgcatgcgcatttntggggttcactcatggtggctgttagacgaatttttctaattagggggcccttttcttggtgacatggacatagactggtggtgaaaaaaaagaaaggatgccgcctggggatgttatacattttaaaaaaaaaaaaaaaaaaa

SEQ ID NO: 41054 - DNA, 192 bp, Oryza sativa
  Clone ID: PAT_MRT4530_44436C.1
atggcccagctgatgcttcagccgaacctggtacccatcctggcaccgttggatgcagggttcggcgtggacatccaagattgcatcccaatgacgccccgattatatggtcataacgggctgtcgtacggaactcggcagtctggggtggcttctcgaagtaccaggagggcatcggatagagggtattag

SEQ ID NO: 41055 - DNA, 959 bp, Oryza sativa
  Clone ID: PAT_MRT4530_44437C.1
actagtggatccccgggctgcaggatcggcacgaggccgtttcttgctccatccatctatccatccaaggagtgtggaacgccacacgtatttttttttatctatgctaatctgatcattagcagaggagagttttagcagtaggattggattaaattggagtagtttcatagtttgtgtgtagtgatcttaattagctttgattagacagacagtacagtagagtagaggatgttggctgtgttcagcggcgcggtggtggaggtgccggcggagctggtggccgccggcagccggacgccgtcgcccaagacgcgggcgtcggagctggtcggccgcttcctcgccgccgccgagccggccgtgtccctgcagctcggcgaccttggccacctcgcctactcccacgccaaccaatccctcctccgcccaagaaggtagaaagctaatcgaacaagaaaatggacgaaaaggaactgtcaaagaggtgtagtttgccatgctgctatggtacctagatctctttacggtcaaatgattggtgcttccataggaaaaacaagaggagaacaagacaggaaagaaagttaaatcaatgtttacatgaacattgccacatatatttcgatgaaagaaggccaccgcatcaccttttgttattttgcatgtccacatcaagccaccttccacagatacaaagatcctttgcatcaaaagatgacattttctgcctgtttgagggagtcctggacaatctgggcaggctgagccagcagtatggcctgtccaagggcgccaataaggtgctcctggttatcgaggcgtacaagacgctgagagacagagcaccttaccctgctagcttcatgctctcgcagctcaccggcagctacgcctttgtgctcttcgacaagtccacctcttctctccttgtggcctctgatccagagggcaaggtg

SEQ ID NO: 41056 - DNA, 537 bp, Oryza sativa
  Clone ID: PAT_MRT4530_44438C.1
atgtggggcgccgccgtgcggatgcgggagaaatcatggggagctcggcgttgtggggcgcacccgaatttgacacggaagccgtcggagtctcagtcggcgctgcggccggcctcgcgatggtacggtaccgcctgttacgtgacagttcgttatttgacgcggtcgccatacggccgtggagtcttcgatcgatcctcctcgccgcgcgcagccggcccacgcgtcgtacgcgagcgacggcaaaaatccaccggctctgggttgattgtattttggcgttacctgcacggtcgcttgcgcgcgtcgtacgtggccggggcggcaggtgaagtctacgcctcagctggcgctgccggccgggcgggcggcgccgggcgtgagagggggtttcaacgatatgtaaaacggaaactgtgcacgcgaattgtcaaacagcgtggagaagttttcagacatgctcattggatatcagttaatcattatgtgcactatgcacggataccgcataagaaatatgacttggcatttagtgga

SEQ ID NO: 41057 - DNA, 777 bp, Oryza sativa
  Clone ID: PAT_MRT4530_44439C.1
cccacgcgtccgcccacgcgtccggaactcttgcctgcaactgtgcgtggccggtggcgatggcgactctaccctagtgtattctccgctctgccgcctccaccaggaccaccaccaccttcgctacccggcgccgtaccctgcgcagccgcggggcacctcggcggcgtaacgaggcgagggggatcggacgcgcgcgcgcgcgcgaggagaaaggccgggggggatcagcgatgagcttcgcggatctggaggccggcgcggtgcgggcgcccaggagggcgcggggccccgacgccacgcgcgcgctcgtcttccagatcaccaccgccgtggcctcctaccgccgcctcctcaactcgctcgggacgcccaaggacacccccgcccttcgtgaccagctgcagaagactagtcataacattcttcaattggcaaaggatgcgaaggagaagctcaggagagctgctgaggcagacaagaacgccgatactagtgcagacaagagtttgacatgaagcttggattttgccgacgatggagagtatggaaaaccaaaatcttgcgattcagagatggcatataagccagttccccagacagcacatactacagtatagaagccagggattcaaaatctgaacagcatctagcagaatcaaagtctctcctcgctcccccccactcctcactcctttaattggtgtttgcctctacacgtttcatgtcctagaatgctagatgctcgcgattattattatttttttggctcagctc

SEQ ID NO: 41058 - DNA, 963 bp, Oryza sativa
  Clone ID: PAT_MRT4530_4443C.1
atgggttgtgaacatcatcaaaataccagagaatcagcccaaaactccaagaaatggatagaggagaatcaggggagtccacaggccgaaggccaggccgggagggcccagcccaggatcaaatcaactggcacgctcatgaacctaaaggcaagattttggacctgtgcagaagttaagcatatcttccaggccagtgtgtgtttttcgcatcaatatgcttttggcacgcctggtgggaccgagttgcgacaacttcctctcatggcagaaaagcaatcaccatcaacaggcaagcctcccaaccctccaatcaagcctccggggactactcaaccgtcatctgaagttggagctgagaatatgatcccggtcaccatagacaagttatcaccggagcataagctggagcttgaacaaataatgaaaagcgctcaggagcaattcatgaattcattcaaggaaacccgccagggaatggtcattcagaaatacaagctaaaggtggttgctgccgatgaatctggaacaaactcatctcaagacggcagaaccaagggagctaaaggtggtgcaaatggttcaggtgacaaaggtttagagcccagggatggtgaggttgaggatattggtgaagaaaatgctgagggccaacaagagtctccgaggtgcaataatttccaagaccaaatcgactatgcgtcagtggttgatggcacgatagctgagcatcaaaacacggggccagtcttcctaccatgtggcgtctttccaccgtacaggaacttgatgacgggcaaccagcagcctgccaccaatgcaccaccggttcagccaacgacagcagtttcaactccagcaccaggtgcaccttcgtcggcacagaggcatatggttaatcctcgtgtccagaccagagaacaaccgcaacatgctggacagaacatcaatcggctgacctag

SEQ ID NO: 41059 - DNA, 288 bp, Oryza sativa
  Clone ID: PAT_MRT4530_44440C.1
atggcgatcggcgaaagcagccgggccgccgtcgagtcgttcgggcccgcgccggtggccggtggtgatagtacgtacgtcgagccgggccgcattcatcggcgccccgccagcggcggcgctacgtcgtccaatgattcgcggcccgacggggcatgcaagggcccgggtcctggcctaaggttgtcacagctatggcgcaagaggccaccctttggtgtcttgcccatctcctgtcgccagcgctccctaattagcgtgtttagtcgttcagtcatcacactgtaa

SEQ ID NO: 41060 - DNA, 1832 bp, Oryza sativa
  Clone ID: PAT_MRT4530_44441C.1
cccacgcgtccgtgctatggtacctagatctctttacggtcaaatgattggtgcttccataggaaaaacaagaggagaacaagacaggaaagaaagttaaatcaatgtttacatgaacattgccacatatatttcgatgaaagaaggccaccgcatcaccttttgttattttgcatgtccacatcaagccaccttccacagatacaaaggtttcaattgacttcacaacaaacgggcctcatattcttcatcaggcggctaatgattggactaattatagttttaagaaaatggacaaacctgttttgtcaagcctatttcttaattataaaaacttaaaaaggataaacatgacagtatttggcaagctactaggttgcttttaaaaacctctttgtttatgcctttcctttagttgttgtgccattcacatggcttagttcatagtaggagtgtaggacacttagcacttggtggctactgcttaccagaagactctatccggttttgatacccacagatctgaaagaaaggaaagctgaacaagggggccatgctgtcaattcagcactatgatttgtggggcctgattacccttttttcatatcttatctagtactactaggcagattcactgaagaagtatcatccaaggaattccactcctttactccattcattataccagtacaaatatatgcttccttttcagcaagtttaggtatctaattcttgatgttaggtgcatcttgcattaagtcatagatgttccacctaattttgcattctgcactgaagtaccatgtccttcaggcattcaagaatggctgaactgataacaccaaacatactaattttcttaaattttgttgtggatgccagtttttttttatcatagggttggaaagcatctataattttacagctgctcactgagaacatacaactgcatttgtgcagatcctttgcatcaaaagatgacattttctgcctgtttgagggagtcctggacaatctgggcaggctgagccagcagtatggcctgtccaagggcgccaatgaggtgctcctggttatcgaggcgtacaagacgctgagagacagagcaccttaccctgctagcttcatgctctcgcagctcaccggcagctacgcctttgtgctcttcgacaagtccacctcttctctccttgtggcctctgatccagagggcaaggtgcctctgttctgggggataactgctgatggatctgttccttctctaacgacattgacctgcttaaaggatcatgtggcaagtcacttgcacctttcccacaaggttgcttctattccaatgctcttggaggcttgaagtgctatgagaacccaaagaacaaggtgactgctgttcctgcaaatgaagaagagatctgtggtgcaaccttcaaggttgagagcgccactgcaatcctcacagctctgcactaggatgatgtttcggtgtccggtcgttgttgggcaagaaaacctttgtacatggtggtggtgtaacatagttgcaactgatctgtatcatcttttcataaaagagaagtactgcctgcatggcaagtgcttcagtgttctgggtgtgtagtatgatctctgtacctttgttgttcaagcaggaatgaactccaggccggctgtgatcagttgaatgtagttctgttgcaaataacctgtccttgtcagttgttactatggatgtctgtttgatgtagtgatgttgtagatcactgcatttcatgaactttggtcaagtagcaagaacagagtgcagaaataagcaatgttcagagtagagttct

SEQ ID NO: 41061 - DNA, 411 bp, Oryza sativa
  Clone ID: PAT_MRT4530_44442C.1
atgggggagatggtagcaggactgcttgacgacgcactaggtgcgccagagagcgttgaggaggcgccagaggaaagggacggtaactgcggtgctgtggagatggtagaggcagcggatggtggtgatggtggcctcatttggattgatcagcttggcggcatgctaggagcactatcaaatgctgagatggcgacaagggccagggtggtgttggccggtgatggtggtcgtgctggtgaggtgggagatgtcggtggtggctatccagttcggctgtgccttagctttaatggtgcgctaggagcgccagtgattgccacgatgacttggactagggcatcaatggcggatgaggcgaaagtcggtgggaggaaggcacggccacaatgtgatttggtgatgagctag

SEQ ID NO: 41062 - DNA, 1253 bp, Oryza sativa
  Clone ID: PAT_MRT4530_44443C.1
cccacgcgtccgcccacgcgtccgtccgtttcttgctccatccatctatccatccaaggagtgtggaacgccacacgtattttttttttatctatgctaatctgatcattagcagaggagagttttagcagtaggattggattaaattggagtagtttcatagtttgtgtgtagtgatcttaattagctttgattagacagacagtacagtagagtagaggatgttggctgtgttcagcggcgcggtggtggaggtgccggcggagctggtggccgccggcagccggacgccgtcgcccaagacgcgggcgtcggagctggtcggccgcttcctcgccgccgccgagccggccgtgtccctgcagctcggcgaccttggccacctcgcctactcccacgccaaccaatccctcctccgcccaagatcctttgcatcaaaagatgacattttctgcctgtttgagggagtcctggacaatctgggcaggctgagccagcagtatggcctgtccaagggcgccaatgaggtgctcctggttatcgaggcgtacaagacgctgagagacagagcaccttaccctgctagcttcatgctctcgcagctcaccggcagctacgcctttgtgctcttcgacaagtccacctcttctctccttgtggcctctgatccagagggcaaggtgcctctgttctgggggataactgctgatggatctgttgccttctctaacgacattgacctgcttaaaggatcatgtggcaagtcacttgcacctttcccacaaggttgcttctattccaatgctcttggaggcttgaagtgctatgagaacccaaagaacaaggtgactgctgttcctgcaaatgaagaagagatctgtggtgcaaccttcaaggttgagagcgccactgcaatcctcacagctctgcactaggatgatgtttcggtgtccggtcgttgtacatggtggtggtgtaacatagttgcaactgatctgtatcatcttttcataaaagagaagtactgcctgcatggcaagtgcttcagtgttctgggtgtgtagtatgatctctgtacctttgttgttcaagcaggaatgaactccaggccggctgtgatcagttgaatgtagttctgttgcaaataacctgtccttgtcagttgttactatggatgtctgtttgatgtagtgatgttgtagatcactgcatttcatgaactttggtcaactagtagcaagaacagagtgcag

SEQ ID NO: 41063 - DNA, 440 bp, Oryza sativa
  Clone ID: PAT_MRT4530_44444C.1
ccgcaaggggatccgccagcgtacgtggggcaaatgggcagatcaaatccttggtcctcagcaagggtgtccgtgtttggctcgcaacatataacactgttgaggaggcagatactgcatatgacgctaaagcccgcaagaaccgtgtcatgaatgccaaggtcaactttcctgatgatccaaatgttgctcagaagctccacctgaagcagaacgctgtcatgcatgacaaactagcttcacctctgaagacctgtggcgatgatgctttctttcagctcaacagttcatacaatgatctgtctagcaatgcttgcaaaggcgcctgcaaagtcggcagagactgctgaactatgcccttagtcaaacctgttgctttcactgtgaaatttctgattaacatgctctttgattcatcagcaactcattcggttcttcag

SEQ ID NO: 41064 - DNA, 966 bp, Oryza sativa
  Clone ID: PAT_MRT4530_44445C.1
tttaatataaattggcatgtgtgaataaaggtgtttgagctgggtatcatagtgcattcgattatcatcgggatatcactaggtgcatccgagagcccaagcacgatcagaccgctcgtggccgcgttaacatttcatcagttcttcgaagggatagggctgggaggatgcattgttcaggctaggttccatcttaagtctgcagtgacaatggccatcttcttctcgctaaccacaccggttgggattatgatcggtatcggcatctcctccgcctacaatgagaatagccccacggccctgatcgtggaaggcattctcgacgcagcggctgctggaatcctcaactacatggcgctcgtcgaccttctagctgaagatttcatgaaccctagggtgcggaagagcggaaggttgcagctcatcatcagcatcttgctgctggttgggatagctttgatgtccttgcttggtatttgggcttgaataaaacttaagaagaaactccttaaatatctgactactcccactccgtcttataacaaaagggattttgaatagatgtaacatatccaagtacaatgaatctggacatactgtctgtccagattcgttatactccctccgtcccaaaataagtgcagttttgcactattcacatttaacgtttggccattcgtcttatttgaaaattttttatgattagtatttttattgctattagatgataaaacatgaatagtactttatgtgtgactaaatattttcaaatttttcacaaatttttcaaataagacggacggtcaaacgttgggcacggatatccacggctgcacttattttaggatgaaggtagtactagcatatgtcacgtccacccaaaatcctttatatgatggtgccattcgttatgaaaaaaaaaaaaaaaggagcggcgcgctctaaggggctaccagcctgaaggac

SEQ ID NO: 41065 - DNA, 1223 bp, Oryza sativa
  Clone ID: PAT_MRT4530_44446C.1
ccggccggaaaatccatcctgtcgtgttgttagcttcgttttcttcttgtttcatcaatccaaggagtgtggaaggccacacgccaagattatatctatgctaatttgattagcagtaggattaattcagtggctagcgtagcttgattagttggtttaattagttggagagtaaagaagatgttgggagtgttcagcggcgacgtggtggaggtgccggcggagctggtggccgccggcagccggacgccgtcgccgaagacgcgggcgtcggagctggtcagccgcttcctcggcggcgccgagccggccgtgtccgtgcagctcggcgacctcggccacctcgcctactcccatgccaaccaagccctcctccgcccaaggtcatttgcagcaaaagatgacatcttctgcctgttcgagggagtcctggacaatcttggcaacctgaaccagcagtatggtctgtccaagggtgccaatgaggtgctccttgtgatcgaggcgtacaagacgctgagagacagagcaccttaccctgctagcttcatgctctcgcagctcgccggcagctacgcctttgtgctcttcgacaagtccacctccaccctccttgtggcctctgatccggagggaaaggtgtctctgtattgggggattactgctgatggatctgttgccttctctgacaacattgacctgcttaaaggatcgtgtggcaagtctcttgcacctttcccacaaggctgcttctattccaatgctcttggagttggaggcttgaagtgctatgagaacccaaagcacaaggtgaccgcagttcctgccaaagaagaagaaatttgcggtgcaaccttcaaggtggaaggatctacaatcctcacagcgctgcattaggagatttttggatctccagctgttgttgggaaaggaaaactctgtagtctgtaaatggtggtgtaacatagtcgcaaggcatgcatctgatctgtatcatcatcttccgtaaagactagtgctgccagcatggttagcacttttcagtgtttgggtgtgtgtatgatctgtatcctatgctgttcaggcggaaatgaacttcaggcccagctgtgtcagttgaatgtagttgtgttgcaaataagtttttcttgtttgttatcactgtgattgtgtcttatgcagttatgcttgttgccggatactattcaaaaaaaaaaaaaaaa

SEQ ID NO: 41066 - DNA, 644 bp, Oryza sativa
  Clone ID: PAT_MRT4530_44447C.1
cattagtgatgtgctgctcgacctgtctatcgccttcctgtctctgtgctcttctgttgactccgctctttatacaaggtgcctacgcgtgacataagcctgcccggggcttgcacgcagcgcatacttgctagggtacctgcatttgagcccttatcacaggtgcgaccggaggctgatcacacagagtgcttcgttgagagaaatgagcagtgtctgtgcaccgggtcttctgcattccgcgcctgattgaacccatggtcttgaggagcctggatcctgtatcactgctgctctagcctacataacccacggaaagggcgacgtatgatggagttttcctgggtggccatgaacacagcaccgcagctctgctatttgactaagacagagcggccaagctcatatgtttatagatgagcacaggaagattcgcgagttgatgagggggatgttgttgccattacagctagaggggcacatcgttgctacagaggcggagatacaccagtctgctgctcggctatgcttatgacataaagagttttgctaatcagattgcaccgacgccgactgagctgttattatctggtctcaacctgagagggcagcgaatattcgtacattccatctttcaacactct

SEQ ID NO: 41067 - DNA, 937 bp, Oryza sativa
  Clone ID: PAT_MRT4530_44448C.1
gcacgagggagagagagaactagtctcgagttttttttttttttttttttctcctgtttttacaaatctactctcgttttactccacaagaacaaaattatacatacaggttgctcctcatgcaccaattaatgtatttcacttctagcttaccgatctgttcccttagaattgacatgaaaaaaaatagcctcgctatatcacattacacacggtatgatctgatgacatcgttcctaacagtatcagcaacacagtaattaattcagtaatcatcgtagtcgtcgtcgttcctgttgagaaaccgcctgacagcgccaacgatcgttccgagcacgatgaacagcaccagcgtgtcgaagccgccgccgacaccgacggccacgctcgggccgggagcgaagaacgagaacggcgaccaaccgtagccgtagccatagccgtaaccgccgaccagaggcggcgccaccggtgggttgatgtagatgttcgtcctcgaattgtttatccgtggaccagacggccgtggcgcggaccgtggcgcagaccggaacgcctgcccgccgaccctcccgccggacttggccgccatggcatcgtcgacaggcgagagcgcgagcacgccggcggccagcgcgaccatcgccagcttgccaagcttcaccggaagatcaccccgcgtcgacggcgcctcattggccgccctgcacgagagcctcgccgatggccgccgcctcgtcggcttcggcgccgggagcacggccgccgtgctgcccgcactgcacagtggccttccggtgaggaagcaccggagagacgtgggtgctaaagccatggctgctactcgagctttcttgcgagcttagattgagcttttgctctcgattcgtcttctttctctcagcttcgtcttgggacgcgtgggcgggcccactag

SEQ ID NO: 41068 - DNA, 249 bp, Oryza sativa
  Clone ID: PAT_MRT4530_44449C.1
aaaaaggcccattccaagggcttattgaacaataaataaaaccccccccttcataatttacaatagctgaacattttttggggggttccatacaacaacccggggggtcaatttggttcttgcgggttcttaaatggggaaagagttcccgggaaatacaagggaatacaagggcattttttacattttttattggtaaccattcccgacccgtgggcggacccctgggccgacccctgggcggccccc

SEQ ID NO: 41069 - DNA, 751 bp, Oryza sativa
  unsure (1)..(751): unsure at all n locations
  Clone ID: PAT_MRT4530_4444C.1
ccacgcgtccggtcgcagtcgcccacacccttgccgcaccatggctggaacccgcggcggattcgagaatcattagatgattacttgtggctttcttgcaagttgtgcagttgctgcctcaagcttgctgcctccctctgccaaatctatcagcaaaaaaagaaaatcatgtcagtttccttgaactatatacatatgattaatctagaaacgcagtatgttgccaaaaatcacacacaactcaatcacatatgcatttgagatgaggtaaaatgctatctgattcacatagttccaatatctcaagatgtgggatatgcgtagcacaagtgcatcagagtgttatagttgttcagtcttcagtacttattattctagattaatttggaccaacttgtcaattcagctgacacttgtttttgtctagtgctccagtagcttggttgtttcatcatcattagacttttaaacctttggtcctaaactcctagctgaaaaatttgcacactgaacttccctgtgttctaaggaaaaaaaaaatctagacataaccttgctgatctgtattatggactggccattggagtgcataatgcataactgctgatcactttgttggcacaaaacttacgcatagacataggaggtacttatgtataattgtatctttatcaggactttgttttcaaccatattgttgatataacagttatactgtagtaatgatgagtacagnctccaatgtaaactc

SEQ ID NO: 41070 - DNA, 2787 bp, Oryza sativa
  Clone ID: PAT_MRT4530_44450C.1
atgggcgtcgtcacctccctcggcctcggcggcgtccactcctccatcgccgccgccgagcatgagctcagccttctccgcggccacctccgcagcggaggagcctcctgccgcggcgcggacgacgacgaccaagaccccattgatagctgggccaatcaggtccgtgacgtggccttccagctcgacgacatcaccgacgagtgctgcttcctctccggctccggctccggccatggcttcgcgcggtactgcgccaacgtcccgacctggatcgccctctcgaggaggctacgcaaggtgcgggagaagcttggccagctgttggaagcggcgaattaccagcggcaacgcgtcgacgtgatgaataattttgttagctgcggcgagcttcgccgcgaagatgatgccgtcgccgctggccggaggatggcggagaacgcgcgctccatggacaaggaggagatcatcggcttctccgatcaccgggaagtgcttgtgagatggctgctggctgaggacgcggcggagccacgccggcggacgctgctcgccgtgtgcgggatgggcggcgtcggcaagacgaccctcgtcgccagcgtctacaaggaggtgacggcgccggcggcggcgccggcgagtcaccacttcgactgcgacgcgtgggtcaccgtctcgcagcgcttcacgatggaggacctcctgatgaagatcctcaggaagttgaacttgaacaccgtcggtcgtcgtgctggtactggtaggcggcggcggcgaagcgccaccgacgtcggtgacggcggcggcgacacagactacgggtcgctcgtggcggcgctgcgggagcgtctcgccaacaagaggtacctgatcgtgctcgacgacgtgtgggacgagacgctgtgggacggcctggagcgcgccatgcccgacggcgacggcgtcgctgggagccgggtggtgatcaccacgcgcaagagcggagtcgccatggccgcggcgccggagaggacaatggcgctggagccgctgccgacgcaccaagggtgggcactcctttgcagcgtcgtgttcaaggatgttcccggccacaggtgcccgagccacctcagggaggtcgccggagacatgctggagcggtgccgcggcttgccgctggccatcgtcgccgtcggcaagctcctcagacacaaggataggacagagttcgcctggaggaacgtccgtgacagcctagcctgggtcaagaacagcgaagatcttggcattggagaggcctccagaatactgaacctgagcatcgacgatctgccatacaaactgaagaaatgcttcctgagttgcagcatatatcctgaggacttcttgatcaagaggaagatcctgatcaggagctgggttgcgcagggcttcatcgacgaggcaaaggaagttgctgtcaggaatgagtttggccgtgccaagcggttcctcatccatgacctcatcaaggatttgatcaatcacaggtccaaacatgaagaggggtttgttcagttcgcggagtgcgatctaacaatggattctaacattagggttcgccatctcgcactcgacagatgcaccagcagcaggcgatctgcatctgctgcgaagatcgccgcgcttcgctccttccaagcatttggttcaaaacttgatgcctcgctgatgtcttgcttcaggctattgactgtgctgaatctatggttcatcgagatcaataagctgcccagcacagtgaccaatcttcgcaatttgcgataccttgggatacgatctacgttcatcgaagagcttccaaaggatctaggcaaattacagaagctgcaaactctggataccaagtggtccatggtccaaaagttaccaagcagcttgtcgaaactgaagagcttgcgccacttgatactgcttaagcgccatgccgctgactactataggccctatcctggcacgccagtaggacaacttcctgcagggttacaaaacctgaccagccttcagacactaaattatgtcagagctgatgagatgatctccaaatctttagccaagctggagcagatgaagagcctggagttgttcgatgtggatgcaagctttgccgctgttctgtcatcgtctatattgaaaatgagccacctgcaacgcttggggctcactaacagtaacacggagagtgtaatagatttggagtccatcactgtagcgcccaggaagctacagaagcttgctttgtctggaaggttagcaagagggaaactgccaggatggacctgcttccttacaagcctcaagcaggttcatttgatcgcgagcggaattgcgcaagattcactcttgcttctttcgtcgctgccagggcttctgcatcttagcctcaatgccgcctaccgtgagaaggagatgacctttgccgcaggtggctttcctgcactccagacactcaccttgcatgagttgagtaaccttagtcagatagagtttcagagaggatgccttgctgagctacatgaactggtgcttgacaagtgcaccaagctagctgattcaccaaaaggcatggagaacctcacacgtctccagaatctgaaacttgttggaatggcaccagagctgatggagaagctgcaggatggaaaaggagatgatgggtgttattacaagcctggcactggcagctcaatgatctgtcaagtgcctagcccttcaagataccatatgaaatcaatagttttcctaaaaccaccagcagtgctcgtctag

SEQ ID NO: 41071 - DNA, 587 bp, Oryza sativa
  Clone ID: PAT_MRT4530_44451C.1
ccgatgaggaagggggagagatgaatcgacggccgacgacagcgaaggcgggcgtgcgcggcactgggctgctcaccgtcggcgaagacgagacttggagcatgacgagcgccgccgctctcgcccgccgccccgcccgccgctcccaccgtcccggccgcctctctccccctctccgcgtcgcccgccgccctacccgccgctcccaccgtccagaccgcctctctcctttctcccgcttcttccccgcgcgtcgccgcgcccgctccgtcccggatgcctctctccccctttccgcgtcgcccgccgccccacccgccactcccaccgtccagaccgcctctctcctttctcccgcttcttccccgcgcgccgccgcgcccgctccgtcccggacgccgcgcccgcatttcctcgcctgcttcgcgccgcccgcctaccgtgctcttttgccgctcgccgccggcctcccctcaccgaagaagagaagagagaagagagagaagagaagagaaggagaggaaaagaggagagggtggctgacatgtgggccccacgtattttttttaattttttttgctgactag

SEQ ID NO: 41072 - DNA, 343 bp, Oryza sativa
  Clone ID: PAT_MRT4530_44452C.1
gacaagataaaacaaaattaagttcgtttaacatgcgcgcgcgcgtttaattggtaactagtgctctagcgagaccacccacgcggtaagcttgaatcatatcggcaatgtatggttggccgggatgcgtgggatccatgactttggaggtggcatccatgccagcatcagacatcactgcgtccatgccgccttggtgctcttcgtttgcaaacgaagtcacgtcatagaccttgtctttgataatgacccacaagtcgtttttggtattgtgcttggcgacttcggccttggtgaattttttcaacacaggaggcgctggttttgatgtggatgtcttcac

SEQ ID NO: 41073 - DNA, 165 bp, Oryza sativa
  Clone ID: PAT_MRT4530_44453C.1
atggttctatccaccatccattgtgatcccaaggatagcttcctgccattgagtcgtcatggttttttgaggacgtccaccttcccgcctctcaggaatcctactgatggcgacaccactgtagacacccgcctcgcggtcctaccaatggctgccccaccgtag

SEQ ID NO: 41074 - DNA, 1157 bp, Oryza sativa
  Clone ID: PAT_MRT4530_44454C.1
atgaacgataattttatatttaatgaagtcattagctctcaagggcttctagaaattcctttgcaaggccgttcttatacatggagcaacatgcaagttgatcctcttcttgagcaacttgagtaggtttttacctaatactcatgctttggtgatggctagaagtgcctctgatcatgcttcgattaaagtccaaattgctactacaatccccaaatcaaatgtatttcgctttgaaaacttttggctgaattaggcaggttttcatgatcaagtcagaaatgtgttggagggcttcagagttactcaagatcaggcaaacataatttcggccaatttcaaaagattaagaagctctcttaaaaagtggagttcttgtttggctaaactctccaggactacagagaattgtaacaaggtgatcttgtttcttgataaactggatgaattccgcttattgaatgttccagagctaagattcaaaatgattgttaaaagccaagttgcttctcttctaagttggcagtaacaatattggaagcaaatatttaaacagaaactggttcttcttggaggggaaaacacttagttctttcatgccatggccactgaaagatttagaaataatgacatctcctttcttcaagattcaaatggcaatcaagtgagtgatcatgaaggaaagggtgccatcttttggaaagtttcaaggatagaatggggcttactgataatcctgaaatggtttttgatgtctctgagttgatagaagacaaaggggatctctcttctttatgtgcacagataaccactaaggagattgatgagactgtgaaaaaaatgcctggtgacaaagctcttgaaccagatggcttcgatgggtgtttttttaaatcttgctagggaataattgctcaagacttctgtagactttgtactgatttctggggaagtaccgttaacttatctgcaatcaaatattcttacaaaactttggtcccaaagaagcctagtcctcaatcccctaatgacttcaggctgatctccctcatgaatttctttgtaaaaattatttgtaaagtttttgctgatagactgcaaccattgatgacaacattaattatagaattcttgtatttcttcttcgacttgaatac

SEQ ID NO: 41075 - DNA, 670 bp, Oryza sativa
  Clone ID: PAT_MRT4530_44455C.1
ccggccgggaaaacgctcccaaccccgcttcgccttcgccccggtggccgcagccgcgcggcgccactgccccccaaccagccaaactcccccacctcacggcactgcacccgcaaaaatctcagctcccacccgccgcgccgcgccgcgccgcgctgctcccccaaccaaatcccttctccatggcatccgccgtttcgctcctcctcctctcgtccccgcgcccgctccgccgcgcggcgccggtgccagcgctacgctcccaggcgcgccaccccttgctcctcggccacgcgggcgagaccgcgctcggggtatgggccacgcgcgcccgcctgcccgcgccgccgccgcgcgcctccaacccgaacaacgacaacgacaacagcggcgccgtggaggcgcccgaccgcctggtggccgccgtcgcctacctctacccgttcctcgacggcgtgcaccacggccgcttcctcctcgcgcagttcccgctcttcagcaccctgctcagcccgctcgcgccggccgcgcgcctcttccgctcctccccgctcacgcccttcctcctcttcctcaccctctacttcgccgtcgtgcgcaaccagcaggccttctcccgcttcgtccgcttcaacgccatgcaggccgtcgcgctcgacgtgctgctcat

SEQ ID NO: 41076 - DNA, 1011 bp, Oryza sativa
  Clone ID: PAT_MRT4530_44456C.1
atgtcgccggcgccgcgggtgttggtgttggtggtggccacagtggtggcgctgcaggtgtcgccggcggcggggcggatcccgggggcgtacgggggcggggagtggcagagcgcgcacgcaacgttctacgggggcagcgacgcgtcagggacgatgggcggggcgtgcgggtacgggaacctgtacagccaggggtacggggtgaacaacgcggcgctgagcacggcgctgttcaactccgggcagagctgcggcgcgtgcttcgagatcaagtgcgtgaaccagcccgggtgggagtggtgccacccggggagcccctccatcctcatcaccgccaccaacttctgcccgcccaactacgccctcccctccgacaacggcggctggtgcaaccctcctcgcccccacttcgacctcgccatgcccatgttcctccacatcgccgagtaccgcgccggcatcgtccccgtctcctaccgccgggtgccgtgcaggaagaagggaggggttcggttcacgataaacgggttcaggtacttcaacctggtgctgatcacgaacgtggccggggccggggacatcgtgagggcgagcgtgaaggggacgagcaccgggtggatgcccatgtcgcggaactggggccagaactggcagtccaactccgtcctcgtcggccaggcgctctcgttccgcgtcaccggcagcgaccgccgcacctccacatcctggaacgccgcacccgccggatggcacttcggccagaccttcgagggcaagaacttccgggggtttggtttggagttgggggtgatggggaggatttgtgctcaaagagtggctgaagtggctgcaaagctgcagctgaatttgggggtgtgctggaatgatgattcttgccggcttctttccgtgaatgcattctctgtgttctccgtgagttgctcgatgggggagtgccgaaattacgtgaaagggataaaggtgaaagcaaaagtgcgatgcgagtag

SEQ ID NO: 41077 - DNA, 226 bp, Oryza sativa
  Clone ID: PAT_MRT4530_44457C.1
cccacgcgtccttcggcggatgaaatgggtatgtacggcaaaccggttaagagtaagcaagggttgtctagaagacggacattataccttgatgaggagcatgtgaagacattgatcatgcggggaatgaattggctatctatggccaaacggacatgggcaagcaaggattggctaggatggaccatgtggggggtgaagggcaagcatgacgcttggtgcctat

SEQ ID NO: 41078 - DNA, 1440 bp, Oryza sativa
  Clone ID: PAT_MRT4530_44458C.1
gcacgaggcactccccgccgctccactccactctcgccgctcgccgttgccactcgcactcacaatgtcgccggcgccgcgggtgttggtgttggtggtggccacagtggtggcgctgcaggtgtcgccggcggcggggcggatcccgggggcgtacgggggcggggagtggcagagcgcgcacgcaacgttctacgggggcagcgacgcgtcagggacgatgggcggggcgtgcgggtacgggaacctgtacagccaggggtacggggtgaacaacgcggcgctgagcacggcgctgttcaactccgggcagagctgcggcgcgtgcttcgagatcaagtgcgtgaaccagcccgggtgggagtggtgccacccggggagcccctccatcctcatcaccgccaccaacttctgcccgcccaactacgccctcccctccgacaacggcggctggtgcaaccctcctcgcccccacttcgacctcgccatgcccatgttcctccacatcgccgagtaccgcgccggcatcgtccccgtctcctaccgccgggtgccgtgcaggaagaagggaggggttcggttcacgataaacgggttcaggtacttcaacctggtgctgatcacgaacgtggccggggccggggacatcgtgagggcgagcgtgaaggggacgagcaccgggtggatgcccatgtcgcggaactggggccagaactggcagtccaactccgtcctcgtcggccaggcgctctcgttccgcgtcaccggcagcgaccgccgcacctccacatcctggaacgccgcacccgccggatggcacttcggccagaccttcgagggcaagaacttccgggtctgaattgaatgaagcaaaactgcaatataccctcttatttactcatctagtaattactgtcattatagcgagcaggtgtgttttttaccttggttaagtttgggttcttcttcggttggtggccttgtcaaagtgaggggccgggggaaaacaggtggtaaagactagtactagtgtcaattagggttaaactggtaaattgctagtactgctgttactcatcatcatcatcgctagtggtcactgctagtagtagttgtgctagtgcatgtatggttatggatactgcatcatgttggttggtgatggattttgtcaaaaaaaaaaaaaggggtttggtttggagttgggggtgatggggaggatttgtgctcaaagagtggctgaagtggctgcaaagctgcagctgaatttgggggtggtgagtgtagcccgcagccgcttgtgccgtgtcatttgtctctatggcacttgatgtttatcatggacttgatttatcattatggtgattggagcttgtaagaagattaattgcctcaaaaaaaaaaaaaaaaaaaaactcgagactagttctctccctcgtg

SEQ ID NO: 41079 - DNA, 330 bp, Oryza sativa
  Clone ID: PAT_MRT4530_44459C.1
atgagctccctccaaaatcgatctaccggcatgaaccatccaaaccctccagtaggattacgcaccaaacagggagcctaccccaaccacatcctagagcagccactgtacagccgtcctggctcactgttcaaccgcctcgagattcgtgcactcttcccctccatcaatgctcgcgtgcgtggtcctcccccggagcttattactcccgaccgaccggcgggcccggcccggcgatgtgaggcgctggaccgatccgggccgtccgatgcaccaacggacggccgagatgctgaccagtccgatcccccgcttcgtccctttcccgtt

SEQ ID NO: 41080 - DNA, 774 bp, Oryza sativa
  Clone ID: PAT_MRT4530_4445C.1
atgggccagcaccaaattccttgctttgtctgtcagctgtcgaagtgctgtcttccgctgtgggggtgtccattcttcaccttgagcaggagcttcatgatcttcctctccttctgctttctggagatagctgctccccctcctcctcattcagcaatgttccaaagactggaggttcaagaatcttgtacccttcctgaggaacatagtatcaagctcctcatccgtaagaggcctgttccgctcctcaagtcccgctcccaccgcaagagctggtactgctctggagtcattggaccagagaagcaatctggccggggtgttggcgtcgcaaggttgtcaccaccaatggcgtcggaccaggagtgtaacctgcaggcgtcgcagcaccagtgcctcaggtgtagcactacccatactagcaggagtctcatcccatctcgatcttgcttcttgggtgttggcgtgacaagcccaccaggcagcttaggagtagatcccaagctccagaaggtccgcacggaagggtccggggtggcctcaccggcggcgaagggtgtggcgctccggcgagatgatgcgggccagccggcggcggcgatagtctcctcgcggtcgatgatgcgctgcgacttcttggggaggccgtcgtcctggcggcgcgggggatgtcggcggcggcgacggcgtggccggtgtaggagcgaggcggcgggcggcggggttgacggccgcctcggagtcgtcctcggagcggggatggaggtgtcgtag

SEQ ID NO: 41081 - DNA, 1883 bp, Oryza sativa
  Clone ID: PAT_MRT4530_44460C.1
caccaactaaaatcaaaccaccaaaacacaacacagggacgtatcgcacagccagtgagcgggtctagttcgagcagcatggcggcctccgcgatgagggtggccatcgccaccggggcgtcgttggcggtgcatttgttcgtcaagtcgttcgtgcaggcgcagcatcctgctctcaccttgctgctgccagtggctgtgtttgtcggcattgcggtgggcgcgaagggcgggagcggtggtgacgggaaggcgccgccggggccggcggccgtgccggtgttcggcaactggctgcaggtgggcaacgacctgaaccaccggttcctcgcggcgatgtcggcacggtacggtcccgtgttccgtctgcggctgggcgtgcgcaacctggtggtggtgtcggacccgaagctggcgacggaggtgctgcacacgcagggcgtggagttcggctcccgcccgcgcaacgtcgtcttcgacatcttcaccgccaacggcgccgacatggtgttcaccgagtacggcgaccactggcgacgcatgcgccgcgtcatgacgctgccgttcttcacggcgcgcgtcgtgcagcagtacaaggccatgtgggaggccgagatggacgccgtcgtggacgacgtgcgcggcgacgcggtggcgcagggcaccggcttcgtggtgcgacgcaggctgcagctcatgctgtacaacatcatgtaccggatgatgttcgacgcgcggttcgagtcggtggacgaccccatgttcatcgaggccaccaggttcaactccgagcgcagccgcctcgcgcagagcttcgagtacaactacggcgacttcatccccatcctccgtcccttcttgcggggctacctcaacaagtgccgtgacctccagagcaggaggctcgccttcttcaacaacaactacgtcgagaagagaaggaaggtgatggacactccgggagacaggaacaagctccggtgcgcgatcgaccatatccttgaggcggagaagaacggcgagctgacggcggagaacgtgatctacatcgtggagaacatcaacgtggccgccatcgagacgacgctctggtccatcgagtgggcgctggccgaggtcgtcaaccacccggcggtgcagagcaaggtccgcgccgagatcaacgacgtgctcggcgacgacgagcccatcaccgagtccagcatccacaagctgacttacctgcaggccgtgatcaaggagacgctgcggctgcactccccgatcccgctgctggtgccgcacatgaacctggaggaggccaagctcggcgggtacaccatccccaagggatccaaggtggtggtgaacgcgtggtggctggccaacaacccggcgctgtgggagaaccccgaggagttccggcctgagcggttcttggagaaggagagcggcgtggacgccaccgtcgccgggaaggtggacttcaggttcctgcccttcggcgtgggccgccgcagctgcccggggatcatcctggcgctgcccatcctggcgctcatcgtcgggaagctggtgaggagcttcgagatggtgccgccgccgggcgtggagaagctggacgtgagcgagaaaggcgggcagttcagcctccacatcgccaagcactccgtcgtcgccttccaccccatctctgcctgaactcatcgaatccctttgaatcaagttcgtgccatcagtcgataaatccaattaaaatttttgtttgtttataaaattgcagaagaataggttataaatgacagcttacagcatgttttcagttttgtttcctaaagagtgtaatttgaaaagtgaaatggaattgtcatccaactagtgtgagaaagtgctctgctttgcgt

SEQ ID NO: 41082 - DNA, 1533 bp, Oryza sativa
  Clone ID: PAT_MRT4530_44461C.1
atggcgatcgctctccgattagcggccgcgccgctccgcctccgcctcgtctcgccggcccctccggcgatcggcggcgcgggagatggaggacgacgaggaggaggaggagcagctcgtatcggtgtcctgggcagggctcgctgccgccgccgccgcggcggaggcgggagactggaggtggcggcggcggccgccgatgactccgctcgctgtcgggccaagggagtgggcgccgccgccgccgcggcggaaaccctaggtgggatcggggtgggaggtggggaccagctgagcgtggtgatgaagttcggggggtcgtcggtgtcgtcggcggcgaggatgcgggaggtggcgggcctcatcctcgccttccccgaggagcgccccgtcgtcgtcctctccgccatggggaagaccaccaatctcctcctcctcgctggtgagaaggcagtgggatgcggcgtgatccgtgtttcggaaattgaagagtggaatttgatcaaagatctacacattaaaactgtggaggaacttgcactgccaagatctgtaatacacactatgctggatgaactggagcagctcttgaaaggtattgcaatgatgaaagagctgacacttcggaccactgactaccttgtttcatttggggagtgcatgtctacacggatttttgctgcttatttgaacaaaatcggagtaaaagcacggcagtacgacgcatttgatattggtttcataacaacagacgatttcggaaacgcggacatcttggaggcaacttatcctgctgttgcgaagagattacatggagactggattcgtgatccagcgatacctattgttactgggttccttgggaagggctggaaatcaggcgctgtaaccactttaggccgaggtggcagtgacttgactgctacaaccattggtaaagccctggggttgagagaaattcaggtatggaaagatgttgatggtgtactgacctgtgatccaaatatctacccgaatgcaaccactgtgccatacttaacatttgaagaggcagcagaacttgcttattttggtgcccaggtattacatccacaatctatgagacctgctagagaaggtgatataccagtcagggttaagaattcgtacaaccctaaagctccaggcaccctgatcactaaacaaagagagatggataaggttgtgctaactagcatagtgctcaagtcaaatgtcactatgttggatatagtaagcactcggatgcttggtcaatttggttttctggcaaaggaacttgaccatgtagttgaagagcttgagaaaattgcagttgtccatctacttcagcagagggcaataatatcactcattggaaacgtacggcgatcatctcttatactggaaaaggttaacatgtctctgattgttcatgatagcgaggcaaagcagtgcataaaggccctccaccaggcgttcttcgaggacgatgtcctgacagaagtcgaggaagaagcccttcacatgagctga

SEQ ID NO: 41083 - DNA, 1343 bp, Oryza sativa
  Clone ID: PAT_MRT4530_44462C.1
tttggggagtgcatgtctacacggatttttgctgcttatttgaacaaaatcggagtaaaagcacggcagtacgacgcatttgatattggtttcataacaacagacgatttcggaaacgcggacatcttggaggcagcttatcctgctgttgcgaagagattacatggagactggattcgtgatccagcgatacctattgttactgggttccttgggaagggctggaaatcaggcgctgtaaccactttaggccgaggtggcagtgatttgactgctacaaccattggtaaagccctggggttgagagaaattcaggtatggaaagatgttgatggtgtactgacctgtgatccaaatatctacccgaatgcaaccactgtgccatacttaacatttgaagaggcagcagaacttgcttattttggtgcccaggtattacatccacaatctatgagacctgctagagaaggtgatataccagtcagggttaagaattcgtacaaccctaaagctccaggcaccctgatcactaaacaaagagagatggataaggttgtgctaactagcatagtgctcaagtcaaatgtcactatgttggatatagtaagcactcggatgcttggtcaatttggttttctggcaaaggtcttctctatattcgaagatctagggatatctgtagattgtgtggctactagtgaagttagtatttctgtgtcgcttgatccatcaaagatctggagcagggaacttattcaacaggaacttgaccatgtagttgaagggcttgagaaaattgcagttgtccatctacttcagcagagggcaataatatcactcattggaaacgtacggcgatcatctcttatactggaaaaggcctttcaagtgttgaggaaaagcggggtgaatgtccagatgatctcgcaaggtgcatccaaggttaacatgtctctgattgttcatgatagcgaggcaaagcagtgcataaaggccctccaccaggcgttcttcgaggacgatgtcctgacagaagtcgaggaagaagcccttcacatgagctgatcagcttagtccgtacaaccccagaaaaacaaatattgcaacctggagcaggttttctagcatcgcctccagttattttttcactcgtatgaccagcattcgatgcgttgtttcctcgctagttcaggtggtttagtttgacatttggtagctcgatctgttttttaccaggatgcaaaacgactggagcatgcgtcacaagttcctcgcttgaatgtgctttcactttggatctaaagtgccttaaaagtattaaaaaaacttgatctaaaaaaaaa

SEQ ID NO: 41084 - DNA, 381 bp, Oryza sativa
  Clone ID: PAT_MRT4530_44463C.1
atgccggatcggcgggaatcgtgcacgcatgggctaggggaggtgctcgtgtgcgcacgggccgtctccatcgatcgatcgatcaacctgcccgcttgctcaaccaatttgattaacaccaattctgaatctctgatcatgcaagcgcaggctgggatggtggagcagcctccacagatccgttctgtcaggcatcttggcttacgggtgaactacacagcgatggtccacatgttgccccgccagatagagcagatcctgaagagtttcccacgtttaaaatcactgaaaatcctgagatgcgatgacgttacagatatggattggctatttactattgggcaagaagtgtttggtgctttgcatccaacagccatatga

SEQ ID NO: 41085 - DNA, 1924 bp, Oryza sativa
  Clone ID: PAT_MRT4530_44464C.1
tcgacccaggcgtccggagcttcttcgtttgagggattttcttctcccgggaggcggaagaggcgtaggcgaggattcttgtaggaatcctctcctctccattgatgcaccgaatggcttctcttcttctccccccgcagtttctttgctccctgccttgtagtaccaactcaatcaggagccatttacattataagccccacttcttgggaaacattatgactaagcctaaagctaaaatgaggctgctcaaccgaaacgtaagttccatggcaaagaagagctctcaagatgtagcagaaggttcaagtgatgatgagagtgacggcgagacatcaaaaaccaagaaaagagctccgagacgtggaagaaagaaagccaccatacaagcatcagaaggggaaacacaagaaggtcaagtgagcactgaagaagatgaatcccctgaagggactaagaaaataaaaaggaggggccgcaagaaagctgcaactactgcaagctcatcggaagagaaggacaaagcaaaaaaaaaaaaaaagaggggcagaagaaaagttaagactgtagaggaattgagtgacaatgaaggggaagatctgggtgaagatctagtgccctccaatgacaggcaggagaaaatttcagcaaatgacctagaaagtaaaatagcagcattgctattagaagatactgatgataatgatattaacaatttaatccctcttgtgtgctgctttgggcctgctaagtactcatttattccttctggaagacctgctaataggctgatagatcatgaaattcatgagggaatgaaagacatgttctggtctccagatcaatttgtaagggcaccaggaggatcatcatccaatgttgctcttgctttagcagcttctggtggccgggttgaattcatgggaaaactaggcgatgatgattatggtcaaagtacattatatcacttgaacgtcaatggagttcaaactcgggcaattaaaatggacccttcagcgtttactgccatgtccttgatgaaggtcacagaggattgttttgtccaaactgatatcaacccagctgttttaaaagaggctaagatgttttactacaattcttcagctttgcttgagcccacgacacgatcatcattgtcgaaagcaattgaggtttccaagaaatttggtggtgtaacattctttgatctcaatcttccactgccattatggtcgtccagtaaggagaccaagtcacttgtcaaggaagcatgggaagctgctgatattattgaaatcactaagcaggaacttgagttcttgtgtggcattaaaccatctgagaaatttggtacgaaggataatgataaatccaaattcactcactacagcccagaagttgttacgaaattgtggcatgaaaatctcaaggtcctttttgtgacaaacggcacttctaagattcattattacacaaaagagcatgatggctgggttcgtggcacagaagatgcaccaattactcctttcaccggtgacatgtcacaatcaggtgacgccattgttgcagctctgatgaagatgctggcaattaaccctcacctggtcactgacaaggattacttgcatactgcaatgaaacatgctattacatgtggtgtcattgaccagtggttacttgcacgagaacgagggttccttcccagagaaagagcagatccaaccagtgaacagtttggagtgagattcgtcacagagaaggaataccgtacacttcctgattccatacatacagaggattcatcagagagtgagcttttatatgtggagtgaaacaaagaaaatgcagaggcatgtaattttcaatagagggaaaaacctacagacatctggtgatttttcttgaagcaccatttatgggaact

SEQ ID NO: 41086 - DNA, 657 bp, Oryza sativa
  Clone ID: PAT_MRT4530_44465C.1
atggtggtactcaccggcgtgcggggtgaagcaggccctgacggtggatttggctgggcggatggcggacgcgactattgccaggggcaagaaaatggcgaggctgctggggccgccaaacggcgacataacgtcctgacgggggaggtgttccgcactgtgctggtgttcgatacggcggcagaggagttccgcacgatgcgcaggccgtgcgactactcccaagatgccgactggaccagccagctcaacggagtacagggcaccatggccgcttcgtcgtacgacgcagacggcgacggagtgttggcgctgtggctgctccgggactacgacgaggaggcatgggaatgcgtgtaccgcgtcgccgccgggttcctcggcgacgtggccaggatgatggggttcttcgtcgcccacatgagcgacgacagcggtggtggggacgcactgctccggtcaagtcaggggcatcggtatggggtttacaacctcaaaagactcaagaggggcgaggtggtggccgccgacagggagttcggcggtgacgacgacgatggtgacgatgtctcctcgcgacgcaacatgtctaccaggagagcttcgtttctcccgtgcacccaccgccgccacctaccctctccccgccgctcgtag

SEQ ID NO: 41087 - DNA, 664 bp, Oryza sativa
  Clone ID: PAT_MRT4530_44466C.1
ggatccccgggctgcaggaatcggacaggcgtctattcgtctctaccaatcctgccgctcgtgctctattgttttccatgatttaaaaggcctgttttgcaatggtggactggtggtactagcctgctagtttctagttccgaagatctagggtttcatgtgcacaatgctgcattgtagttgctccctcctccttttttttttccctgtggtgcgaatttacagcatggagtacaatgttggcgtgatgaatcaaactcggaccagtcagatgaatccattttggatcagtcagatgaatcagatttcacctctgactctgatgatttttgtgcacttatggtcaggataaaatatcaaggcattcattatcacaaatcagaacgatcgatcatactgatgatcatactgatggaagtgcttttgatagtgagcctaacacagaaaatttgaatcttgtatttatggcgatagagctagagcaagacatggtgctagcaatggcaaatgacaagttgagcgtttggattacaaaaaactgtatgatgaggcttatggaaaagcatcatctgattcaagtgatgatgaagagtggtagtacacatcaaaagggaaatttagaagacagtgtgctgaatcacctcagcatggaaaatgattctct

SEQ ID NO: 41088 - DNA, 450 bp, Oryza sativa
  Clone ID: PAT_MRT4530_44467C.1
cggacgcgtggggtactaatgtgctagtgttagttatagaatgtttattcatcacccggttgtttccagaaaatattgtacagcttatacccaatcttatggcttgttttcatctggagtgctcaagcctcaagggacatacatgtattactgctactaccaccacttaacaagttacatactcattttcatctgaatcacaattctaatacttgtttcttatgcccagtcaacactaacttaaaccagttaccagactgaacattagataacaaatgtcccagctcccttatcatactagtggttaatctctcacacgtcatattaacttagaaagatgctttaaatgataaccaagtattacaactggtgcctgatactctgatagaaacctttgttacattctagggactcgataaatgacatcatctattatcaacaagggataac

SEQ ID NO: 41089 - DNA, 1098 bp, Oryza sativa
  Clone ID: PAT_MRT4530_44468C.1
atggctggtgaggcttcatcgtcgaccatcggaaaactggtccaatttcggatgaggaacatgctgccttcctctccctatggctcgagagccctggtgagaaaggaaaaagttcctcttggccgatacctcctaggggcagcttattggatgttacatgtttccttagccaatattcttatagacaagccggtcagttacggggcccttggtggttggttcattcagctgtggttgacaattcacaccaacaccgtggccaacagaccttctctgcttgaatcggccttccccacatatgactccattgatgatcaatcagattcccagccgtgcaagtcttatggggaagcagctttagtttaccctggtgtcaagccatctattgaaggctttaagacatggttcgacatattttacaacaacgatgctgccgatgttctctttgcctatgacgcctacaccgagtttgatcttccaatggatttagatctgagcaagctaaatgatgaagaagacctgttattgaggggcaattacttggcagcaatctctccttgcgttcttcctacagatgtgtctcagggaagaaaatctttctcttatgagttttatcacccaacatcggctgcaagacaactggggcttggccagcttcccatcaatcttcccttactaaaagttgtagactcaagatgtgaaatcttaaaaccactggcaccgaaacacagcctgagtgatcggccaatttgctatgcccaggttctcaagcattccagagggactaccaagatattgccctccccgatcatttcttctgctccgtcaattgaaacattcatgaagactcctactggggttttggctaccgatcgcctagattttggcaaacacaaggatccctcttcaggaattaccgggtcatcacccaagagggccaaggctgatggttttgctgggataagtgccgaagcgttagttgacaatattccgccttctctctcgttgtctccaccaaccagagttcattacgccattcgcaaggttgcattgcatattcgcaaaaaaacgtttatctccctcatggcctttttgtaa

SEQ ID NO: 41090 - DNA, 427 bp, Oryza sativa
  Clone ID: PAT_MRT4530_44469C.1
gcacgagggtacccagagacgagggaaaggctgatgattctgatgctgtaaaaagtaccaaggacagctgtgaaatttgaaggttgccttttggattgtggataatgcataatagaaaacagatggtacttaccatgtacagatgcatcattccgacttatttgaaaagcgtgtgagcctctctgaagctttcttcaatattttagttttggagattattgggacaacagaaccggcaatggtcttcgtctttgttatatcttgtacatataaatcatgccataagcttcacaagtgcattttgtgcctgtaaaaaaacagattcaatttgtagtgttttgaggaaaggttcgtttcattaaataaagaaagttgatgcaatgtaacaaaaatgcaaatagaaatataagtgaagggtgtttctctt

SEQ ID NO: 41091 - DNA, 6664 bp, Oryza sativa
  Clone ID: PAT_MRT4530_4446C.1
atggacgccatcgacgcggagctcgcgcgggcgcaggaggagcgcaagaagatggaggaggccctggccgccggcgcgcccatggccgtctcctccgtcaccttcgacaccgatctctacggcggcggcggctccgaccccaaccgcttcgccggctacgacacctccatccccgcctccgaggacgactccgaggcggccgtcaaccccgccgcccgccgcctcgcctcctacaccggccacgccgtcgccgccgccgacatcccccgcgccgccgaggacgacggcctccccaagaagtcgcagcgcatcatcgaccgcgaggatgactatcgccgccgccggctggcccgcatcatctcgccggagcgccacatcccttcgccgccgaagcagaaggagcagctgctgcgtgatatagctcagaagaagaaggaagaggagaaggccaaggagaagaaggccttgcctgagcagcagccagtcggcgcagcaatagatgggatcagtcgcaagatggcgaagacctcctccgattgggatgctcctgatgcaactcctgggattgggcgctgggatgccacccctggtcgtgtcggggatgcgacgccgtcggtgagaaggaatcggtgggatgagacaccaactcctgggaggatggccgatgcggatgcaacacctgcagctggtggcattactccaggtgccacaccttctggagcttgggatgctactcctaagctgcctggtgggcttgtcacgccaacacccaagaagcagagatcgagatgggatgagactcctgctagtatgggtagtgctacacctggaggcactggtgctgcgacgcctgcaggttacactcctggtccgacgccatttggtggtgacaaccttgcgacgccaacaccccggccagattgcttctcgtggtccaatgactccagagcagtaccagctcttgcggagttgcctggtgggttgcccttcatgaagccagaggattaccagtactttggaacattgctgaatgaggaggagggggagcagctatctccagaagagcagaaggagaggaagatcatgaagctcctgctcaaggtgaagaatggcacacccccacagcggaagacagcacttcgacagctgacagacaaagcaagggaatttggtgctggcccattgttcaacaagattctacccttgctcatgcagccaacacttgaggaccaggagcgtcatcttctagtgaaggtcattgacagggtactgtataagctggatgagctagtccgtccatttgtgcacaagattcttgtggtcatcgaaccacttctgattgatgaggactactacgctcgtgttgagggccgggagatcatctcaaatcttagcaaagctgctggtcttgctactatgattgccgccatgagaccagatattgataacattgatgagtatgtgagaaataccactgctagagcatttagtgtggtggcttctgctttgggtatccctgctctcctgccattcttaaaggctgtctgtcagagtaagaagtcttggcaagctcggcacactggtatcaagattgttcagcagattgctattcttatgggctgcgctgttctgccacatctcgagtccgtagtcgagatcattgagcatggtcttagtgacgagaaccagaaagtgaggacaatcactgccctttctcttgctgcacttgctgaggctgctgcaccatatggtatagaaagttttgatactgttttgaagcctctgtggaagggtatcagatctaaccgtggaaaggttcttgctgccttcttgaaagcaattggttttatcatccctcttatggatgcgctgtatgccagttactacacaaaggaggtcatgcaaatcctgattagggagttccagtcaccagatgaagagatgaaaaagattgtcctgaaggttgttaaacagtgtgtcagtacagagggtgtagaggctgattatatctggaatgacatccttcctgaatttttccatcacttctgggttaggagaatggctctggaccgcaggaactataagcagcttgtggaaacaacggtagagatggcaaataaggttggagttgctgatattgttgggaggattgttgaggatctgaaagatgaaagcgaaccttacaggagaatggtaatggaaacagttgagaaggtagtggctaatttgggtgcttcagatattgatgctcgtttggaggagctgcttattgatggcatcttgtatgctttccaagagcaggcaagtgacgatgcaaatgtcatgcttaatggttttggggctgttgtcaatgcactgggacagggggtcaagccttaccttcctcagatttgtggtaccattaagtggcggttgaacaacaagagtgcaaaagttaggcagcaagctgctgatctgatctcaaggatagccattgtaatgaaacattgccaggaggagcagcttatgggtcacttgggtgttgtgctgtatgagtatttgggagaggagtaccctgaggtgttgggttcaattcttggagcactgaaagctattgtgaatgtcattggcatgactaagatgacaccgctgatcaagaatcttcttcctcgactgactcctattttgaagaacaggcatgaaaaggtccaggagaactgcattgatctagttggtaggattgctgatcgtggagcagaatttgtgcctgctagggagtggatgaggatttgttttgagcttcttgaaatgttgaaggctcacaagaagggtattagaagagccaccgtgaacacatttggttatattgcgaaggctattgggctgcaggatgtgttggctactctgttgaattacttgaaggtgcaggaacggcaaaaccgtgtctgcacgactgtcgcgattgccattgttgctgaaacctgctcaccttttacagttctgcctgccctgatgaatgagtaccgagtcccagaactcaatgttcagaatggtgtcctgaagtctctctctttcctctttgagtatattggtgagatgggcaaggattacatatatgctgttactcccttggttgacgatgctctaatggacagagatcttgttcactggcaaactgctgcctctgctgtgaagcacatggctcttgatgcgcttgttgctgcttatcctgcactggatgacgatggggataatatctacagccgtccagagctggcgatgtttgtctgttcaatgtgctctctttttctaaagagcaaccattgcattactcgcatgtatgattccttttcgtttactgctgtccttgcaagtgttttatcagtttgtactgttcctcaacaaatgggcatccttagcctgggctgctgcttgttgcttctgaagggggtgcaatgtttaggatatatttcccccttgtttacttgtgtaatcaaaaacgttgctcccactgtcatttatatgggttctgtgatgtgcaatcctagttgcttaccgccaggtgcttcatcaggcatacttcttggcgccactactctgcctagtgtcatgctttcacggttaattcaactttatagggtcttactagcagatcctaatggacgagaagaatatgcataccttgaaatgcagtactgggcagtatctgttagctgcctcagcgtgttagcattttttgtttggcatgtacggcagtctcccagcaatggaaattctatagcttcgaaatacggctcgttgctcatcattttatatcccctggcatacttgttccactttttactgaagactgatggaggggaggccattttggtctcaagtggtctttttctttactgtggtgatatgctggctcatactctttcaaagggggttttgcttggtccttttcttctccccttgttatacaaaagttccgttcaagttttggcttactgtagaaaactggggaggcaaagaacacaaacagttgaggaatgcacacagaagagaattgactgtgatgtattttatgtttcattgttggtagcactattgttgttagtgccatcatggacgcgtcttattcaagattttgaagtgcatccatttgtttgggtttttaactatattttcaccgattcacgtgaacggcttgctttatgcgcatactggatatttgtgatatatgtatcaattagaaggacagggacaattccacacaccctgcattctagtgtcagtcactcccctaaagagaattgctctatacatggatttagaggtgtttgggaaatataccctcttgggcatattgtgcatcagttcatgagtgccttcactgatcaccgcgattcggagattctaattgttagtcatttctcactcttgctgggatgtgcacttcctaaatggatgtcatcaggattcaatgaccgacctcttacaccatttgctggaattctcagcttgggtattggtgataccatggcatcaatgatatgttataagtatggtgtcctaagatggagcaagacaggaacacgatatggtcttcgagatcgcagtaaaattatgccacatcctcgttacagttgtgcaatagctgatggtgttcaggagcctcgcacatatcaagaggctgttacaattaatgaatggaaattggctatgaatgaggaactttctgccttagagcgcacgggtacatgggatgttgttcctcttccccatcatgctgttccaattacttgcaagtgggtgtttaaggtgaaaactcgctctaatggatctattgaacggtataaggcccgcttggttgctcgtggttttcagcaggaatatggtcgagattatgatgagacttttgccccagttgctcacatgactactgtccgtacccttatagctgtagctgcaactcgtcaatgggagatctcacagatggatgtgaagaatgcatttcttcatggtgatttgcaagaggaagtctacatgcagcctccaccaggtttgacatgtccatctggtcatgtgttgcgcctacgccgtgctttatatggtcttaagcaagctccacgagcttggtttgagcgctttagctcagttgttctaaaagctggatttgttgctagtgagcatgattctgccctatttatccacacttcttctcgaggtcgtacgattctcttgctctatgttgatgatatgatcataacgggtgatgacgcttctcatgttgccttcgtgaagcaacgtctaagtgagcaattcatgatgactgatcttggaccactaaagtattttctgggcattgaggttgcttcaacaccgaatggttttcatttgtctcagcatcgatatactctcgacttactatctcgctctggtctaagtgatgataaaactgctgccactcttatggatctttatcttactaataatgtttaagcaaataaattcattaacatgcaaatcaagccctgaagaagagctgaactgagcacagtgatccatgacagattaaaccaagacactcactctcaccgacggtgtgaaatttgcaggaacatgtacattactaaggaagagacttaattattttattggcacataaaagatgatggatgtatcgatgtatttcagaggagcctgttgaggtagtcatcgacggtggtgtactggacgtccgggaagagctgggtggcctcaacggcggtggctggatccaacggcgtcgtcgctctccccccttatgtaccctgcgtgccacgatccacagcacgatgttgaactgggtaacccggaaacttctacctctgctgtgaagcagatggctctcacggttgctggcttgggctttgtggatgctcttgtccattcacttaactatgtctggccaaacatatttgggacatctccccatgtcatcaatgctgtcatggaggcgattgaggggatgagagttgctcttggtccagctgtgatcttgaattactgccttcaaggccttttccatccagcatggaaagtacgtgaagaatattggaaaatctacaactcactatatattggtgcacaagatgcgcttgttgctgcttatcctgcactggatgacgatggggataatatctacagccgtccagagctggcgatgtttgtctgatcaatggtattttgacccggtttactgcggagttcccttagattaaagatcccaaggagatgatatctcaccttgattttttctggttgggggcaaactgaaatacttatctcaaaaattgccaacattgatcaagagtaaaatttcgatctcgacaattacactgtcacactagacggtttatctcagggccaacggtgtgagttagagcagtaagtcgaggtagaaattgctgaactaagggaacataaactcatacgcttgtagaaaacaaagaatagtgttattgcgaaacagcaaaagccgctaaatttagaattatcggctaatgaaaaggaggtagctatgcttgatttatctggaaacataggaccttttgttttgccagctgaatttcgtgccaaggaagtggatgaacatctagacgatggatcacgaaatcgcgacgacaaggcgtaaatattggagagccatcaatga

SEQ ID NO: 41092 - DNA, 222 bp, Oryza sativa
  Clone ID: PAT_MRT4530_44470C.1
atacgggctcgcttattaagcggccagctggtacccctccgggttctcccctgcctgcggatctccccgcggtccagcccacgcgtcccgtttgcattcgccaaccgggaggtaaaattggtggaaaaggaactagctcgtaaccataatgttgatctgaggctggttcgagggaaaaagaatcgaagaaccaatggattgggtgtgtcaaaaaaaaaaaaa

SEQ ID NO: 41093 - DNA, 1574 bp, Oryza sativa
  Clone ID: PAT_MRT4530_44471C.1
ccttcacccgcttcctctacctcgccgaattcggctgaatctcgacacttctgccagcattctagggatcatcttttgattcccacctcccagaactccacatgctttttccttgggccgatgggtgatccggatcccaccgagtttatcaatgtgaaacagagaggatccctttcaagtagatcaaactagacttagctcaatggaaatcgactttcagtaagcgatctcattgggaggaagtaggaatagcgcaatgcctggctttatctatagcaaacctgaaaaaggatgagcccctactttctgctatcggctacttctggtctgatacactgaatgctttcatcttgaggcagggacctatggctcccactttgcttgatgtgaagatgttaataggcctagacatcctttcatccattaatccttttgacgtggacattaaatgctcttatcaactgaacacgaagaagaagaacaatggctggtgaggcttcatcgtcgaccatcggaaaactggtccaatttcggatgaggaacatgctgccttcctctccctatggctcgagaggtttgctttctgtgggtctacttgagcactgactgcgaacttccttcattttgctgaagccctggtgagaaaggaaaaagttcctcttggccgatacctcctaggggcagcttattggatgttacatgtttccttagccaatattcttatagacaagccggtcagttacgggggcccttggtggttggttcattcagctgtggttgacaattcacaccaacaccgtggccaacagaccttctctgcttgaatcggccttccccacatatgactccattgatgatcaatcagattcccagccgtgcaagtcttatggggaagcagctttagtttaccctggtgtcaagccatctattgaaggctttaagacatggttcgacatattttacaacaacgatgctgccgatgttctctttgcctatgacgcctacaccgagtttgatcttccaatggatttagatctgagcaagctaaatgatgaagaagacctgttattgaggggcaattacttggcagcaatctctccttgcgttcttcctacagatgtgtctcagggaagaaaatctttctcttatgagttttatcacccaacatcggctgcaagacaactggggcttggccagcttcccatcaatcttcccttactaaaagttgtagactcaagatgtgaagtatcatcagtcgataccatgaagaaattgttagaatgcaaattcccagtctcagccgatatcggcgacttcaccctttatcagtttaagcatgtcaccttctacagttgatagtcggattggtcaaaacatctcttctctgctccatccgactattacctagccgccctctctcctgtctgagtcccacgtctctccaacctagcaccccccagccaacctaccaaccataaaaccggacattttataccctgaactatctataccggacgaataaccccctcgacccaatccaaagcggtattgtcctacgtggcaatgtagtcagc

SEQ ID NO: 41094 - DNA, 401 bp, Oryza sativa
  Clone ID: PAT_MRT4530_44472C.1
cccacgcgtacgaacgctgcttcacccatatagcgctacagattgctgactacacaccaacagcgataacaacatcaacctatcttgacgatatcacttacgcaatggcgagtgatgcaccactagacaagggcggtgacatatgtacattgtccaatgtgtcggagacggctaatatgcaaggtgtaaatgcgtaatgtggaagatgctgtgctgactgtgcatattatacctattagagtgaacataatttgcgagtgtgcacagaatgcaagatgatgctgcttatattaacgcattagaattaagaatgaagcgtgcttgagagagatttaagatggaagcgtgctatagagagaatttagacagaagcgggctagacagaggtacgcatctatgag

SEQ ID NO: 41095 - DNA, 477 bp, Oryza sativa
  Clone ID: PAT_MRT4530_44473C.1
gcacgagggagagaactagtctcgagtttttttttttttttttttaaaagaggaaaaggaaaggaagatcattaagcatactatgtttgtacagaatgaactagaatccgcagacagtaaccctatcagtttttctgtacatgtgcagtatatatatctgcaccgaccataggatacacttgaatcagaattatagtgatagacttactgtgatgtgcatacagaaaagaatttgatccacatagacatagtggcatatatactggcatgccggaaacccgcgttgaaaaagaaaagcagcttttatgcccccccagagaaagcccttgtaacgctagttaccaatcagagttgagcatgaacaaaaaggggatccaatctcttgccattcagttgttgatatatcctcagaactaccacttgtctcaactgtcaacttccaaacacaaatatgctgtttccgacacactgcagcac

SEQ ID NO: 41096 - DNA, 433 bp, Oryza sativa
  Clone ID: PAT_MRT4530_44474C.1
ggatcccccgggctgcaggatcggcacgaggtggtattagctatatatttctttgcattttttttgttccatgcatgccttattggtatatctctaaaggtgtgttcggaatccccagttcccaactcatccatctcgttttccgtgcgcacgcttttcaaactgtaaacagtgcgttttttacaaaaagtttctatacgaaagttgctttaaaaaatcatattgatccattttttaaaaaaagattagctaatacttaattaatcatgcgctaatgaaccgctccgttttccgtgcggaggggataggttcccatcctccattactgaacacagcctaagagtgcacataaatattcatagaaatataagctagatgtacattttaaagctaactgtgtaatttccaaaatgtgtaatttattactctctgc

SEQ ID NO: 41097 - DNA, 422 bp, Oryza sativa
  Clone ID: PAT_MRT4530_44475C.1
gggaaggagaaaaagcgaaagagtagggaggggccaccggccccggaggcgaggaggaaggagcggaagcggatgctgatgcccagacaaccatctcatgaccaaatccacggcatccaggtacaagcaaaccctcctccactggccggaggacgagatgaagcgtatggcaggagtagctgcaagaagatccgcgtcctgagcaaccgcgagatcatcaagatgaggatacaattgaggaagcaccagccactacctcaaggcatttttgacccagagattattatggcttccaattccacccagcaggaccccaatcattcttcgccattcggcgccttctttgaccagttctgctacaaacccacccgccaagatcgcactcccccacttcctagaacgcctgaccttctagtcaggcc

SEQ ID NO: 41098 - DNA, 777 bp, Oryza sativa
  unsure (1)..(777): unsure at all n locations
  Clone ID: PAT_MRT4530_44476C.1
gcccacgnntgataaccacaaacacaaagcgtaaagccatctactagtaccaagtagaggaaatagctcaaggctttggaacgcaagaacatcaccatgaagagcagcactctcttggtgatcctggctgtccaggccgctcttatcatgggaatctttgctgctgttgcaaaagaaaatgccgtgggtgagagcaaggcgatcgacatcaacccggggcagctcaagtgctgcagcaactgcaacttctccttctcggggctctacacctgcgacgacatcgtcaagaaatgcgaccctgtctgcaagaaatgcgccgtcgtcaagacctaccctgtgaagatgttcaagtgcaccgacaccttcctcggcatgtgcggccctccctgcaagcactgatcgatcgatcgatcgatgatgacctgaataatgcatgaacgcgagccattgctgtcatatatctgtgatctgtgtgatatacagtgtgcattatatatcatatctcgatgctagtatactgtatactcgaacaataagccgttgtctgagtgaaggaccaaataaaaataatgaagctagaaggtgtttgcatgttacttgggagacttgtgtttcccctggacttgagagggacatgagaacaatgttaatattatcttgtgataatagatatatattgtctaaaatatctgtcagcaaggaaaatctgtctaccttaataaccatcaagtttaaaaaaaaaaaaaaaacactcgagactagttctccctcgtgccg

SEQ ID NO: 41099 - DNA, 397 bp, Oryza sativa
  Clone ID: PAT_MRT4530_44477C.1
atcataacgatgcatcaataattcgatcatcccttggatgcggtctgctgcttacattaaatctcgatccaacgaagcaaggatgacgactgacagaacattattgagcttgaaatctactggatcgatcacacacacacacacaattgaggtacatacatacttgcactgctgcaactgcaactgcacggtcggtgcgtggctactacaagtgtacacatggtacgtaggacggcaccatctatgacgagtcgatgagctcacttgtcggggacgaagttggttgcgtatgcccaagcgttcttggctactgagtctgcgacgtggtcaaagacgttctcgatggggcccttgccggtgactatggcctggacgaataagccgaacatggagaaca

SEQ ID NO: 41100 - DNA, 759 bp, Oryza sativa
  Clone ID: PAT_MRT4530_44478C.1
atggacagctacgagaaagagaaaaagaaaaagaagcagattctaaccaagaacatggaggtcaagaagatcaaatcaacaacaaataatctcccaggggctgatagaacaaagtctcaagtaacaggaaatacaactgaagaattaagaagaaagaagacagttgaaggaacaatctcagctgtagaatcaactaaggacatcaagttggacaccaagaaaaaagaaccactacagatgaaaagtcatgaagaagtacaagatgaaaaaagaagaagccaagaatcagataagagcaatattatggcaaaacatattaaagaaaccaaaagtcagaccactgaagttgttccaggggctgatagaacaaaggctgaagtaacaaggaattcacaatcagagagatgtggaagtgacagaattgactctgaagaattaagaagaaacaatacagttgaaggatgtcatagattgcaggctcaagttacagggaatacacaatcaaagacatgtgatctcattacctccaggattttggaaaaaggcaaaaaatcagcaacaattggatcagagattggcaaaaataaagcacaaatactttatgatcaatacacatttcttaacgaaaatgaaagactggtgaaggggggacaaatgagctatactaacctcatgcaacacataattctaagtccacgtgtcagcttgcaagcaaatgaagtatcggaggtgtacaacttgggaattttcaaaaagtaa

SEQ ID NO: 41101 - DNA, 188 bp, Oryza sativa
  unsure (1)..(188): unsure at all n locations
  Clone ID: PAT_MRT4530_44479C.1
aatnctcagccacaaatccaaacggtgggtccttcctattacaaggtcacaatgtacaggtattgagtttgatcaaccaactcgacgataatatacacgtacatttaacacattctttcacccttattaaactcctccctttttctttccgggtaagtttaaaataaacttgagtgccagccagtgtt

SEQ ID NO: 41102 - DNA, 5857 bp, Oryza sativa
  Clone ID: PAT_MRT4530_4447C.1
cccacgcgtccctaacactctacttgtactaggtagatcgctagaacaatggcgtccggtggcgaggagaagaagagcaggatcctggtggtgggcggcacggggtacatcggccggcacgtcgtcttggccagcgcgcggctgggtcatcccaccaccgccctcgtcagggacctctccccctccgaccccgccaagtcgcagcttctccagagcttccgcgacgccggcgtcaccctcctccacggcgacctctacgaccacgccagcctgctcagcgccgtccgcgacgccgacgtcgtcatctccacgctgggcgcgctgcagatcgccgaccagaccaagctcatcgccgccatcaaggagggcggcggtggcaacgtgcggaggttcctgccgtcggagttcgggctggacccggaccacacgggcgcggtggagccggccaggtccttaattctgaaccaagtctccgtatttcaggctccttgcagcatatggctttactctcagcttgctattcttgcccaactgcttgtggagttgtggggtgaaataggtctcaccacttcctgtcttgctccatcttaggacaccatacttataacctatcattgatgccatggtatcaccaatacccaagctgagaattccagcaaatggtgtaagaggtcggtcattgaatcctgatgacatccatttaggaagtgcacatcccagcaagagtgagaaatgactaacaattagaatttccgaatcgcgatgatcagtgaaggcactcatgaactgatgcacaatatgcccaagagggtatatttcccaaacgccaatggcctcagtttcaaaagaaaacggcaaatgctgcaccaaatgctaagtccaagaaatcaggcgctgaaatattactgcaggagagaaaattaggacagcaacgagatggtaatacttgcgcaaaagaatcctctccgttttgctttgttttgatatactgtagaaccttctaattgatacatatatcacaaatatccagtatgcgcataaagcaagccgttcacgtgaatcggtgaaaatatagttaaaaacccaaacaaatggatgcacttcaaaaccttgaataagacgcgtccatgatggcactaacaacaatagtgctaccaacaatgaaacataaaatacaccacagtcaattctcttctgtgtgcattcctcaactgtttgtgttctttgactctccagttttctacagtaagccaaaacttgaagggagcttttgtataacaaggggagaagaaaaagaccaagcaaaaccccctgcagaaaagaaaaaaaagggaagggtattatgcactagaaactgaagccatacaacgcaataacttctacctgaataactttgaaagagtatgagccagcatatcaccacagtaaagaaaagaccacttgagaccaaaatggcctccccaaaagatgaacatgaagggaacttctctagaatatgcggattaagatcacagcagccactccacgacagagcaaatacaccaaattaagggtgagatttatctttgcatgcagataaaatatgcgtgtacctccatcagtcttcagtaaaagtggaacaagtatgccaggggatataaaatgatgagcaacgagcctatttcgaagctatagaatttccattgctgggagactgccgtacatgccaacaaaaaatgctaacacgctgaggcagctaacagatactgcccagtacgcatttcaaggtatgcatattctgacaatgaacacatatagttagtaaaagacctataaagttgaattaaccgtgaaagcatgacactaggcagagtagtgggccaagaagtatgcctgatgaagcacctggcctggatgtgaaccctgatacaatatcacaacttacttcgtaactaacagcagaagtttcaatatatttgccacaaaatttaagtaaaataataggaaagaaacaacacttacttgatcagacaaacatcgccagctctggacggctgtagatattatccccatcgtcatccagtgcaggataagcagcaacaagcgcatcttgtgcaccaatatatagtgagttgtagattttccaatatacttcacgtactttccttgctggatggaaaaggccttgaaggcagtaattcaagatcacagctggaccaagagcaactctcatcccctcaatcgcctccatgacagcattgatgacatggggagatgtctcaaatatgtttggccagacatagttaagcaaatggacaagagcatcctcacagcccaagccagcaacaccaagagccatgtgcttcacagcagaggcagcagtttgccggtgaacaagatctctgtccattagagcatcttcaagcaagggagtaacagcatatatgtaatccttgcccatctcaccaatatactcaaagaggaaagagagagacttcaggacaccattctgaacattgagttctgggactcggtactcattcatcagggcaggcagaaccgtaaaaggtgagcaggtttcagcaacaatggcaattgcgacagttgtgcagacacggttttgccgttcctgcaccttcaagttattcaacagagtagccaacacatcctgtggcccaatagccttcgcaatataaccaaatgtgttcacagtcgctcttctaatacccttcttgtgagccttcaacatttcaagaagctcaaagcaaatcctcatccactccctagcaggcacaaattctgctccgcgatcagcaatcctaccaactagatcaatgcagttctcctggaccttctcatgcctattcttcaagataggagtcagccgaggaagaagatccttgattggcggtgtcatcttagtcataccaatgacattcacaatagctttcaatgctccaagaatcgaacccaacacctcagggtactcctctcccaaatactcatacagcacaacacccaaatgacccataagctgctcctcctgacattgtttcatcacaatagctatccttgagatcagatcagcagcttgctgcctaacttttgcactcttgttgttcaaccgccacttaatggtaccacaaatctgaggaaggtaaggcttgaccctctgtcccagtgcattgacaacagctccaaaaccattaagcatgacatttgcatcatcacttgtctgctcttggaaagcatacaggatgccatcaataagcagctcctccaaacgagcatcaatatctgaagcacccaaattagccaccaccttctcaattgtttccatcaccattctcctgtaaggctcgctttcatctttcagatcctcaacaatcctcccaacaatatcagcaactccaaccttatttgccatctctacagttgtttccacaagctgcttatagttcctgcggtccagagccattctcctaacccagaagtgacggaaaaactcaggaaggatgtcattccggatataatcagcctctacaccctctgtactgacacactgtttaacaaccttcaggacaatcttcttcatttcttcatctggtgactggaactcccttatcaggatttgcatgacctccttcgtgtagtaactggcatacagcgcatccataagagggatgatgaaaccaatagctttcaagaaggcagcaagaacctttccacggtgagatctgatacccttccacagaggcttcaaaacagtatcaaaactttctataccatatggtgcagcagcctcagcaagtgtagcaagagaaagggcagtgattgtccgcactttctggttctcatcactaagaccatgctcaatgatctcgactagggacttgagatgtggcagaacagcgcagcccataagaatagcaatctgctgaacaatcttgataccagtgtgccgagcttgccaggacttcttactctgacagacagcctttaagaatggcaggagagcaggggtacccaaagcagaagccaccacgctaaatgctctagcagtggtatttctcacatactcatcaatgttatcaatatctggtctcatggcggcaatcatagtagcaagaccagcagctttgctaagatttgagataatctcccggccctcaacacgagcatagtagtcctcatcaatcagaagtggctcaatgaccacaagaatcttatggacaaacggacggactagctcatccagcttatacagtaccctgtcaatgaccttcaccagaagatgccgctcctggtcctcaattgttggctgcatgagcaagggtagaatcttgttgaacaaagggccagcaccaaattcccttgctttgtctgtcagctgtcgaagtgctgtcttccgctgtgggggtgtgccattcttcaccttgagcaggagcttcatgatcttcctctccttctgctcttctggagatagctgctcctcctcctcctcattcagcaatgttccaaagtactggtaatcctctggcttcatgaggggcaacccaccaggcaactccttgggcacatcaaactgctgcccacgattctcctcaggaatagcatacaatggtgtgcccaatggtgttggtgtagcgagcagctttcttgctggtgtgcgtatgggttggtatgaagctggaggttcaagaatcttgtacccttcctgcgggaacatagtatcaagctcctcatccgtaagaggcctgttccgctcctcaatgtcccgctcccaccgcaagagctggtactgctctggagtcattggaccacgagaagcaatctggccgggtgttggcgtcgcaaggttgtcaccaccaaatggcgtcggaccaggagtgtaacctgcaggcgtcgcagcaccagtgcctccaggtgtagcactacccatacttgcaggagtctcatcccatctcgatctctgcttcttgggtgttggcgtgacaagcccaccaggcagcttaggagtagcatcccaagctccagaaggtgtggcacctggagtaatgccaccagctgcaggtgttgcatccgcatcggccatcctcccaggagttggtgtctcatcccaacgattccttctcaccgacggtgtcgcatccccgacacgaccaggggtggcatcccagcgcccaatcccaggagttgcatcaggagcatcccaatcggaggaggtcttcgccttcttggatccagcagcagcagaagcatcaccatcctgcgactgatcccatctattgcggcgcttcggcgctgccactggctgctgctcgggcacggccttcttctccttggccttctcctcctcttccttcttcttctgagctatgtcacgcagcagctgctccttctgcttctgcaggtcattctcgcgcatggcatcggcataggtccgcacggaagggtccggggtggcctcaccggcggcgaagggatcatggcgctccggcgagatgatgcgggccagccggcggcggcgatagtcatcctcgcggtcgatgatgcgctgcgacttcttggggaggccgtcgtcctcggcggcgcgggggatgtcggcggcggcgacggcgtggccggtgtaggaggcgaggcggcgggcggcggggttgacggccgcctcggagtcgtcctcgggcgcgtcgtcctcggaggcggggatggaggtgtcgtagccggcgaagcggttggggtcggagccgccgccgccgtagagatcggtgtcgaaggtgacggaggagacggccatgggcgcgccggcggcaagggcctcctccatcttcttgcgctcctcctccgcccccgcgtgccccgcgccgatggcgtccat

SEQ ID NO: 41103 - DNA, 294 bp, Oryza sativa
  Clone ID: PAT_MRT4530_44480C.1
agggcaaataccaaaatcgatcgatcgatgtacaaggggatgcattaattcattattttgggggtttttattttacaaatcaccaccatgcaagtcgccattaaccaccaacccagttttcctaatttaaggtgttttcaacaaaagggtgacctttttttttttcataccctcccagtttggttggaataaaaaaattaaaaagggggcgcgaacccacaccaacccattgttcccgtttgaattgcgcccgaaagagcttaaattaaaaggattgggagaagggttccaaaa

SEQ ID NO: 41104 - DNA, 459 bp, Oryza sativa
  Clone ID: PAT_MRT4530_44481C.1
atgccccccgttggcaatcgtggtgcggatgatggcatgctgcaggccaatggagtcgacctggtgaggatgttcgacgccgaaccatggacggccggcgcgctcgtcgacacccgcatccagatcgtgatcgccgtccccgaagaccagatcgcctacgtctccagtgacccacgcagcggccgcttatgggttcgcgcagagcgtctcctactacctcaagaccagcatcgacgtcagtattgtgtggttcatctgaaatcgatggttcgtgcaatcgtgctgctgtcgctgcctgctgggttcaggtttataactgtagatgccattggaagccaggatgaaattcatcagttggcagagtccatatatgtcatggtttatatgaatgctgtggcatcacaccacgcttctcttgttggttcagagtggaagttgtataaggttttctgcccgtag

SEQ ID NO: 41105 - DNA, 1449 bp, Oryza sativa
  Clone ID: PAT_MRT4530_44482C.1
cagataacaaaataagcaataaataataaaagtatataataaaaaaagaaacttaaagaattcacaaaaataaagtacgaatatacagcatccacctgtacgattaaaaattacgaaaagaatagcccatatcccataaaaatcgaaatcttttaaaaagtgaaacagaatggccctatgaatatacacccagtggtgaaagggctcaaccctcccaacctatttagttctggaaaaccagagtttttccaggcataacgttgtaaaaaaacagccaattaacgcgcgtaaaaacacccccaatagggcaaaaatggggcccggccccccccaagagatataagaacccataatgaccaataactcggtatataggaatataaatagatataaatgttcatttttttcttagcaatgtaaatactcgcattccaaaacagccgatggacaataatcggactcagagcatcagttttaaccgaacagaaataaacgagagtattaaacgactgacatagtgcacattgcgagcagatattaacggtccatgaaacgagagccatggcccgtgggcaaaacttaacaaatactagaactagatatctcaactgcagacatgcaaaccaccatttgaacgaggctcacttcttcttggcggcagccttggtcaccttggcaccggttgggtccttcttctccacgttcttgatgacgccaacagccaccgtttgcctcatgtcacgcaccgcaaaacgaccaagaggagggtactcagagaaggtctccacaaccatgggcttggtaggaatcatcttgaccataccagcatcaccgttcttcaagaacttgggctccttctccagctccttgccagatcgtctgtcaatcttggtcaccagctcagcaaacttgacagcaatgtgggaggtgtggcagtccagcactggagcatagccgttaccgatctgcccagggtggttcatgatgatcacctgggaggtgaagctggcagcctccttggcagggtcaaccttggagttggagaaggagcccaagttcttgaagaacggtgatgctggtatggtcaagatgattcctaccaagcccatggttgtggagaccttctctgagtaccctcctcttggtcgttttgcggtgcgtgacatgaggcaaacggtggctgttggcgtcatcaagaacgtggagaagaaggacccaaccggtgccaaggtgaccaaggctgccgccaagaagaagtgagcctcgttcaaatggtggtttgcatgtctgcagttgagatatctagttctagtatttgttaagttttgcccacggccatggctctcgtttcatggaccgttaatatctgctcgcaatgtgcactatgtcagtcgtttaatactctcgtttatttctgttcggaaaaaaaaaaaaaaaaaacccgcggcc

SEQ ID NO: 41106 - DNA, 1194 bp, Oryza sativa
  Clone ID: PAT_MRT4530_44483C.1
atggtggcacggcattcaacgccagttgacgtggcgctaaggaggcggctggcgcagggtgatgtggggcaacggccaggtgtagcagcgcaggcaccggcggccagcgagcggcggcgcggcgggggcgcggcggcggctagtggcttgccgttgtcggcgtggtcgccgcccttgccccagatgagcgtgtggtcgtgcatgacgcgaagaaggaggacagctcggcggcgaggcgcaagccaccggtgccggcctccagtcaatcaaagcgccttcatcaaaggcaggagcatccacgacaacttcctctatgttagaaatttggcaagaagttgccatagaacaaggcggccaaagcttctcttcaagcttgacatcaccaaagccttcgattcggtggcggcaatcagatgtgcaagcattgatctagactccatccttgatggcgtcccagcgttacgggcccaattccccataaaatacttaggactgccgcttctacttggaaggctgcgcaagacggacgtccaaccgatctttgataaaatagcaaaccgggtcaccggctggaggggaaaaaacatcgggccggcagggcgatcaactctagtcaagtcggtactgactgcgcaacctatctatttgctcactactcttaagatctctaaggaagccttgggcattctagatgcaaagagaagaaaattcctctgggcagggacgggggacattacaggagggaaatgcaagccgtgggtgggactagagacaccgtgtgatgaaacggacaaacttctcttcgccgcagctaccaaaataacaataggggatggaaacacgatccgcttttgggagtccgcctggctagacgggcaaagaccaaaggacagcatgccgctcgtctatgcaatttccaagaaaagaagcaaatcgctacgtgaaggcattgaaaatgacacctggatcgatgacctggagctaaatgggaacactacttttacagtggaactgatcagccagcttgtgtccctatggagcgcaccccaggacatcatgctaaaccaaaatgagtcggatcacattgtctggaagctctcgaatcatggagaatactcggcctcttcggcatacaaggctcagtgtctaggaatagtcggcaccaacttcaatcccctaatttggaaatcttag

SEQ ID NO: 41107 - DNA, 447 bp, Oryza sativa
  Clone ID: PAT_MRT4530_44484C.1
atgccgagtgatttgctccccttgaaggccctgttcctttatcttcaacattatattcagcagttcaagggcttgagacgctttctcacgcatgggaagggagttccagacatcccgatacttaggcggacagcacgagtactcaggcagggcagggtctgggttttggatataaaaccagttagcatgtcagcccttgttagaggttttgaagggatgagaaaaatatttcttgtgcagggttccatggagttggaagtcagatcccccaacaatgcaaggcttatttttgtcgggctggggacgccacccgatgatctccttgcttggcagtaccccatgcgccaccatttccttgagagtttcttccttgacatcggaaggtgcccattggctctggaagttttctctattgagggcggaggttgcgtggagggtttcggttga

SEQ ID NO: 41108 - DNA, 2970 bp, Oryza sativa
  Clone ID: PAT_MRT4530_44485C.1
gcgtgtgggggaaggtgacggtgatgggaagcgagaggagaggagaccaccgggagagtggtttgttgggttggcgatggatcgtgtggcgcgggtgtgttcgtccgtaagcgcgtgtgtgtggcgtgggatgatagcgcgggcgggtgcggtgaattgccgtggcggcgagagctggctgagccgcgaacgcggtggtggcttttgggtttgccgtggcttgggttggagtcggagaaagtggttccgttccattaccattccgagaggtggctttatccttctccacccagctcgcgagggccgctggggggataagcgctatgattaagttggtaggaattctccaagtcgtcttgcgcctgccatcatccaggttcttgcctcttcctttatttttgccataagattgggggccgccgtttccttgtgctcgaagatcctttggttcctttctttccaaatttcccagtctatgagtaggattaaggatcgcagccctttcttggacacttcccttttgttggctagcatttcccaccattcgtgtacgctttggcatggctcccaattgctgataagccacccagttggccgtcagtctccagatccttctggtgtatctacaggaagctaaaaggtggcataccgtctcgttcgtcatacggcatagggggcacactccgctatttggccatcctcttgtagctagtcgatcggaagtccaaactctattttgaatcacaagccacgcataaaatttgcattttgcaggggcccaagatttccaaattaggggattgaagttggtgccgactgttcctagacactgagccttgtatgccgaagaggccgagtattctccatgattcgagagcttccagacgatgtgatccgactcattttggtttagcatgatgtcctgggttgcgctccatagggacacaagctggctgatcagctccagtgtaaaagtagtgttcccatttagctccaatttagctccaggtcatcgatccaggtgtcattttcaatgccttcacgtagcgatttgcttcttttcttggaaattgcatagacgagcggcatgctgtcctttggtctttgcccatccagctaggcggactcccaaaagcggatcgtgtttccatcccctattgttattttggtagctgcggcgaagagaagtttgtccgtttcatcacacggtgtctctagtcccacccacggcttggtggggtgtttccattcatgccagagccatctcagtcgcaaggccctcgtaaacatctccatgttcagaacccctagtcctcctagtgtggttgggaggcacgtccttttccagttcaccttgcatttccctcctgtaatgtcccccgtccctacccagaggaattttcttctctttgcatctagaacgcccaaggcttccttagagatcttgagggcagtgagcaaatagataggctgcgcagtcagtaccgacttgactagagttgatcgccctgctggcctgatgttttttcccctccagccggtgacccggtttgctattttatcaaagatcggttggacgtccgtcttgcgcagccttccaagcagaagcggtagtcctaagtattttatggggaattgggcccgtaacgctgggacgccctcaagaatggagtctagatcaatgcttgcacatctgattgccgccacctgcgatttttgcatgtttgtgaccaatcctgtcgcacgtccaaaacgcacgagaatgtcggtgaaagcctggacatcctctctaacagggtttatgaaaaccactgcgtcatcagcgtacatggagattctaaggcgagccgctctgcctcttagcttggttatggcgtttagttccgttgctttggagaggatccattgtagggggtcaattgccaatatgaagtgaagcggtgatagcgggtccccttgtctgagtcctctgccatgtgctatcttttctcctggtatcccgttgagtagtacttgcgaggtggaggtagtgagtatggccgtcacccagtctctccatttctgcgggaacccatgatgttgcatcatggctaaaaggtaatcccaacgcaccgaatcgaaggctttggttatgtcaagcttgaagagaagcattggccgccttgttctatggtatcttcttgccaaatttctaacatagaggaagttgtcgtggatgctcctgcctttgatgaaggcgctttgattgactgtgacgagggttcgcatgtgtaatcgtagtcgcaaagccaaggttttggagaggatctttgctatactgtggattaggctaatgggcctgtagtccgtcacctcatccgcgccttccttttttggaatcaggacgatgttagctgagttcaggaggttcatgttcgcacatctcagattattaagcgattcgaagaccgccataatgtcccccttgataatgtcccagcaaactttaaagaagttccccgtgtagccatctggccctggtgccttgtcagctggcatctccttgattgcccgatgaatctcctgttccgtgaaaggatcgtccagatgcgagaggtccgtcgttggggcatgcaaggcttgccagttaatatcgcatgttctcggttctggcctactcatcatcctagaaaagtgttcgaagataacatcatctttgtcttggtggctcaccgcccagccacctccactgcgaagtctttggatgtaattctttcttcttcgagcattgactttgaggtggaaaaattttgtatttgcatctccctccttgatgtgcattacgcgggaagcttgcctcttccttgcgcgttcaagcgttgccagaccaagtaggcggcgtttaagtcctgctctcagccagtgctctagcgttgtgagctctctttgctcctgtgcggagtctagccgctgtatgacgtcaagcgccat

SEQ ID NO: 41109 - DNA, 1833 bp, Oryza sativa
  Clone ID: PAT_MRT4530_44486C.1
tcccgggcggcgggcagcagcccgcaagcggatcagattggaggaaaactcgctagtacgcttgttacttgcaactctttctctaatcttgcttcggaaagatatccaaatcgaagaaaaagaaaaaaaaattagaaagcgtgattagccattcctcttctcatctctagccacttcgcttcagcttttcttctttcttgatcgcgagcaaaaagggagagagaaaaaaaaaacggtaaaaggacgtgattagcaaggatggtggcgatcgagaaccagagccagggccagcgggcggcggaggcggcggcgcagccacggatccccagggaggcgcggcggctactgcacgagatggcggcgtcgtgggcggacgttgccgactgccgggcgctgcaggtgattccgctcaagggcgccatgaccaacgaggtgtaccaggtgcgctggctcaacggcgccccggccaccgccgacggcggcgaggtggaggcggaggcggccgcaagggagagggaggtgaggaaggtcctcgtgcggatatacggcgacggcgtggagctcttcttcgaccgcgaggacgaggtgcgcaccttcgagtgcatgtctcgccatggccaaggcccccgcctcctcggccggttcaccaacggccgcgtcgaggagttcatccacgcaaggacactatctgcagcagaccttcgtgatcctgaaatttcagctctggtggcgtcaaaactgagggaattccacaaccttgacatgcctggcccgaaatctgtactcatttgggaccgactgaaaaactggctcaaaactgcaaggaacctgtgctcatctgatgaatccaagaaatttcggctgggtagcctggagaacgagattgctgcattggagaaagaattttcaggggattaccacgggattggtttttgccacaacgatcttcagtatggcaacatcatgattgatgaagacaccaacatgttgactatcatcgattatgaatatgccagcttcaatccagttgcgtatgacatcgctaatcatttctgcgagatggcagcagactatcattcagagaagccacatagactggactacagtaaatatccagacactgatgagcagaagcgttttgtgaagacgtacctaagcaattctgtaagtgaagaacctgatgcggaagaggtggagaaccttctccaaagcattgagaaatacacgctcgccagtcatctagtttggggcctctggggaataatatcggatcatgtcaatgatattgacttcgactacaaggagtatgcaaggcagagattcgagcagtattggcagaagaagcaagcacttttaacttcatgaattgcctgaaggcgtcaggtcgtacctgaaggcctgtgctgcacataacttgtgcgatgttactgacacataactccctgtgaaaagaagaaagatgaagatgataatgaagaagaaaccctttcgggatcaggagttctcatcccgaaatttccgtaaggttcagcttcaggaggaagctgtgggctttggttgctttgtttatagtctgaaaggcagcgaagaaaaagcccctggttgcgtgtttgtttgctcgacaaactagaggccgcttgtggggctagtagtgccgtcgtgtttcatgtgtatgtatacctaaatatatgttacataatggatcttgctttcgtcgactcgagagtcgagacagtgcctccatttagtccatattgtactatgcttacatgactgccctgttgaagaaatagcctatacagctgcactgttaaaaaaaaaaaaaaaaaaaaa

SEQ ID NO: 41110 - DNA, 156 bp, Oryza sativa
  Clone ID: PAT_MRT4530_44487C.1
tttgggggatttatcaaggttggtatagtcatataaaagggcaaaaaaacccttgacacataatttctgagcctaacaatgaaaatgttgaaaggaaacaacaaaaacacattactgttacgagaagaacccaatatacggtttgtgctaggaata

SEQ ID NO: 41111 - DNA, 105 bp, Oryza sativa
  Clone ID: PAT_MRT4530_44488C.1
aaagttaaactagaattattggagatcgataaaagaaccattaccacaagggagggcaccaaagagacaatacatagaatacgtgcagaaaccatggtaaggagg

SEQ ID NO: 41112 - DNA, 909 bp, Oryza sativa
  unsure (1)..(909): unsure at all n locations
  Clone ID: PAT_MRT4530_44489C.1
accgagtgcttccgcatctctacatagacgtacgtccgagccgaccgtactaaacctagcggcccagaccccttcttgcccataccgactgtgttatcccactgcaccacacaccacacccagatcttgccccacacgactccgagctgggttggcgcccacacctacttcccatccaccgaggccataaccaagctggttcccgagcccctacgacgcccgcccgcctccaacactcccccgacccgatttggggccgcctacatcctcccactatagcccaccgggcccatacttgggcctccccagaccgcccnagaccccatggtttggggcctttttttccacatttgcccccctacatcccactactagagttctacatcccaccctccgaggtccatcctacgattgccccaccgggggtccgatcctataccaccccaccccttggggccgggtgggtcntttggtcccatgcccatanattccccaccatactatagtncgattccgggcccagatgcccaacatactaacagacctcccggaggttcctaacctaccggtccttagtttgccccacctagtttgcccccaacaatatccccagaggtggccctacataacaacatacagacccaaataacaacaatatcttacatttttcccttaaacaaacaaaaaaccacccacacaacacaacacaagatccgggggggccccgccccccccagaccggggtgggccgcaaatccccccacattttttgggtttccccctttttccgatggcgagggtttccatatgccgccccccttggggcgttccataaacatggggtttttaagacatggttttcccctggtgttggnccaataagattcctcacagcgtccccaataattt

SEQ ID NO: 41113 - DNA, 274 bp, Oryza sativa
  Clone ID: PAT_MRT4530_4448C.1
catttaatactccatgcatgtgtccaaacattcgatgtgatgggtgaaaagtttttgttttggggcaacctgccgtgctgtcgcctcgggacgacgagtttgtacaacgatgctgagcttgcctcttccgcctcggagcacgggtcgtcgccgtcgcctcgcgagaggacgcagctcccgtcgcttgactcaaccgggttttttttttttttttgcataaaaggcatcacagagacagggcaaaaagacccgctgtacgtgcccttagtgattt

SEQ ID NO: 41114 - DNA, 559 bp, Oryza sativa
  Clone ID: PAT_MRT4530_44490C.1
gttggttttttttttttttttttttttttttggcgacttattataattcagcttatagtaatctggttcaataatctagattacaataattttaagctgaaactaacagggcataaaggtgtttttttagattattgggtggctaacagctgccaggcaactaataattcagagaaacaaacagctaacagcttattctatgtcgatttattataatccagcttatagtaatctagttctataatctagattacagtaattttaagctgaaacaaacagggccttaatagagacactccaacccataatgggtatcccagcctacaaagccccatatttatttttactaccctaccctaatctctttctcccgccccccattctccttttttcgccgctgcacttgcctctctctctcaccgtcgccgccgctcgcctctcccgtcgccagcggtcgcgaggatgacgaggagggccgcctctcccgtcgccggtgtccaccgccacacctctctctctcccgtcgccatccacctcggcggacgcgtgggcggacgcg

SEQ ID NO: 41115 - DNA, 1007 bp, Oryza sativa
  Clone ID: PAT_MRT4530_44491C.1
cccgggctgcaggctgcttgagcgcgcgagcaagcaatcgctgcagccaactgttcgaccagagcgagttagccatggcgtacagagttcttgaggtgaccctccactcggcgagggacctgaagaacgtcaacttcatctcgcgcatggaggtgtacgcggtggcgaccatctccggcgacccgctgacgcggcagtgcacgccgccggacccctacggcggccgccacccggcctggaacgccacgctccgcttcaccgtcccgcctaccgccgcctccgccgccggctgcctccacgtcctcctccgcgccgagcgctccctcggcgaccgcgacatcggcgaggtcatcatcccgctcgccgacgtcctctccggcccctacgacctcggcgcccgcccgccgcagttcgcctcctaccaggtccgcaagctccatcgctccgagacccgcggcgtgctccacctctcctaccgcctcggccccgtcgtcgcgccgcagtccgtcttcgcctacccggcgccgccgccgccgccgccgcagctgttcgagaccgctcctccctcgccgccttacgttcccccaccaccggacgcctaccttcgtaaaccgtcgccgccgtctccaccacccgccaagctgtcgccgccgccaccgccacagacacagacacagccgctggcaaagccgccggcgccggcgacgccgtcgcgagctggcgggcacgtggcggcgctggcgccacctgcggtggcgaaggccgacaggcacgtgtcgacgccgtcaccggcgaaggccgactggcagatggtgggcacgccgacggcgacgaaaggggcgagcaagcatggcagcctggagttcgagcgggggctcaacgccgggctggtcggcggcgccatcggcgggatgctggtcggcaccgagatggtgtccgacgcggcgttctaccacgccggctacagggccgggctcgccgaccgcgacggatgggccgtctactaa

SEQ ID NO: 41116 - DNA, 1871 bp, Oryza sativa
  Clone ID: PAT_MRT4530_44492C.1
tccccctagccacctcagcatcaccccgccacattggcagggggacggcgccaaagaggctggcgccgtccacgcgacgcatccggtcgggaccatcccttccttccctccccttccctgccaaactcccagcttcgcgctgcctcgctgccgctgccgccgccgccgcgacccccacttctccgccagcaaagcgagctgctctgctccggttgccttcctccctaagctcattgttgattttgccgtgattgggttgggcagggttgatcggcgttgaggaagagattgggcggaaggttgtcgatggagccgccgtctgggattcgggcatctgcctggagcttcttcaagttcctgcctttcttccttggccttctcctcctggggatcatcaaaggtgctttgctcttcccatgggcatggcttatcatgatgatcggaatctctgcactcgttcttggcttatggcctatgcatgtgatctggacatactactgcatcatcaggatggaacatggagtactataacaggaagctgtacagtagttagggacctgaaagatttattattgcattcatatttttcaataatggatgaccttcgttttcatgcacctcctggaggagagccatatgaaataagagtgcttgacattcctggtgcattattcgctgctgcgtgtggatttctagtggatggaataatgttcacactaattgccttctacaagttccctgtgatgcttttcaaaggatggaagcggctgatcgaagacttagtcggcagggaaggacctttcctggagacagcttgtgtgccatttgctggtcttgctattcttctgtggccatttgctgtttttggagcttttctagcctccatcatctccagtattcctttaggtgcttttgctgctgttgtggtttatcaggaatcctcgcttatcatgggactaaattatgtaatatcatcagtggccatctttgatgaatatacaaatgatgtgcttgacatggcaccaggatcctgctttcccaggtttaaataccggaaaaatgaagcttcgacagagggtggttcattatcaaggcctgcctcatttaaggacaagcaagacgggaagaaagctccatcacgtgttacatcgtttaagggcagctttgatgagttcaatccatttaagttgctagatcacctgtttgaggagtgtaagcaccgtggagaggttctggttgctgaaggagtgataacaccaaaagacattgaagaaacaaagtcaggaaaaatcgggattggagtacttaatgttggtttgccggcatatgttattcttcacgcactcattagatctgcaaaagctaattctgatggcctaattttaagtgatggttctgaaataacatctgataacaggcctaagaacacaatctttgattggttctttgatcctctgatggtcatcaaagagcaaataaaagcccagaattttacagaagaggaagaagcatacctcaagaagcgagtgctgctgaccagtgatccgaagcgcctcaaagaggttgttcctcatctgccatcatcactgaatgagcgaaaacaagctgaaatcgacgcactttcccggagattgcaaggaatcacaaggtcgatatcaaggtacccaacggccaagcgtcgtttcgacgaccttgtcagatcactctcggaagagctcgagaggacaatgggtggcagccaatctggcagtgtgtcccagatgcagaaactgagaagcggcatcagccgaatgctcagccagagatccatggggaagaggacgagcaaccgtggtgatgatcgggaggcgcagttgacaattgatccctaa

SEQ ID NO: 41117 - DNA, 1382 bp, Oryza sativa
  Clone ID: PAT_MRT4530_44493C.1
aacactcgccgtgagaaggcccacggcgtcgtccatcaatcagaccatcccctttcggcgtgtgcgagagtacaaagaaaaataatagtatgcacgaagaaatacagtaattaaatgttttttacaatagagtagggtaggtaaaaatcgagcactaatgctacagtacactctcggtcttggcagttcgcgccgaaatattttctaggcctgagaagaggagggtaaaaatgcagtaaaatccgacgcggtaaaaaaaaaaaaaaacagtagaggaatgcgtgtccccctactgggccacacgtaccgtagccgcagctgcggtggtttttttttttctccttcgttttgactcgtcgctgcggctacgcgcacgcgcggcgcgccgcggtggcgtgcggggggcgttggattagtaccgggcgagagcgcggcggagcacctgggcgaggaggctgggggcgctgaggtgggggaggtgaccctcggtctggaggaactcgacggtggtgcggccgccgaggtgggccttgaggtaggcggcgacggaggccgggacggagacgtcgcgggtggtctggacgacgacgcagggggcgcggaccatgccgagcacgccgcggaggtcggtcttgaagacggtctggcagacgtggagggagatgtccgggcgcatgttgaagagggtgcggctgaactcctgcaccgccgccggcacgtcggcgcccaccgccagaggcgcgtaccccgtcgcccacgccgagtagttcgcccccatcgcgtcgaacacctgctgtatctcctccagctcgaacccgccgtggtagtcgctgtcgttcaagaaccggggagaggcgccgatgaggacaagcttggcgaagaggtcaggtcgtcggatggaggcgaggatgccgatcatggcggagacggagtggccgacgaaggcgcagcgcgggatgcggagcgcgtcgaggatggcgagcaggtcgtcgacgtaggcgtcgaggttgtcgtagcggcggaagtcgaagtggtccgggttgacgctgccggcgcagacgaggtcgtagagcacgacgcggtggtcgcgggtgaggtacggcagcacgcggctccacgccgactggtccgtcccgaagccatgcgacagcaccaccacccgctcgccgctccccaccacccgcacgttcaggatctgcagcagcttcgccccgctcggcgccgccgacccgctccctcctccccctcctcccccgccgcccaccatcgtcttctccgagctcgacgacgccgacgaccccccgcccccgccgccgccgctgctgctgctgctcgggctactgggcggcggatgcgtcgatcgcagcatcacaccctcgtgc

SEQ ID NO: 41118 - DNA, 274 bp, Oryza sativa
  Clone ID: PAT_MRT4530_44494C.1
acgcccacgcgttcgcaaggatatagagaatgcagatgaagcgaaactgatagaaatcaagaatggtaggttggctatgcttactatgcttgggtggattgcgcatgcatttgtgacgcatgttgctccaatcgacaatctttttacacatctctcacacccgtacaacaaaaatatcatccacaccctatcctcttcttgaaaatatcctgcaccatcaaactttttgttcctttcttcatcttaattaatctatcaatcaacacattcacac

SEQ ID NO: 41119 - DNA, 1364 bp, Oryza sativa
  Clone ID: PAT_MRT4530_44495C.1
ctttttttttttttttttttttttttttttttcctgcgcttttttttttttttttttttttttttttaccacagaaaggcaaaaggattacattatattagattaaacctaagatgttgtcatgtatttgcgagaaacagtaagctcttaaaattactaaatatgcccaaaaaaaagggaagcaaatgttaactagagataacaataacctgataacaagccatactgtctgggtgacgccgcgagatacaaatacagttgaccataaatattaaggaagcagatacagtatgaggaagtactctcagagttccaattttctatcatacggtacgcaatctaatggagactgaatatcgattattgcatcatccctttcacgatttcaaaccatgagatgccgaaccctacgaagaagccaccggcggagatatcagcgcaatatagaagcgttacgccgcagagtttgaacgctcgtataaacgtaggttccgcaagcacctcaaaaccagactcgcgcgacttaacgcctaccacgaggcccgccagctgacctcggaccaggaaagcgtgagaactgcagccgcaaatgggctgaatcacgatcgtgttcgtcaaacttataaccttgcaatgcttcaagagcaagagtagcttgcgcagggttatcaaaatcaacaaagcacaagacatgaggatctcctccagggtgtcttgactccttgttgacaagtctgacttcacgaaaacctacaaaagggcgaaatatatctctgctgtccatgccaacaccaatcatccgacgatcatcaacaggatagcctcccattccacccattccacccataccaccaacaactggcctattggtttcagtggcagcaacagaaggcatcccattacgcaagtagcgatcataggatgctccgatagcctcattctctctcagtgcatggtaacctgtcctgtcagtctcacgtggataataaccagtcatgtcttgtcctgcaggcacatctccgtagtcggggcgcgcgcgcttgagcggcggcgcggcggcggcctgctgcgccatggcggcctgcgggggcatgcccgccgcggcctggccggccgtcgcgacagtcgccgccgtgggggccatccccgccgcggcggccgccgccgccaccatggcctgctgctgccgcgcgtcggcgaacctccagtagttctcggcggccatcgctgcctccctctcctccgccgcctccccccctaggtcgtggatctcgcctcgcggcttggtgagcttgacggcggcggcggcggcgcgcggctagggtttcgcgaacacaacacggggaggagtctggcctcgttgc

SEQ ID NO: 41120 - DNA, 1292 bp, Oryza sativa
  Clone ID: PAT_MRT4530_44496C.1
ccggccgggctttttttccctttcccggacgccggccgggctcccactacccaaagcgaaaccgacctttcccccttcttctcccctctcctacctcgccgagatctagccctagggttcgccaacttcaccggcggcgaggagcacgtcaccggcggcgagcacaggcggagggcgaggggagagagagagggaggaggacatggggcagcagtcgctgatctacgcgttcgtggcccgcggcacggtcatcctggccgagtacacggagttcaccggcaacttcaccaccatcgcctcccagtgcctcatgaagctcccggcgagcaacaacaagttcacctacaactgcgacggccacacgttcaactacctcgtggaggacggcttcacatactgtgtcgtagctgttgaatcagtagggcggcagattcccattgcattcttggatagagttaaggatgatttcacaaaaagatatgctggtggaaaagctgctactgctgctgcgaacagcctcaaccgagattttggatcgaaacttaaagaacacatgcagtactgtgtggatcatcctgaagagattagcaagcttgcgaaagtgaaggcacaagtttcagaagtcaaaggagttatgatggaaaatattgagaaggttcttgatcgtggagagaaaattgaactgctcgttgacaagaccgagaatctgcgttcacaggcccaagatttcaggcaggcaggaacacaggtaaggagaaagatgtggctgcaaaacatgaagatcaagctgattgttcttggcataataattgcgctcatccttatcataatcctgtccgtgtgccatggattcaaatgcaagtaggcataaattgactcattcaactgcacttacagtactgcttgcttggggcaaaaagggggggaaattggagaggtgtttggttctttctagtttgtgctctggctggttacggcgcctgagtgtttacgctgtcgtgtctgttgaatgctggttggtgactcggtcagtgggttgtgggttgaagtgtcgtgtatttttggatgctatgtgtgtatagcttggattttaacctccttgttctattattattattatatgatgattagattcacttaattgcccccggaatgcctccgttcctcctggtctgcttgctaatataagaagttaccggtagtaatgaaacagaaaattcacgtttctactatttttcagcatcttatatggaagcagaggcctcaatgaaacataaaaaaaaaaaaacaaa

SEQ ID NO: 41121 - DNA, 2091 bp, Oryza sativa
  Clone ID: PAT_MRT4530_44497C.1
cccacgcgtccgccgcgtttcaaacaacacacgcgacgcgacacggtcgctagtgcggcgcggcccaccaaggcaccaacacgtaaggcaacacaagacaaaccaaacaaacacaagagagtagtagtttttttacttttagggctctcccagatttcctctccttcctcgcgccgcggcgatcgatcgatcggtttccggctagcttccgaaccgggcaaaaatccccaaatcgatccgccgcgagaggagaggcgggcggcgatgtcgtcgtcgtcgtcggggaggtcgagccggatcgcggtggtgacggaggaccggtgccggcccagcaagtgcggccagcagtgccgcaagcgctgccccgtcaatgccaccgggcgtcagtgcatagaagttactccatcatcgagagtatccttaatttctgaggaactatgtattggatgtggtatttgtgtgaaggtatgtccctttgatgctatccagattataaacttgccaagtgatcttgacaaggagacgacacatcgctatggaccaaattcatttaagcttcacaggctgcctgttccaagaccagggcaagtgttgggcttggtagggacaaatggtattggtaaatcaacggcacttaaaattttggcagggaaggtgaaacccaacttgggtaaattcacagatcccccaaattgggatgaaattatgaggaatttccgtggatctgaactccagaaatactttactcgtctgctggaagacaaaatgaaggcaactatgaaaccacaataccttgatcacattcctaaatctgttacagggaaggttggagatcttcttagcaagaaagatgagagacatatgaaaaacctactgtgtgatactctcgagttgaatcaagttcttgaccgagatgtctcagctctatctggtggtgaactccagagatttgcaatagctgcccgtgctatggaagaagcagatgtttatatgtttgatgagccatcctgctatcttgatgtgaagcaaaggctgaaagctgcacaagttattcgctctttgcttcagcccaaaaactatgtaattgttgtggagcatgatcttagcatactggactacctatcagactatatatgctgtctttatgggactcctggagcatatggtgttgttactttgccctcttctgttagagaaggaatcaacattttcctggatggctttataccaacagaaaacctacgtttccgcgaggagaaacttacatttagagttaccgagtctactgaggaaatcgtagagggtcagacataccaatgctaccgatatcctacaatgacaaagacaaggtgtggctttaagctatcagtcactgaaggcagctttaatgattcccagataattgtaatgcttggtgagaatggtactgggaagacgacatttatccgtatgctggcaggacgagtgaagccagacaaagtaggagacgaagaagttgacgtgcctgaatacactgtctcatacaagcctcaggaattgatatctaaatatagctctacagtgagggatcttctattcgagaaagtacctggatcatgcactcaagcccagttcagatctgatgtcatgaaaccactgaaaattgagcaactcatggacaggcaggttccaactctttctggaggggagctgcaaagggttgcgctttgtctttgtcttgggaagcctgctgatatttacctcatagatgaaccaagtgcccatcttgattcagagcagcgccttcttgcagcgaaggtcataaaaagatttatcctccatgaaaagaaaactgcttttgttgttgagcatgattttatcatggcaacctaccttgctgataaggtggtggtttttgagggaaaaccttctgttgactgtattgcaaatgcaccagaacccctggcctctgggatgaaccgttttctttcgcatcttgatgtcacatttaggaaagatcctacaacctacaggcctaggatcaacaagctaggctctataaaggatgctgagcagaaagctgcaggatgttactactaccttgagtattaa

SEQ ID NO: 41122 - DNA, 441 bp, Oryza sativa
  Clone ID: PAT_MRT4530_44498C.1
atggcgccgcctctcctccgcggcgtgcccgtgctgatcgcgctcgtcgtcatggcggcggtggccttgctcccggccgcggccgccgacgacatgggcggcgtggtggcgtcggcgtcggggcggaggaagatggcggcggcggcggcgacgtgcgacggcgccgtgggggagtgcgacgtggacgacgaggaggaggtggaggagatggcgctgatgggggcggcgggcgccgcctccggggagacgctgatgcggcggtcgctggcggcgcggcggccgacgaacaggtacgtgagctacgcggcgctggacgccaacaaggtgccgtgcaacaagcgcggccagtcctactaccagaactgcgcctcgcagaaggccgccaacccctaccgccgcggctgctctgccatcacccgatgcgctcgcaataccaactga

SEQ ID NO: 41123 - DNA, 1989 bp, Oryza sativa
  unsure (1)..(1989): unsure at all n locations
  Clone ID: PAT_MRT4530_44499C.1
atgaagtttggactaccatctagattgttcagactcatggcttcaagtagctcaggagatggtggtttttcacggccttcatcaactgatgaagggccaatgccaatatactcttggccggataagcagcgtccacgagtgtgcatcttgggtggtggatttggtggcctgtacactgctcttagattagaatctcttgtatggcccaatgataagaagcctcaggtcatgctggttgatcaatctgacagatttgtatttaagcccatgttgtatgagctcttgtcaggagaagtggatgtttgggagatagctccatcatttacagagttactgaagaacactagtgttcaattcgtgaaggatagtgtaaagcttctgcgcccttctgatcactttagaagagattctggaggatcatgcactgccaggctcgttctagctttaggggctgaagctaaaattgatgttgtcccaggatctgctgaatatgcaattcctttcacgactttggatgatgctttgaaagttgaaagccagctgaaaatgttggaaaggagaaggtttggtaaaaattcccccgatattcaggtggccattgtgggattgggttactctggtgtagagttagctgctactatctctgagagactaaagaacaaagggattgttcaagccatcaatgttcagacaactatctgtcccagtgcaccacctggaaaccgcgacgctgctctgaaggttcttgaatctcgaaatattcaacttttcttgggatattttgtgaactgcatcagagaagcttctgcatctgaggattcaagtagcatggttacagatgcaaaagaagttaatggtgaccataagaaactactattggaacttcaacctgctcaaaggggcatccagagccaggttctggaggctgatatggtattatggacagtgggttcaacctctcagattcctcggttacagcctccagatgctccatatgttattcctttaaatggtcggggccaggtagagactgaggaaacccttcaggtaaaaggccatcctcgaacttttgcaatcggtgattcagcagctctaagagacccatcaggcaaacttctcccagccactgcacaggttgcttttcaacaagcagattttgctggatggaatctctgggcagcaatcaatgaccgacctcttctgccattcaggtttcaaaatcttggtgagatgatgacacttggtagaagtgatgctgcgataacagcaagctttattgagggcctgaccttggaaggacctttagggcatgctgctaggaagattgtatactgccttaggatgcccacagatgaacatcgagtgaaggttggaatcagttggttcacaaagactgcagttgattcacttgcctccctgcaaaacgcagtggccaactcatttccgtctcccgatccggccaccaaccgctccccatccgccatggatcccgactccgaggtcgccttcgacttccagccctacctctgccagtacaagagcggccgcgtcttccgcctcggcggcgaccccaccgtccccgccggcaccgaccccgtcacccgcgtcgtctcccgcgacatccacgccggcgccgccaggggcgcgcgtctacctcccgcccggcgccgccgtgttcaccgagaagctccccgtcgtggtgtactttacatggcggctggttcattaccatgctctcccgccagggtcgatcccccacgcctacctaaacgatcttttggtcccgggccggcgcgattggggtgtccgtgtactaccgcctcgcgccggagaacccgctcccggcggcgtacgaggacgcgtgggcggccgtgcggtgggcggcgacgcgcggngacggcgccgacccgtggctgctcgaccacgccgacctctcccgcctgttcctcgccggctgcagcgccggcgccaacatcgcccacacatggc

SEQ ID NO: 41124 - DNA, 781 bp, Oryza sativa
  unsure (1)..(781): unsure at all n locations
  Clone ID: PAT_MRT4530_4449C.1
ccggccggggtctcggcagctcttggctccgcctcctatcctctcctcttcccctactctcctctcttctctctctccgcctccaccagtctccccctctccctctccaaaccctccatagctataggcagcagctgggggtgctggcggcgttgaggcattcttgaatccggcgtggtcgcttccccagatccatcttttttggatcgtttcttcgggcgatttggaggagcaaagaaagccctcccaaatcgcagaaaggagccgcctttgcgaagctcctgctgccttctctgctcgttgttcctggcctgggatcacatatccccgcaaggaaaaaaaaggagccgcctttgcatttattcttttggccccttgggagatcgccctcgtcaagatttggtgggaagtgggaacccaattcgctcgcggttctcacttctccttgtgtggaaaggcgccgctttggctcctgtttccccccaccgctcgctcccgcgccgctcctctccctatatatctatctctctgactatcttgttcacatacgcctgcgcgcctgcctaactttgttttacttcgatccatccaccggttttcggcttcccccgtctcggcatttgatcgttgcttagtcgcttgtgnatttgacgcaggccagatcgctgtctggcgcttgttttattttgagtntgntgcgnngtgtttgctgttcttggttggaggcatggctgcggcggccaacgaaggggggcgcggcgctgttcagcgaggaggagct

SEQ ID NO: 41125 - DNA, 3248 bp, Oryza sativa
  Clone ID: PAT_MRT4530_444C.1
atgcgcgtcaccccggggctctcctcgttcgccgacgagcccgcgcgggccggggattcgctgcggccgctgattgatttcgccagggagaagktcgggggcgccgcgscggaagtgcggctcatggccaccgccgggctgcggctgcaggaggggcgcctccaggaggccatcctgtcgtcctgcagggacgtgctcagggcttccggattccggttcgaggactcttgggccgaggtgatcccaggctctgatgagggtatctatgcttgggttgcggcaaactatgctcttggcacacttggaggggatccacacaaaaccattggaataattgaacttgggggcgcctcagcacagctgacatttgtttctgatgaagtacttcctccggaactgtcaagaaatttcacttttggtggaacaacatatactctctatagcaacagctttctaaactttggacaaaatgctgcacaagaatccttccgtgaaatactgcggtcaaaagactccaaaaatggtacacttgttgatccatgtgctcctaaaggatattctcgcatcaaagaagtaatatcaagaccaagcagtgcttcaaaatcaaaattagagaatcaatttgctgatagtggggatggagactttacattctttggactgaagcaatcttcatcactgtctgattttgtgcttgctggagaacaattttgcaacaaggacttgtctactcttaggaaaatgtatcctaatcggattgagtattcaaatcaggttggagacactcaagttgaatgggccctgggggctttcatctcaaacataaaaggcgtaattgtagagccatcagcaactggtagatcagcccatagaagtagaccattgcttgctgtgctgctgggggtgtttcttctaggtggagcactttgcttggcaagatggaggaagcccaagacgaagatcatatacgacttggagaaaggccgatgtttgaggtgttatattgtcaatgttctgcaagctagtaagagtcaagatggccgagttggtctaaggcgccagtttcaggaaacagaaagcagcaggaagaacatctcagatggaaagcttcaatgtgttcttaattatgctttcgtttggtcaagagctttattccctgagcctcttaatacattacaaccagttctcaactggaaattaaactgttacaaacggataaagatgcttcgaaacaggattgccggtcagatgcccaaagcttttgacatcctacaagatgttgcgcaacacactctgtctaatttgcatgatatccagaagagcttaatattttggcagtccaaagcagagggaacaagttcacagaaactgtattttatgatctttgaaagaggtccaagggcctttgtcgaagcagcatggcaaacactgactagactcaagagcaatgggagtccagtcccgcaccttttgcactctgcttctgatatggtctcaacaaaacttgctgtcctgacaagtatgcaacactgcttggctgcttttcttgctgaggtttactttgaagttgataagtgcagaaaaggactaacagaaagttcagataaatcgctacatactctattcattgttctgaattctgtcttctccaaattggaggtatcatttagaaatgctgttgagggacaaactctattatgcacacatgatgggaagtcgcctgaacttatctttgaaagattgccagaagttgatgttgagagttcagagtggacagaggtgttatcagcaaatgctataacattgatctaccaaaacctccagaagttcgatgattttatttctgatcagttgtatatgcccatccaccaccatctccaggactccgcatcaattttgcttcgacactggcaatgtggacataccacagaggcatgcgttccttcagctttagcaaggagataccagcaagacattcacctgctcctgctgcaacaaggatatggatgtggtagcttgatgggaagttctgacattgacaactggattcaagatgcaaaagaatcgatggttggtttttgggatgtgcatgttgggcaaccaaaatcatctatattactaagctctatcatgacctcattcttctctttgagaatcattagatcatttccatcagggatgaactttttgagacattcaaacaaagatctaaacatgaaatggaaaaacaagaggtccaacaaactgaagaatcattgcgcaggttttgcttcttgtgccttttttatatatctcaggatgttgcttgacttttgtgggaacacttcaaatgaaaaaccgccacaagatatgtcagagctagcaatgatggagattgtcatgaagaggttcttccccttctatctctatttaggatgcactcagttcaagttaacctgcattttttctaacattctgatcctaaaaattcagattgagaagcataaactggctcttctggaggcaatgctggagctggaccagatccttagggcaaatgagataaactttgctattcttgcagcactacctgcatttggtgtttcacttctgctgctctttgcagttcgagcatgggctacacatggccgtggtgctgagggaagaggtaggactgcacggcgtcagcgaaggctgcttcttgctgatgtagagaaaaggcttatggagtttcagaattgcatggctaatggaatggaggaagaggcatgctgtaagttcgggttaacactgtacacccttgatagactatacaaagctgttgaatcgcaggcgagagaaacaggagagtggtcaagcttgagagaagacatgtttgatctggcaaagcctggtgtgggcatggaagacaagctggttctgctgtcccggctcaaagggatgtacgactgcttacttccatcaccgtcaggtgtcttgccccgtctgtagtcttctcatcttcctttcctttccttttcttcttttctttttggtcacgtgtgacgattagtgaaccccaatcttagacgacatgaatttgcttggcgttttaagagtcgtcaaattttgaattttttatgccccgggtactttgattgtagccctttcggctccatggagtgatgatggcttttgtgctgctgcaatgtttgcaccagagattactgactgtaaatccaaaatctcttctaactggatgcttaattcatgtgccccccccctttttc

SEQ ID NO: 41126 - DNA, 495 bp, Oryza sativa
  Clone ID: PAT_MRT4530_44500C.1
gctctgggggtaaaggaaacacatgatggcccaaacggggcaaattattaaaaaaaacatgctacaagctaatcaagccttgacatagtatttatgtaggggagggtagggcccggtttttaggcagggggccaaggtaatatatgacctccctggggaaaaaccaaacgagttaaagggttttgggagtcccaacccctgcccctttgggatcaccagcaggcccaaaccaggggttttggggagcaccagttgcccttgctcggaggccggaatatgttgccccgttaactgaccgcccaagtccttcctgaagaaaaaaagggtcgttggaaacaactgcagccgtaaaaggagcgttaatcctttaacaggtttttaatactaattcaggctcatcataaaaatactttgaacccacctggaagggaccaaagatctcccttgtaacaagctaaaaattgccactttaaaggatttccgatagaggaacaa

SEQ ID NO: 41127 - DNA, 234 bp, Oryza sativa
  Clone ID: PAT_MRT4530_44501C.1
gggaagccacttcagtaattaatcttgccaaaaagaactaaagaaggatatgaaagaagaaactcacttaagttttgaatattttttttacaaccatgatcgattaattttttagaagcaaaaatcactgcaaccgatcagaactttttgactttggggtaattttttttgaaacttgtcaagaccaggagcttgatgacttgaacggggagaccttccggggtttgctgccca

SEQ ID NO: 41128 - DNA, 392 bp, Oryza sativa
  Clone ID: PAT_MRT4530_44502C.1
agggaggggaggaaggtcctggtgcggatatacagtgacggcttggagctcttattggaccgcgaggacaaggagcgcacatgctagtgcctgtctagacatgtactgggctgcggcctgctactccggttcaccaacggcccacactgggaaaacatacaaccacggatagtttatgtaactacctttcagagaactgaacattgaactgtggaggagtaaaaactgaaggtatcaccccagccttgagatccgtggacggaaataggaacttatttgtgaccgaaggaacaactgggacaatactggaaagagcctgtgatcatgtcatgaatagcgagaactcccggctaggtagcctgcagaacgagattgctgcacacggtaaagaa

SEQ ID NO: 41129 - DNA, 1548 bp, Oryza sativa
  Clone ID: PAT_MRT4530_44503C.1
ttagcattttccagcatctttttgcttccccattgcttccatctgttccttgtgcctagcaacattggcctccatctgcacctttgcatcagtgacatgcttgagctctgtggcatacctgtgcaccgtcccgtgcttgagccttgccgccgtgcgagcgtcgcgccgctgcgcgtgtgcctcgccgctgcgcttgtgtcgcaccgccgcgtgtctcgctccgccgtgtgagcgtcggagcctgcgcagcgcgcgccgctcgcgccgcagagcctcgcctacgtcgcccttcaccacgccccagtgcagcccttcaccacgccgttgcgccgcccagatccaccgtgccccagcattgctgttttttttattgtgtttttttttttttttttttttcaccaacgaaagtttcaattttttttcccatttcagattgttttatttaactaaccatattcattcattgggctgagttggtggtggtctgttcaccccatcctcaataacaagcccatacaacacaccggcatgcttctcggtcgatcctttgaagtacacctccttgatcttgttgtagcacccgagggtcaacagcgagtcagagccggcctggtggcaggtccccacacgcttgacatcaagaagctcaccgagcctgctcaggccgccgtggaggttgctgcagaacctcatgaggtgcttgatgtcgtagagcaccgggaagtagattctgatgaggtcaaagaaggcgggcatgttgtccggcaggttccggccggtgagcagcctgagcaggtaaccgaagtcgtacccgctgtggaaggtgatccactgcacgtcggcgttgagcacgacgcccgacgacatgagcagctcggcgaagcggatcgggtcggccccctcagcggcgaaccgatcgaagtcgatgccgcaggtgcggagcatctggatggagtcggcgttggacgggtcggtccgggggtcgaacccgcggaagttgaactgccagatgcagcgcctgccccccgtcccccgccgcgggaggtcgccgccctcgtcggagagggtgaggccgagctggatgagcttgagcatgttgacgttggcctcgaggttggcgtagttgaactcgtcggtggtgcggaagttgccgacggggcggcacacgatgcccgggaactccgtgtccatggcgacgtacgggtaccggtcgacctcgtcgcggatcgccgcgatctccgcctccaggttccccgcccatacctcccggatctccacgccctcgtcggggctctctacgcaggctgcggcggcggcggccatcggcgcatccagcgacctagggttagggctacttgcggcgttgtaggcgcttgtcggagatgggaaccggcgggtggtgtggggggggggggaaggggtgggtcccacgcgtcagcggcgggcggcgatgcgtgggagaccccttgcgagggaggcggtgggcgggggggaggggggacccgtccaggaatggagagggaggagggggatgaagaaggcgagcgg

SEQ ID NO: 41130 - DNA, 2169 bp, Oryza sativa
  Clone ID: PAT_MRT4530_44504C.1
cagaccaaacccacacaggccaaagccaaaccctgtccctccctccctaccctccactccgatctcctcctcctccgccgctgcagctcagccatgccgccggtggatccccactcgtacaccgacggcgaccacccggtcaccgccaaggccgccctcgccttctacctcgacttcgccgcctccaccatccacgcctccgcgctgctcaccctctccgccccgcactccggcgacctcctcctcgacacccgcgccctcgccgtccactccgcctccaccgcctccggcccgccctcccccatccccttctccctcgccgacgccgccgaccccgtcctcggctccgccctcacgctcaccctgccccccgacaccacctccttcctcctcaccttctccacctccccctccgcctccgcgctgcagtggctctcgccgccgcagaccgcctcctcgctccccttcgtcttctcccagtgccagtccatccacgcccgctccgtcttcccctgccacgacacccccgccgcgcgcatcaccttcgacctcctcctcaacgtccccacccagctctccgcggtcgccgccgcgcgccacgtctcccgccgcgaccccctgccctccgaccaccggggcgcctgcgacgacgcgctgtggtgcgcgccgggccgcatcgtggaggagttccagatggagcagtccgtgccgccctacctcttcgcgttcgccgcaggcgggatcgggttcagggacctcggcccgaggacgcgggtgtatgccgagggaggggacaaggttctcgacgaggcggcgagggagttcgccggcgtcgaggagatggtcaaggttggggagtcgctgtttgggccgtatgagtgggagaggtttgatctgctggtgttgccgcccagtttcccctacggtggcatggagaaccctagaatggtgttcctcacgcccacggtgatcaagggggacgctgctggggcgcaagtggtggcgcatgagctcgcgcacagctggactggcaacctgatcactaacaagaccaatgaagatttctggctaaatgagggtttcacaacatatgcggagcggaggattgttgaggtggtgcaaggggaggagcgggcagccttaaacatgggaattggatggcggggtttgaacagaatgatggagaggtttaaagataacatggagtatactaagctgaagccaaagatggcagggattgaccctgatgatgtgtactcagaagttccctatgagaaaggcttccaattcctttggcgcattgagcgtcagattggtcgacctgcatttgatgaattcctgaagaattacatatccacatttaagttcaagtcgatagacacagagacattccttgaattcctgaaaaccaatgtacctggaatagaaaaccaaattgaccttcaactgtggatcgaggggactggtatccctccggatgccatggaaccagagtcagctatttataaaaagatttgctccctagctgcagagtttaagtctggaaaacttccaagtgaagatgaggtagcagactggagtggacaggaatgggaactttacttggaaaacttacccacagatgttgaagcttcacaggtcactgctctcgatgagcggtacaagctatcagaaagctgtgactacgaggtcaaagtcgcgtttctccagcttgcaattcccaccggctgcagatgctacttcaacgaggttgagaaatgcttgaagcaagtggggaggatgaagtaccttcgcccgctctacagctcgctggctcgatgctccggggaggagaagatgcttgcccataggatcttctcagaggcgcatgaattctatcatcccatcgctcgtagcgtcgcagagagcatcctctcgaagcatggctaagccgaaacctatccttttatatatcctatatattgctgaacctaaagtaggaagaacatttgatgtttatcgacttgttgctcactagtagtttcataaattatcgctctctggagtaaccctgggaaaaactgggagctcaaaactgtgtcctgacggtatacaattgtgaattgtgactgcgcatcaaaatttcctggtcctatgagttgttccttcccccgcaaaaaaaaaaaaaaa

SEQ ID NO: 41131 - DNA, 105 bp, Oryza sativa
  Clone ID: PAT_MRT4530_44505C.1
atggcgggagcggcagcgacctggctgctctaccgctgccgcctcggctccgtcgagttcttcccacaagacatcgacaccgtggagcagctgtatgtcttctaa

SEQ ID NO: 41132 - DNA, 268 bp, Oryza sativa
  Clone ID: PAT_MRT4530_44506C.1
acaattatgattgtattaatatataaaatttatattgttaatttagtgagtggaaaaaaaatattaatataagatggaatgggaactaaaagagccacatacagaaatttcatagtatgaaagagcaaaccattgtaaatattaaaggtggtacacaagattagggtgagaaaaaaaggggagtcctaaaagtacttagtgttacgcaatggaaacgttgggggcgactttttagaggtggttattgggatagttgggctaggttttg

SEQ ID NO: 41133 - DNA, 1306 bp, Oryza sativa
  Clone ID: PAT_MRT4530_44507C.1
gcacgaggagtgattgatgcccttacctatgcaagagccaaccctcttatgagaaaggttaagatgatgggtagagaagataaaatcatatggattccaaatgacaatctcaggagactcgtgagatcattaaacaagacctatgccttacttcatgcaaagaagaagtgtctgtcctcattaacttcttcaaatgtcttagtgggtgaggatggaagtgcagtaattcagggtgttatagagattccttacagtgaggaagaagcttgtttgtcgatacaatgaaactgcttccattctgaaagagctgattacagagtctgtggggtctgaagctattggtgtggattgtattgccgattttcgccgtctactccgccagatggagagcatgacatcggtttgtcaggagtacatcatcagcaaccacgcttcgcttatacctgatgctaacaggacggcggtatttctattattttacaatcacatcatgggtaagctcgcccaggagcaaccaagactgaagaatcagattattagcaagttgccgtatgatgggatttggctaggcatagttatttccaaccgctttctcagaagatggttgaatagccatagggaatacgtgagtaccggggatgatgacatgagctttaactggaatgtccgctctcatttttacgtacatctgtggatctttgcttatagtcaattggaggtagaggaatgcttatatggtgagtttccagagcttctgttggagattgagatcctgctatggaaagcgaatgagatcgatgggctaggattcgaggataagttttagtggctttgagatatggcaatgcattgtaatatgggtgaattgtctgtatgacgtttaatctgagatcatggatctcttgttagggctttaggtggtgtttggatccagggacttaactttagtctctgtatttagacactaatttagtctattaaatatagactacttacaaaactaattacataaatgaaagctaatttgcgagataaattttttaagcctaattaatctatatttagagaatgtttactgtagcatcacataggctaatcatggattaattaggctcaaatgagattcgtctggattaattaggcttaatagattcgtcttgtgaattagtccaagattatggatgtgttatattaatagtctacgtttaatatttgtaattaatatccaacatccgatgtgataaggacttaaaagttttagtcccatctaaatagggtcttaggttaaaaaaaaaaaaaaaaaaaa

SEQ ID NO: 41134 - DNA, 599 bp, Oryza sativa
  Clone ID: PAT_MRT4530_44508C.1
tcctgcagcccagatcatgccggagaagtccagcgactggcaccgctcctccatcagtatctccttcctacacacaccgttgattatatatatatatatatatatatatatatatatatatatatatatatatatatatataggacactcatatggggcaccatggtgcccgggcaccatggtatcaaatacacaaaatatatatatatatatatatatatacacacatatatatatgcatatatatatatatacatatatacacatacatatatatatatatacacacacacacacacacatatatatatatatatgtatatatatatatgtatatatatatatatatgtgtgtgtgcacacacacacacatatgtcacaatatatatatgcataatatataagcatatataacacatacatatatatatatatacacacacacacacacatatatatatatatgtatatatatatatgtatatatatatatatatatatatatgtatatatatatatatgtgtgtgtgcacacacacacacatatgtcacaatatatatatgcataatatataagcatatatatatatatatatatg

SEQ ID NO: 41135 - DNA, 120 bp, Oryza sativa
  Clone ID: PAT_MRT4530_44509C.1
atgaagcggtggtgcaagactttggagatgatggatgctacagcgaaatctttctccaagttggagacctgcattggtagccccaggggcagaggcaagcctagggcaacttgggcttga

SEQ ID NO: 41136 - DNA, 161 bp, Oryza sativa
  Clone ID: PAT_MRT4530_4450C.1
atggcaaaaaagaaattcggcagccgcttctctcgtcgcctccccagcccggtggccaccgccgaccgtgcctggcccttcgctgccagcctcgctggcagccgcccgctggccccgccaccgtgcacaggccgccaccgtgccccgctcactcctcgccg

SEQ ID NO: 41137 - DNA, 962 bp, Oryza sativa
  Clone ID: PAT_MRT4530_44510C.1
atgcggggcccaccggtcagcgacacgggggagagagaggaggggcggcgacgccacgtggcggccgatccgacggcccggatcgccctcgggccgatcggcgacggcggcgcgcgcgcgtcgcggcgccggcgacggcatccggcggtggaggcgacgcggaggcggcggcagcggacggcggcaacgacccaaagcgacggcgagcgcgggcggcggcgacgcacggggaaacggggagggagaggagaggagatgcctcaccgagggtggccggcgcgcgggaagacgatggcggacggcgacggcgaaccacgggagaacggcggcggctagcggacgagctccggcgtgccctaaggacgaagaggggcggacgaggtggatctcggccgcgcgaagctaacggcggcgacggcgcgggacggcggcgagcctagcggcggctagcggcggccggagtagcaaaagcggcggcggcgggtggttgcacggcgcggaggcgatggagagctcgggagagtgcggcgaaatggggaaaaagagagagggagtggggaggagagagaggcgggattcgattttcgaatcccggccatctcgggcgcgggcgcgaacgggagggagagggggaaaggcgcggacgactcggcgcacgcgcggacgtggccgacgtggcccgggagaggcggagacgagggcgcggcggcggtttcggcgcggcggcgcgagcgagatcggcgggaggagggagacgggaccgacaggtgggccccacctgtcggcgaccccgagaggagggaggcgggcggccggctattgggctgggcctcggcctgcggccggcccagcaaggaggaggggggggagaaaaaggaaatgggccgacggcccatttcgcaaaaaggaggaaaaagaggggaaaaagaaaaagaaaaagaaaaaggaatttccctggaatt

SEQ ID NO: 41138 - DNA, 353 bp, Oryza sativa
  unsure (1)..(353): unsure at all n locations
  Clone ID: PAT_MRT4530_44511C.1
acgctcattagtggtatcactgtgggagctgccaccaacatgcgcgttattttaaaagagaggggcggtaacaacatcnttctgaacatctaacagtcatacagggatgcaatcgtggttgaaaataatagagatgggatgacgggcaccattcacaaatccgctaacatcgtttaatacgacgctggtcgcgtaggtttcttgttatcaagcgccgcgtaagtcctgggacctcttgtttcaatcccaaaaacgatccaccaaaataaattttgtaccttggaaccaaccaacggatggattgtttatgtgcagttttcgtagctaattcaactggcggtgatttctttgcc

SEQ ID NO: 41139 - DNA, 539 bp, Oryza sativa
  Clone ID: PAT_MRT4530_44512C.1
aaaaaacaaacggaaggggccggggcttttttttattattaaaacaaagttccaaagcaaacctgactgggcaaaaattttaccccaggccgaccaagatctttttatccgggggaacccaaccccgttgaaatcccccacctcctttggcaattttccaattttacaatgggggggggcccccaggttccggggcgggtcttccccggtggttttgcttcccccaaggggccggtttcttctatccaagggaaaaaaattccccgcccaaggattagggaaaacccccccctctacaataagtccataactgcaaacaagggtcccaccccctaaaatgcgtgtccattttatggccccccctttgagtctaaaacaacccgcgggagggccccaaaacccttggtttggttaaactccctacatacccaaaatttccaaaacagctttgaatctcgctgacaatttcatgccaaaatggggggggaactttccagcttgacataaaaatctggcctataaatgttaccctctggggg

SEQ ID NO: 41140 - DNA, 383 bp, Oryza sativa
  unsure (1)..(383): unsure at all n locations
  Clone ID: PAT_MRT4530_44513C.1
tttgtggccgccgnntatttttttttttttggttaaaaggaaacaaagtattctaatcaaaatgtaatagaaaacagtaaaccattgtctaagcctcaacctggtgtgaaacaggtgaccaacagaaaccaacacaggggcatcatcagggagacagttagcgtgatttgccgttcacgatgtgacaatacaaaaaacaaaatctccacacgcaggaagggaacaagaaacccacaaaaaatccgttgacttgtcttatgtactttcggtgcacttattatttacaaaaagccacgaataaccatctcacaggagtgctttaccgtgccctgttggcactgggaaaagaaacacccttaagcgagtgttcccagcattttcaa

SEQ ID NO: 41141 - DNA, 1846 bp, Oryza sativa
  unsure (1)..(1846): unsure at all n locations
  Clone ID: PAT_MRT4530_44514C.1
gcaagtaagcaattctccaggattttgcaggttttcattcgacctaacaagagctgaggaggagttacactgaccaatccagggtggtgcgaatggatggtcttattattttgatttgaagttgatggcattgcctttgacagaaggcagaaaagccaagttttagaagtacatccaatgccagcaatttttcagtttacgagattcttaatcccggaattcatccatgaacttctcgtggaactccttgaacttggatatgatcgctggtattttgtcctcctgtggcaaaattgtgcatctaaaatgccacgttccaggaacctgcccaaatccagaaccaggaacaacaacaattccagtagcttcaagaaggcggcgggcataatacgcatctggggcagtaccagctgcttgggcagctccaattgccttctggggcaaatagatgcgagggaagagatacatcgcaccctcggccttgttgcatgttatgccttctaagctgttgaaggcttcttccaaagcctttgcacgtcgagccagagaggagaggatcccgtctttctctaccatgaaggattcataggattcatccccagccttcggtgggttcattatgaggctagcgagtatttggccagacacgttggaacacaggtttactgatgccaccttgtaaatttgttcccttacatcagcgctaaatccagttacttccatatagcctcctcgttttccacattctccgtagtaacctttcgaaactgattggaatgatactaaaggaagatcatcatctgtgtatcccattgatcgtgcgatctttttgaaagaatggaatttcttgtcttctacatatatgttttcttggtacacctcatctgcaagaagaacaagtccttcatttttgcagaattcgacaattttcttttgattttcctcagcaagaacctgcccagttgggttccctggatttataacaacaagtgctctaacagtgatacccttagactgagcctcctccaattgtttcttaagctcatcaacctccagtccccaacctgtctcttcatcaaggaaataaggaacaagagaaccaccatggagagcaattgacgcggagtagagcgggtattgcggaatagggcagagaatgccatcattctcagatcttatcaataattgcatcatcatgtgcactgctgggcttgctccatctgttaggaatatgttatctccactagcatgaaaaccatcacgggcagcaattccagcagcaatttcatcacgcaaaccctttataccctgactatggctataggctcctgttgctcttcctgggatcttgtctagaatttgccatgctctttctatagcatctgaactgtacagagcatgagtttcacttttatccagcagagctggatgatcacataacgacaagacctctctgaaaaatgtaactggctgctggccaagagattggggatttccaatgttgcaataaagtatctcgtcaaaaggaagtgagtctgggtttttctgtaattcttgttgtaaattctgcagaataaaatgtaggtcataatccaagttcctaaggaagtcctgagcatgtgtaacaatctctccacggacagcatattcacacttcaacaccttggggttgatggtgtcgagtgacaccggcgccgcgccggcagccgcggtcgacatggccctcaccatggcggaagccatcggccgcctgatctgtgcgccgctttagaggatccaagcttacgtacgcgtgcatgcnacgtcatagctcttctatagtgtcacctaatcaattcactgccgt

SEQ ID NO: 41142 - DNA, 2364 bp, Oryza sativa
  Clone ID: PAT_MRT4530_44515C.1
ttaattgtagggctgagatctagttctactcccaccagtattagtattagtggaagtagaaatatggaagggtgttttcgtcaagggaaaaaaatcgcgtaggggtattatcgtatttttcagtctcttacccaccctatccctatccgattcctctcgcatcgtcgccatttcaccacttcccgtcgccattcccccccatccccgcttccgccgccgtccatctccctcgccgcctccgtcgcctgtcctggcgtctcctccccctccagcgccgtcgccttctctgctccctcgccgcactcgcccttcctcgccgccttctccaccgccagcgcccctctgtcgacgtccgcctcccccgatattggcggcttccctccgtcgaagcccttccttgtcgccctcgccgccttcgcctccgcccgcgtctccgcgccggcttgtgagcccccaccgtcgctgtcctcctcccccgccctcttgtctagcgagtcgcgtgacgtagccgcccctccacccgcctccgccggcgcgcgatgagtcctcttcgccgcgtcgcctccccgcgccaccaccgccacgttctcctccccatggaccgacgcacccttctccactccacctctgtcgccatcgacctagccgcccccttctcacacgccttagatcaggtcgatctttactgattggctttgcgagcgaatctagtatttgcacctcacatcgcttggcgttaagaacggctaggtaccagtgtgtatctttaatattaattgggaggaaaatcatgtcaaatgctagatagtcgcgtgccatatctctaatccatcgtttatctcgaggtttgcttgcttcgacatgcgctccctctacatttagtagacctgttttcatggccatctctaggaaggccttgccatctcccctgattcctttctctttatagcggaggcataggatgtatgcatccatgacatcatcattcaagaattctggttgtgttagtactttcattcttatccgtttaacctccacttcttcaatatgcaccatcactttgttatcctccgtgttattaatgtaggtaatgaacgggtcttcttttttagtcaactcttgtttcgtagatgaagtcagtccgattagttggtttgtatgttcttcctgtaggacctgtaagcatcttcctgctttgattgcactggttactgctgtcgttcgtttcacaagtcatgtttacatttgggtttatataggtctctttgtgatgatttgatcatataggctcataggatcaatttgttcttgttcaacatcctcaaacacatgcatagtatcttttcaatttgggcattttgaatcattttcatgcaatctagtatcaatgatcgcatacgtggccaaaaatccattgtgaaaccgttgaaattattctctaaagtttggatcctttcttgtagccttccttgtaaagtgatattggctgattgttcagtggatgttatagagtgtacctgaatagaagtgcattgaaaatcttgattgctatgtgtatctgagtctttgtcctgctctttttcattgaggatttcattgcaatctatagttcccctaatgttgtcgacaaccttcccttcaccaaaagggtaagaaattcggtcttttttattttttttggtcccagtactgaattagtggcttgacggccagaataatatattgtcgcggccaatttatctaatcgcactttttcccaataccaaatctataagaggcatacgttcccctcaatgtttgttgtcttctctctaaaacttaatatgcctttcattaactgattgaggattagacttgacccgtttagttcactcattttgtccatgtcgtcaacgagattgagatattctgagcgcacatatctttgagttgtacgacatatgaatgatccaattgagaaaagaataaatcttcgtatgaagtggtcatcatagctagaagagttgaatattgcttcctgtaatgcttgtaaagtaattgttgtttgtccttcctttttgtacaggttgaacaatttaggtttgttgatttttggtgcctcaaatatcttctctccttttgatgtcagtccaagcaaacaatagacatcatcgagtgtcattgttatgaaggtaccatttatattaaaggcttccttctccttgtcgtagcttcttgcaatctcattgcacaagtttcggtcaatatgaattttgttaatctttagcaagttgcctgaatcctcgatagcttgcttttgacgtggacatagttggagtcctagctcatacatggcgtatggggagcatactagagttccctgat

SEQ ID NO: 41143 - DNA, 2035 bp, Oryza sativa
  Clone ID: PAT_MRT4530_44516C.1
tcagagaagggggcggctaggtcgatggcgacagcggtggagtggagaagggtgcgtcggtccatggggaggataacgtggcggtggtggcgcggggaggcgacccggcgaagaggactcgtcgcccgccggcggaggcgggtggaggggcgactacgtcacgcgactcgctggacaagggggcgggggaggaggacggcgacggtgggggctcacaagccggcgctgagacgcgggcggaggagaaggaggggagggcgatgaggaagggcttcgacggagggaagccgccgatatcaggggaggcggggaggcggacgtcgacggaggggcgctggcggtggagaaggcggcgaggaagggcgagtgcggcgagggagcgtagaaggcgacggcgctggacaggcgacggaggcggcgagggagatggacggcggcggaggtggggatggggtggactggcgacgggaagtggtgacgagaggaggcggggagggcgagggggaagggcttcgacggagggaagccgccgatatcaggggaggcggggaggcggacgtcgacggaggggcgctggcggtggagaaggcggcgaggaagggcgagtgcggcgagggagtgtagaaggcgacggcgctggacaggcgacggaggcggcgagggagatggacgccggcgaaggtggggacagcagcagtattgggcatgccggccggccgggcctgcatgggggtagggggtggggtggtgatgatggcccccgtgtcggcctgggccctaggcggtcgcacaacccgcctaggcccagggcctgcccgggcctgcatgggagtagggggtggggtggtgatgatggcccccttgtcggcctgggccctaggcggtcgcacaacccgcctaggcccagggctggctctgctcgcctgggggcctcgtgccgtggcggccagccgagcggcagcggcagggccctcgcgcggctgcggccgggccgaggcggaggcggaatcgcgccacggtggggtgaaggcaacctcgcgccgcggcggccgggcggcggcggatccggaggggaggaggctagccaccgccagatctgaaaggggaggcggccgggctgcggcctcgcgtggagggctgcactaggcagcggccgatgcggaggccggtgcggcggcaggcggtggaggccggcgctgccatggattttttttctttttttcttttttcgggcgacgacggtggcgatgcggcgcccccaggcggcggagcaggggaccccggcggaggcgagacggcgctcctgggcggtggcggggcggcgctcctgggcagagacgatgcggcgctccctggcggcggcgaggtggcgctcccaagcgacagcgatgcagcgctcccaggcggcggcgcgggggcccccggcagcggtgcgcggcacccaggcagcggcgtggcggccctcaatgccgatgtggcgacaccaggcggtggcgtgcgggcccagccggtggcgcgtggctcgcacgcggcggcgcgtcggcagcgagctctcaggcgacgggcggcaaggaggtggcaagcggcagcacaggggttgacgcgggggctgcatgcaccggtacggtggtcgcaggggctggcgaggaggtcgcaggcagcgccgtaatagtcccagtaggtggcacatccctctcaggtggatccattttcctccttttgtttggtttcatttgaagaatttgtactgcattatgtgaatgagatattggtggtggaggggaaggggaaggggaaggagaagaaggggaagtggaaggggaaggggaaggggaaggggaagaaggatgagaaggaggacaaagacaagaagatcaagagaaaaccatccccaatagtacaagctactactccacctgccaaaaggaggaagaataatgaaataccacatgacaatccagcaatgagaactagaagcaagcagagtagtccatcaatggggactagaagcaaggggattgattttttgtattga

SEQ ID NO: 41144 - DNA, 384 bp, Oryza sativa
  Clone ID: PAT_MRT4530_44517C.1
atggaaatggaattgatcgcatcgcgtatttcgcaggttgcagcgtgtgccgggaagggaggccacctgctactagcctacgacgactccgcgactgcacgattcggagaagatacccgtgggcgcacgcacagtcacagccgcacacagcacagggagtgtcctacacgtgttcatgtcctgatccgaccgaccgcgcgggctccatcatcgccgcatgcgttggtgcctactgtacgtgccattactgtcagaagctggtacactagggaccgtgcaggaaagccgtttgtgccgtgggttttcttttccctcgagtcgcacacaggttgggtacacaccgtatgcgcggcccggtgccacggcttcagaggagccccttga

SEQ ID NO: 41145 - DNA, 690 bp, Oryza sativa
  Clone ID: PAT_MRT4530_44518C.1
atgggcgacgccggcggcggcatggcggcgcactgggcggcgctctacggcggcggagttaatggtggcgcggcggcgggggcggagggaacggtgtcgagcccgacctccgggggctcgccggtggcgggggggagcccgacgagggggggcgcggcggcgctgccggggatcgagggcgggcgcgtcgcgaagcccgcgcggcggcgctccagggcgtcgcggcgcgcgcccgtcacgctgctcaacaccgacacctccaacttccgcgccatggtgcagcagttcaccggcatccccaccccgccctacgccaccgccgccgccgccggcggcccggtcatcagcttcggcgccggcgagtacggcggcggcgccatgcccgtccgcccgtccccgacaccggcgtccgtcatgtcgttcgaccacctcggccaccaccaccgccaggcggcgtcgtcgctgcagagccagctgttccggccacagcaccagcaccaccaccagtacggcggcggcggcgtcgtcgggtacggcggcggcggcggcgacatgtttctccacgggttcgagtcgtcgtcggcggaggagaggctgctgctgcagagcatccaggcggcgcagatgctgccggcggcgaggccgacgaccacctcggctaacaacgctaatggctacaacttcggatga

SEQ ID NO: 41146 - DNA, 743 bp, Oryza sativa
  unsure (1)..(743): unsure at all n locations
  Clone ID: PAT_MRT4530_44519C.1
attttgaatggccgggaaaaagtcttgtgctcgcccccgcgtcgcccacgcgtgggcgaatcggggggaaaccctagcgcctccgtcgccactctctcctcctctccctcccctcgccgccgccggagcgcgccgccggagaaccgcgtggccagccaggatggcggcggcgaggccaacccccgacggcgccccatctccacgcgtggatggcgggccggcgcgcggtgcaaggctgacgacgcggcgtggagacggtggatccgacgccgccgcggccggatccggcctccgcgcggttggagccggcggatcggcgctggatctgggcggtgccggcgtctggcggctggcgtacgccggcaaaggagaccgacgcgtgccgaggacgcggtggcgacggcgaggccacggtggcggaggcggtggaggatggcgcggggagacgcggctggaggctgacgtgtgcggaggccgcgaacggcgatgcgactggagggtggcacagctcccgacaggggacggctgcacggtgcgacgtatcggcggtgttgaatggcgtcggtggtggttacggagtgtcgtttgctggggttatgaagatggatgcgatggcgattctaccaatcgcccgttgatacgggcggtctggtcgaggcggcaacgacggtcatgggaggcctgtatttggctccgccgtcatcttttgaaacatcatactatcttaaaaaaaaaanaaaaaa

SEQ ID NO: 41147 - DNA, 405 bp, Oryza sativa
  Clone ID: PAT_MRT4530_4451C.1
ccaaaacactaggctgggatcccaaggagggctagagccatcttgatgtaatgcttagatcattgctcttgattgcccttgtcaaacttggacatgatgagactataaatgagggagttaggcggttccatatcttcataaaagaccgcaaaactaacattcttcccccagacactagaaaggcttcatatcttgctgtgatgcggactgttactacctccagcagagctggttatgatgccctcctgaaaatctacagagaaacagctgaagctcaggagaagtcacgcatcttaggttcattgtcttcatgcctggataaggatattgttcttgaggcactaaacttcatgcttaccgatgaggtacggaatcaagatgcattttatgtccttggtggtatca

SEQ ID NO: 41148 - DNA, 453 bp, Oryza sativa
  Clone ID: PAT_MRT4530_44520C.1
atggcgaccaccctagatacaacgcggtcggatccgaaggtgggggacgatcggagtggtgccggtgtcggggttggcgcgcagacggaggcggcgccagacggatcctacgcatggacggcggtgataggcggaggtggaggcgggggcggaggagacgacaagtggtggggtagaccaaagacggtggtggtggggaggtcatggctgcgggaggctggcgcggcgtgtgtggcaccaggagggttagttcgggcgatggcaaggaggccggcccgctcgatggagcgggaggctgacatcaccgacgacaggggggccggggaggctgacttgtggggttgtgcagctacgtcgcatttgattgaagtgagagttatcccctcaccagaagatcaggctatgagagagagcttcatcaaggagttactacatgtggtatgggaagtctga

SEQ ID NO: 41149 - DNA, 831 bp, Oryza sativa
  Clone ID: PAT_MRT4530_44521C.1
atgccccaaggggaaaacggcgcccccaccgcgccgacgcctcgccaccgtccggccatcaaagaagagtctcaaccttcaccgcgcttcacgtccatccacgtggttgggttggagagggagaagacgcctggatggaagctcgccgcaggcttcaacaccccccctcacagcatgaccgtcatcgccgcctcgatcaaaccgccgtgtcaacgggtgcttggtcgcatcgccgtcgcctccgtcctcctcaccgcagccatcgcctcaccgtcaccaccgccgacgggcttcaccaccgccgatccgtcgcgccttgtagccgtcccctgtcgccggctgtgccacgtcgccctccgccgtcatcggccgagcctccgctgcggccgccaccacggcctccacgcacgccggcctccagccgcgcctccatgtgcgccggcctccgcagcctccagtcgcatcgccgtccgcggcctccgcatgcgtcggcctccagccgcgtctccccgcgccatcctccaccgcatccgccaccgtggcctcgccgtcgccactgcatcctctgcatgcaccggcctccttcgccagcggccgccagccaccagcctccggctctcgtcgtcgccgccagccaccagccaccagccgctagccgccgccgcctccggccagatccggcgtggatccgccggatccaaccgcggggaggccagatccggccgcagcggcgccggatccaccgtctccacgccgcgtcgtcagccttgcaccacgcgccggcccgccatccacgcgcggagacggggcgccgtcgggggtagattgtag

SEQ ID NO: 41150 - DNA, 1150 bp, Oryza sativa
  Clone ID: PAT_MRT4530_44522C.1
cccgggctgcaggaattcggcccctcggtttgattggttagggagcaaggcgatggatgctaatggcggcaatgggtttggagtagagagcaacgcttcggctgtccatggtggcatggcgatggcttggcaatggcatggcggccagatgagcggcggcagctcgtgcgctgcggcgccgccgccggtgcaacagccggcgatggattctctcgcgtggtcgtcgacggtctcgccgagcaccggcgctgccacggcggcgagcggcgccggcttcttgctgccaccggcagccgtgcgcggcggcttcggcagtttcccggtcaactccggcggcatcgtcgagccggccggtgactgctcgtcggagtccaagaagaggagatcagacgagattgctggaacggatcacgcgaacgcatcgaacgcgcttgccgattctgggaacgagaccgagtgtagcaaagatgtcaacggcgaagtgatcggcccgccggcgacggcggcggccggcggcaagtcgaaagggaagggagccaaggacgccggcgaggcgcagaaggaagggtacagccatgtcagagctcggaaggggcaggcaaccaacaaccacagcttagcagagaggctgagaagggagaagatcagcgagaggatgaagctcctgcaagaccttgtccctggctgcagcaaagtcaccgggaaggcgttgatgctcgacgagatcatcaactatgttcagtccctgcaaagacaagtcgagtttctgtcgatgaagctctcggcagtcaacccaagaatcgatctcgacattgaatcacttgtcaacaattccaaggatgttcttcgttttcccgggcagccttcctctgctcccatgggattctccttctccacggagatgatgccggggctacaattatcacgaccgggcatccttcagggaggtgtccatggcatgatcaatccagatgtgttcaccagcctcatgcagaagcagcagcaaaatgacaagggagcattcagagagcctcagatgcatcagactttggatggatcattccgtaacaccgcacaaatgccgtatccacaggtcatgagttcagaagagctaagcatcaggcaagatcaagatgggtttcacatgtga

SEQ ID NO: 41151 - DNA, 327 bp, Oryza sativa
  Clone ID: PAT_MRT4530_44523C.1
atggctctgtccagcctgcaaacttttgtaacggatgggagcatggtattggtgcactcagctatatatatatggatcgccagtgaggtgtcgtacagggagcaactgagaaaggcggcagcggtggtgggagcaggggagcaaggtggtggcacgcagcgggggaagcaagtcggcggttgcggcctccggtctcccccgccctcttcgctctgggctgaggccgccgtgctcgccccgtcgtctacgctctgcccaaagcggcggtggggggagcaaagacgtcgtcagtggcgggggaagcaaggtggcggcgagcggggctaa

SEQ ID NO: 41152 - DNA, 1172 bp, Oryza sativa
  Clone ID: PAT_MRT4530_44524C.1
aaacttttcagatgaagatatttctcagattgtctcaacaaacctagctggctctttactgtgcaccagagaagccatgaatgtcatgcaacaccaacaaatgggaggtcacgtatttaacatggatggagcaggttctggaggatcaagtacaccattaacagctgtttatggttcaactaagtgtggccttagacagtttcaagcatcacttctgaaggaaagcagaagatcaaaagttggtgtacacactgcttctcctggaatggtccttacggacctccttttgagcggttcttctctgagaaataaacagatgttcaatttaatatgtgagcttccagaaacagttgcaaggacattggttccgaggatgcgagttgtgaaaggaagtggaaaggcgataaactacttgacaccaccaaggatcttgcttgccttggttactgcatgggttcgccgaggccgatggtttgatgaagagggaagagcagtatatgcagcagaggctgatagaatccgtaattgggctgaaagtcgagcacgcttctctttcacagatgccatggagatgtacacagaaaacacatgggtttctgtgttctcgctctctgtcgtctgcgcattcataattctttccagctcaggtggacctcttccaggcacatgatcccaggagttgccaaactagatggctacacacaccatttttcttcagtacggggattctattatgtactgatatatgacacacgaaacttatgaaggggggaaattgaacccagaaagcttactgcgtacatacgcccaacggtgagaagcatcagctgccactcaccatttaaggtcaagctaaccatgtgctcagtaaaaatgggtaaatagcatttgttgtgtgggcattccactgtttgtaagctgacttgtaaaaacgtgtatctgagctaaactgagcacgaacagattcgatggacaatgttatctgctgtacatgcatgtagtaatgtagttttgatgactgtaattctctggtcgtcgcttccagttgcacggttgcaccgtatgttgcaaccaccaatagaactgaaagtaagtgagagtaatcaagccagcatctgctatgtatatatatgactcatcagtctgttatatatcacaaggaaagcttcttc

SEQ ID NO: 41153 - DNA, 536 bp, Oryza sativa
  unsure (1)..(536): unsure at all n locations
  Clone ID: PAT_MRT4530_44525C.1
tacaatggagaggattcaatacacgatggaaagactggattgctctgatgttgtcaactacttcatctagatgaatgttgaatggaacagcaggacaggcaatacacacagaaggggattatgccaaggggaccctctttcaccgtatattttcatattagcgttgatcccttacaaagactactcaacatggctacataccaaaacatcctatcacccataacaagtatagtggtgaagttcagaatatcactatacgccgatggtgtggcaatctttctaaacccatgccgagtagatgtaaataacctgattactatgttgcaagatttttggcaagccacgggcctacaagtgaaccaaagcaagagctcggtagtggctataagatgtgagagcattgatctccaggaggtactgaatagtttcaatggccagcgggctagtttccccatcacatatctagggtgtgtttagttcacgtaaaaattgaaaggggttnnnnnnnccttnttttttnnnnnttcttnnnnntt

SEQ ID NO: 41154 - DNA, 360 bp, Oryza sativa
  Clone ID: PAT_MRT4530_44526C.1
atggcgcagaaatacttctggtatattatggttacagagttcatccgcaagcgcatggatataccattcctgcttcatgaacatggttgtgaccatgttgaggattttcctcaaaccgtgaagaaggattggcccaaaaatgcccaatccgtcgcgtcggctttgaaggcctgccgaaagggcttctgggagagcgacggtaggaatggcatgatgacctgttttcgcgagcaactggagaggatggcgagggccgaagacgccgctaccgccaacactagcgaagaccccgggccttcggagacagccactgattgtgagggcgaaggcaacgaaggccgagaccaccctgaggtgtga

SEQ ID NO: 41155 - DNA, 1671 bp, Oryza sativa
  Clone ID: PAT_MRT4530_44527C.1
cccgggctgcaggtgatggggcacgtctccacactatcaaggttcaggacaatgctcctgttttccttgttctgacacagaataaggctaacattttgtcacataacaatcaggttacaatcgatgcagtattcgccaggacatggcagttgcatcatagctcagaccacagcatcacaagcatgaacaagcagctacaagttacacaacacccacaggcacaggcacataaccatataactatgctaccccttgttgctaataccgacgctaactagtactcagatgtcatttgttgctcccagaacagcctaaatgggaggtaattctaaccaccagggcaatgccaattaactgatacaatcatacaaatcgaattcttgaatctttcaagatgtaaaccgggtgccattactggctctcgtcctcctcgtcctctgcctcatcctcgtcttctttgttgtcggtatcgctaccattcccggtacctctggcggcttcggcggcattgttctcgttgtactggtgttgtggctgctgcggggcagcatggcagtgcctgctgtcctggaagcggtaccgaacatggtgattgctgctggtaccgacatcagtggccatagcggttctcctcgtgccattgccatcggcagcagcaatggcggtggcaacggcacccactgcggcagcggcagcagaggcgccagcattgttggccttggagagctccatctgcatcttgagaaagaactggacgcgctggtcctccagctcgcgggcggcctctaggcggtcgcgctccatccggagctcctgctcccgcttcgccaactccacgcgctcatacacctcgccgaaccggcggatcgcctgcgccagctcgcgcaggccctgcgtgcggtggccgctgtccgcaccgttcacctcctcctccacctcgcgccgcctcttgccattcgcggccgccataggtggctccggcgggaacccgtcggacgactccgacgacgctgatacctggggaggcgacggcatcctccgcttcaccccggaagaggggaggaactgcgtgcgcgtgcgctgcgggaagttgacgcgcggcgccatgggcgcggtgctccgggcggcggtagcggcggcggcggagttggagccggaattgcccgcgcccgcggccccggcggcggcggcggcggggtaggcgcccgcgggcttgtgcacgggggcgaggagggtgtcgaggcggtggaagtagggccaggaggagtccggcttggccttctcgaccttgtacttcttcttgagcgtgtcgatgcggttcttgcactggacgtcggacttgggctgcttggagtagccgtcgcgggaggagacgacctcggcgacctcctgccactgcgggtggcggaggctgccgcgccccagcgcgacgaaccgctccccccaggcgtcgatcagcgtggaggtggcgccgtcgctccaggcgtcctcccttccccctccccctcccccacctccagaggaggagccgggcttggggatggggatggcgagggcgaggtggcccgggggcgccgcggcgacggtgacggggtcggcaacggggagtggggacggggagcgggacggggagagcgaggacgacggggacgcgccgccgtcgtcgtccat

SEQ ID NO: 41156 - DNA, 1652 bp, Oryza sativa
  Clone ID: PAT_MRT4530_44528C.1
ccccctacacactccacccacgtacaagccacaaccgaagccgactcccactcccactccctacactcccacgccatctccaacgccgcctcctcctctcctcctcaaccccacccacctcgccgccgccgccgtcgccgccgccgccgccgccatgagggagatcctgcacatccaggggggccaatgcgggaacaagatcggggccaagttctgggaggtgatctgcgacgagcacgggatcgaccacaccggcaagtactccggcgactccgacctccagctcgtgcggatcaacgtctactacaacaacgaggccagcggcggtcgctacgtgccccgcgccgtgctcatggacctcgagcccggcaccagtgactccgtccgctccggcccctatggccagatcttccgccccgacaacttcgtcttcggccagtccggcgccggcaacaactgggccaagggccactacaccgagggcgccgagctcatcgactccgtcctcgacgtcgtccgcaaggaggccgagaactgcgactgcctccaagggttccaggtttgccactcgctgggcggaggaactggctccgggatgggcaccctgctcatctccaagatcagggaggagtaccctgaccggatgatgctcacgttctcggtcttcccatcgcccaaggtgtacgacactgtcgtcgagccctacaatgctaccctttgtcaccagcttgtcgagaatgcggatgagtgcatggttcgtgacaatgaggctctctacgacatgtgcttccgcacgctcaagctcgcgacacctactttcggtgatctcaaccatcttatctctgcaacaatgagtggtgttacctgctgcctccgcttccctggccagttgaactctgacctccggaagcttgctgtcaacctgatccctttcccgcggctccacttcttcatggttggattcgctcctctgacttccaggggatcccagcagtaccgtgccctcactgtaccagagctgacccagcagatgtgggatgcaaagaacatgatgtgtgctgctgacccccgccatgggcgctacctcacagcctcagccatgttccgcggaaagatgagcaccaaggaagttgatgagcagatgctgaatgtccagaacaagaactcgtcatactttgtggagtggatccctaacaatgtcaagtcgagtgtgtgtgacattccacccattggcctgaagatggcatccacattcatcggcaactcgacctcaatccaggagatgtggaaggctttcttgcactggtacactggtgagggaatggacgagatggagttcaccgaggctgagagcaacatgaacgaccctggcctggtagctgaataccagcagtaccaggatgccaccgctgaggaagaggactatgaggaggaagaggaggacgaggaggttgctgcctaagccacctctctgcatgtttgagctatatagatatcccttgtgacatttgctactactagttaccatcgttgattgggggtgcttgttagatgctaggttaatgttattatttccaaatactatgttgccttgtcggactatttttatctgggttaatggtatgttcaacattattgtcttgaggtggatt

SEQ ID NO: 41157 - DNA, 620 bp, Oryza sativa
  Clone ID: PAT_MRT4530_44529C.1
gcacgagggtgactatttactaatccttaatttgaaagatcaagaaatgatttacattgtattgatgcaatgtgtaaaagctgaaataataatatatacatacacgtcaagtgcagagggcatgcatatgcctactagctagtagtttgcgtcattgattctcaaaattttcatacaaatataacccctccgtctcacatcgatcccttcaaagttcaaaatccttatattatgggatggatggagtagatagatactatgtggtaccagtgagcaatgatcagttgtgatgtagacatgcatctgcatgccacagctaattacaccctcgtgttgatgtagtcacgtagatgtcagcgttaaatggatgttttgatgttttctgaagttgtagtatagtactccgtagtaggtctaacgttgcattcttaattaacactgcatacatatcacttaagatattcctagcttagctaccgtccacatacttgaggttcctagctagatgacaatactacgtgcaagccattgcaggagctgaatatcttgtagtacttgcgcatagttgcatggtccagaaaaacagatatccagtacatctctcgttttctcccattaat

SEQ ID NO: 41158 - DNA, 570 bp, Oryza sativa
  Clone ID: PAT_MRT4530_4452C.1
atggggaatgaggaggatgacgacgacgaggatggcgacggaggagtggaggacgacggcgaggacgttggctgcggtggccatggcggagaggcggagcgcggggaggacgcggctgtggtgggcggtgctgaggaggtggcggagcgccggggtgcgccgcgagctttgtcaccgcccccgctgtgcccgctgtcccgacggctccacagagagagagagagagagagggaggggggaagctgcgccgagcggccgcctccttatcccccgcccctggtgctctgctacctcctcggcgccgcccgccgccgccgcgtcctccccgcgctccacctctccgccatgaccgccgcagccagcgtcctcgtcctcgtcctccactccgccatcgccatccttgtcgtcctcctcctcatcccccgccaccgtgcacgccatcctcgtcgtagtcctcctcatctcctctcgtcggcgccgcccgccgccgccgcgtcctccccggcgctccgccactgcccgcacgccgctaccgcgtcctcccccgcacgccaccgccaacccgtttga

SEQ ID NO: 41159 - DNA, 625 bp, Oryza sativa
  Clone ID: PAT_MRT4530_44530C.1
cgccagatgactgaaaactctagatggatgtccaatctcgacctcatgatcggaaaggagtacatcacattgagggataacagcaaaggtaaggttgtctctcgtgggtccattcgggtcaacgagagatttgttctcaaggatgttgcgctggtttgcaatttgcattttaacttgctttcagttttgcaaccccttgagaacggccacgaagtgtgttttaagaaggctctttctcgagttttggattatggggggatttgatttgccgaattttgcctttcaaccgggtctttcaagctgatttttctatctcttctagactttcttggtggttggtgaccgaaatggcataggaaattgggacaattgagctttgatttgcttgcaaggcttagctcaatgggtcttattcaaagattgcctaaattgaggttcgagaaggatttggtgtgtgccccccatttcgtcacgggaagttggttgctgcatcacatcacccggtcaccaaggcgatgaccatgcaccccggcgagctcttacacgtggacaaaattggtcgagctcggattagctctgttggaacgaagtggtacgttgcgaccgcacgcgatgatgccggtct

SEQ ID NO: 41160 - DNA, 1095 bp, Oryza sativa
  Clone ID: PAT_MRT4530_44531C.1
atgcctgggcgggaggcacagcccatgagccggcacggcccggcacgaagtgccgatcgggctgtgctggcccgatggctggtgggccgtgcctgggccgggccgtgtcgggcgggccttttggccatctatagcggggacgacgaggatgggcggcgactggaggaagcgcggctcgcggaggaggcagtgctggcgatggccgagatggagaagaccaagtgccgcatggccatggagcggccccaggcggcgcagcatggcatggcgcacggcagtgcggggaaggcagcggacggcgcgcatggcggtgcggccgacggtgggtggggccggtcggcgcggacaggtgggtgccggcggagaggcggggatgatggggatgggcggcagactcgtcaccgccggcggcgggatgttgcggtcgagaaggatgttggccggcttgaggtccaggtcgcagtgcacgagcggctccggcttggtctggtggaggaacagcagcgccgtggtgatctccgccgagatcctgaaccgctggctccacgggatcgatgggcgacggcgtgccggaatttttgttcttttttttttttgtctctgccctcttctgaattttctgatctgatttggcgccgcgttttggactttgggaatgtggttatgtgctgcatatgtagcagattggtttctcttgatcaaagctcgtgttttggaatgttgggtaaaggattttgtcgagagcgcgcgcctcttccagcactacacgtctacacccgccacgcccgctgctcctgcgtctgcgtctgctcctggttcctcctcgcgctcgcagccttcgcctccgccgtctgccttgtgttcaagcgcaggcaatcggactacacgctccagggcgcggaccttctcgtcggcctctcggcgttgcgccgccgctacgcctccaggtcggccagccgggtttgtctcctcctatgtactgcactgtcactcgtagtctactccattccgctcgtcggcgtgcatggtgatcgggagagcaggtctttggaacctctgccttcgacgtcccgcaccgggagaaggcagcaataa

SEQ ID NO: 41161 - DNA, 1930 bp, Oryza sativa
  Clone ID: PAT_MRT4530_44532C.1
taggtgtctgtgcgactcgacccgtgcagtgtctgtagctaacgcgttaagtatcccgcctggggagtacgttcgcaagaatgaaactcaaaggaattgacgggggggtttgaattgaagtgcgatttgaggagggacggtggcggcgtgaggaggcgagagccgcacatggccaccgcgtcgtcggcggtggcggtcgtggggtggctggtggtggtggtggcggtggtctgcccgccgccgccatgagggagatcctgcacatccaggggggccaatgcgggaaccagatcggggccaagttctgggaggtgatctgcgacgagcacgggatcgaccacaccggcaagtactccggcgactccgacctccagctcgagcggatcaacgtctactacaacgaggccagcggcggccgctacgtgccccgcgccgtgctcatggacctcgagcccggcaccatggactccgtccgctccggcccctatggccagatcttccgccccgacaacttcgtcttcggccagtccggcgccggcaacaactgggccaagggccactacaccgagggcgccgagctcatcgactccgtcctcgacgtcgtccgcaaggaggccgagaactgcgactgcctccaagggttccaggtttgccactcgctgggaggaggaactggctccgggatgggaaccctgctcatctccaagatcagggaggagtaccctgaccggatgatgctcacgttctcggtcttcccatcgcccaaggtgtccgacactgtcgtcgagccctacaatgctaccctctctgtgcaccagcttgttgagaatgcggatgagtgcatggttcttgacaatgaggctctctacgacatctgcttccgcacgctcaagctcgcgacacctactttcggtgatctcaaccatcttatctctgcaacaatgagtggtgttacctgctgcctccgcttccctggccagttgaactctgacctccggaagcttgctgtcaacctgatccctttcccgcggctccacttcttcatggttggattcgctcctctgacttccaggggatcccagcagtaccgtgccctcactgtaccagagctgacccagcagatgtgggatgcaaagaacatgatgtgtgctgctgacccccgccatgggcgctacctcacagcctcagccatgttccgcggaaagatgagcaccaaggaagttgatgagcagatgctgaatgtccagaacaagaactcgtcatactttgtggagtggatccctaacaatgtcaagtcgagtgtgtgtgacattccacccattggcctgaagatggcatccacattcatcggcaactcgacctcaatccaggagatgttccgccgtgtcagtgagcagttcaccgccatgttcaggaggaaggctttcttgcactggtacactggtgagggaatggacgagatggagttcaccgaggctgagagcaacatgaacgacctggtagctgaataccagcagtaccaggatgccaccgctgaggaagaggactatgaggaggaagaggaggacgaggaggttgctgcctaagccacctctctgcatgtttgagctatatagatatcccttgtgacatttgctactactagttaccatcgttgattgggggtgcttgttagatgctaggttaatgttattatttccaaatactatgttgccttgtcggactatttttatctgggttaatggtatgttcaacattattgtcttgaggtggattaactgttggaagtatgtagcaaagcttgaggtggaatgcatatgaaactgaactttcagctttgccaaaaaaaaaaaaaaacaaaaaaaaaaaaaaaaaaaaaaaaaaaaaaaaaaaaaaaaaaaaaaaaaaaaaaaaaaaaaggcctcgtgcc

SEQ ID NO: 41162 - DNA, 339 bp, Oryza sativa
  Clone ID: PAT_MRT4530_44533C.1
tttttttgcaggcaaaattgatctgatatacaatggagatggttgttttctatacaagggagcagatacaaaggggaggggattttttcctaaacaaggagataattacattgaacctccccggttgaaggttaacctcaacaacctaatatgctcaactcaggtgatcatcatgataactattccaacaccatctataatctgttacagccttacaggcaacttcagttcagaacaaactgcaggcagcaactcatagccatagcctcagcctataaggagtttctggggttaacaccagagagcagtgtaggcaaatgctctattaaagtctgtctg

SEQ ID NO: 41163 - DNA, 4693 bp, Oryza sativa
  Clone ID: PAT_MRT4530_44534C.1
ggccgcttttttttttttttttttttttttttctgaatgctttaaccgctattggcacaattaaataatcggtgtgtagccacatgaacacgggtgtatcagtattcagtacagcatacacgagttttcgattagaccattcaatatgatagtacccctttcattctttcatggcagatgaaaccacatacattgctttgtgggcacaaatagaatagggcccggggtaaaatgattgcagtaaaaaaaaagataaatcactcaaaattgggatgcttgaaagaaaaatcaagaacgagtagccaggtagaaatctcctgtactaagaaaaacatgttttcccagctggagatcaattggtgggaagccttcaatgaaatccaccgtaatcttgccattcccagcctggaattcattcttcaatctggaaatagaccttgacagtaaatatacttttaatgcatcaaaatgctcacggttgccagcggcatggacaaggagatcatctgtgaccactggagaaacccttgcaatgtaaatgacaaacgacatgtcttgtacattgtgagactcctcacagatcattactgcatctggtggcgccgccatctttggaattagtggattgccaagagcatcccttatatactgatcctgtgactgcacaatctctactagagtattcttgccatcgtccataggtttgtaatatacatcaactaagtctgtcggctcaagttgcgctgtctttcgtaacttctggattctgttcacaacctctcgagcaactccagcttcaaacaatgattgatcagctcgaagatccaaaacgactaacacatcaccatctcccgcagcatcaatttcattctctgccacatttgcaggacgtttaaattgccggatcaccttaatatcgtctaacttcaagcaatgaccaaagaatgaaatttctccactttgttcaaaggctaagatctgttcctgtgtcattttcttcacttcatttgacactttgcccatgtcctttcccagtctttttcctagcacactaaaattgggttctgcccggagagaagcatacaacatgggatcattacatggagtgacagtcttaacattcatttcttccatgacatactcttttagctttcccgttatgtcttcaagaaattcattgtcaggatgaacaatcaccatctccttcagtggtgttttcaaggctttgttatgccgttcacgaatattgcgggcaagatcaatgatggtcatcattctgtttacactttgctcaacacgctcatctctctccccagttgtggaagggaaactgcagaaatgaatactatcctctggtttagttgacacctttcgtaggttttgatagagagtttcagtaaagaagggtgtaaatggagccatcgccacacaagttgttacaagtgcatggtagagcgtcgaaagagatactctgcagtcttcttccccagtacgtccttttaaccgtttacggttgaaacgcacatatatattagtaagattgtcgatgtatttaaccaaatatggcacaactagactttcagttgcagagtttatccagtgatctagaacatttgatgacttcagaagtgaggcttgatctattggagaaaatgctgagaatccctcaatttcaagtctcttggcattttgtacaagaaatctatacgcattataccacggcaggaagacatctttcacaacaccaaaaacaccactccttttgaaccgtagagactccgctcgtacaactggagaatttatcaaatacagtctcaaagcatccgctccgtattcatcgatgacttctacaggtgaagggtaattctttttactcttgctcattttcttaccatcctcagctaatacaagaccattgcatatcagatttttaaatgcaggtttcccaaataaagctgttgataacaccatcaaagtatagaaccatccgcgtgtttgatccaatccctctgccacaaagttgccaggaaagttcttctcaaacaattcacggttctcaaatggataatgaatgtaggcatatggcatggaaccactctcaaaccagcagtcaaaaacatcctcaactcgtttgagcaccccatactccggacctctgctagagggaatcgtgataccatcaacatagtgtcggtgaagatcattaaccttgacaccagataaccgttcaagtttctcaatggaatccataacaacaatttcttcaccatcttggctgatccacagcggtagtggagtcccccagaatctacttctgctaacagcccaatccctagcaccttctagccaattatggaaccgcttttccttaacataatctggaacccaataggtctgcttgttacattccagcaactggtccctaatcttttcaaccttcacaaaccagcttgggacagcccggtaaataagaggagtgcccgagcgccagcaaaatggataagagtgttcaatgctccctttactgacaagtcttcctttatccttaacagagttgatgatatccctgtcagcctctttgacatatcgcccactgaactcagatatcttttcaatgaagcagccatcatcatcaacggcgacaacaagcccactggcctcaatgataccagcagcaagacaaacacggtggtcatcttcaccaaaagcaggagcacaatggacaacaccagttccactatcatcagttacgtagttatccgctatcaccctaaaggcagtctcttggagctccaagaaaaaatcgaacagaggtttgtattttaggcctactaaggatgatcctggaaactttgccaataattcatatgcttcagtatccaatccaccctgaacaacttcagcagtgcctcccttagaaggtgcttgcttctttccagatgatttagccttggctggcaattgcccaagcctagattcagcaacaacatacactgctccagttgacttgtccttaaccttgacatacacaagattggcattgacacacaaggctaagttgcttggaagtgtccagggagttgtagtccatgcaacaagtgctgcattgtccgcatcaccgataatagggaaagacaccatgattgctggatctgggacagtcctatagtcaagtgcggcctcaaagtttgatagtgcagtcttgcatcctgtactgtaaggcatcaccagaacaattccattctccacacatataaattccaaattcttgaaacccttgtagacgaggtctttctcccagagctgcgagaaaacccaccaaacggactccatgaaatttatgtccatggttttgtagtcgtctttgaagtcgatccacctccccgtgcgcgtgacgacggcctcccattcggcgacatacttggtgacgatgccgcggcaggtctcgttgtacttgccgataccgaggtcgaacacctgctgccggttggtgatgccgagctgcttgtcgatctcgaactcgacggggaggccatggcagtcccacccgaagcggcgggagacgtggcggccgcgcatcgactggtggcgggtgaccacgtccttgattgtgcccgcgaggatgtggccatagtgcgggaggccggtggcgaacgggggcccgtcgtagaagatgaactcctcgccgcccttcgtgcggcggagctgctcgtggaaggcgtcgagctccgaccacagcttgagcacgcgctcctcctccgcggggaaggagaagtccttcccctcgcagacgtcctccatggcctccgctcctgaggccgcgaccccggcggcgaatggggctagggtttcgggtgaggcggcgaccgcggcgaatggggctagggtttcgggtgatgaggcggcggcggcggcggcggcgggggggtaaggggaggaggggcttggaacaagagagggggaagggtttagagctggaagttcacgtgctgcgtgcgtgcttctccttctcttcgctagaagggaaattttcatttcgacacctctatttgtcgcatttgtacaaattgctctatttttatcgtgttcagtttttgctaactcaaacatgccgtggcattgacgagaaaatggatatttggccacgttcaaaaagcggcttagttggaatgccatcaagggcgtcgacgatggtgtgggacggggcgaggccgagcttggcggcgagtgcgtgcagctggcggccctcgaggagagccgagaggaaggccgctgcaggagcgcccggtgtacgaggtccacgcggcgggatcgcgcgagtgagcgttggaggcggacgaacgaggagtgcgaggtggcgtcccgatggtgggtccacgtggccggagcagaggaggcggcgagcgagagcatggcggcggcggcggcgacgacgcgcagcataggcatggcaaggtccaccgccacttgcaactcaccggagctcgacaagattggggccgcgggcggtggcagtgggcaactgaggaaggccgccgctgagagccaccacggccttgggcagccgcatccacagccggacggcggcgccctctaccaaccacttcttcgacgatgggcacgggcaacggcgcgacctccggtgcccaccgccgccaccttccccgacaatgacgagcttcgactgagttga

SEQ ID NO: 41164 - DNA, 255 bp, Oryza sativa
  Clone ID: PAT_MRT4530_44535C.1
atggcgtcgaggaggcacggccatggaggatgttgccgcaaccgtaccccgttccggctccactgcgcctcgctcccactctccctctcgctcaccgcgcccgccgccgagctcctcaccgtcgccacctcccccgcggcggtggccgccagctctggcgagcggtgggcgacgacgatggggagggctgcagtgccgcctgatttgggggaggagagtgaggctgtggttgtgctgtgcatgagtaggaactag

SEQ ID NO: 41165 - DNA, 210 bp, Oryza sativa
  Clone ID: PAT_MRT4530_44536C.1
aagatgtctaattttaacaacctcgcctagcggaagaagcagcacgagttcgacctccaaagggaaaaggaggcgaaggagaaactggccaagaagctgtatgccaagacatccatgatgaagatagatggcgatgtgaaaaggaagggtggcaaatttaatgttggtaagattattgtccatactcaattttttgctttatacacaagc

SEQ ID NO: 41166 - DNA, 642 bp, Oryza sativa
  Clone ID: PAT_MRT4530_44537C.1
atgacggatgacaaggtcagcgagatcgaatggagcccgtattgtcagccagtcaaaccccacactttgttcattgacagttcgacactcgaccttgttgcttgtgcaacttcggagtgttctacccgagattttcttcttcttctttttgcgatagttctacccgagattttcgtgaaaattaaacgaccctcacccacgggctatagtcgctttcaagttcgtaaggtgcgggtgcgggccgcattcccgtcgaatttgtgttttttgggtggagaacggatccatacaggccaagttccggatgaatataggggctgtttggtaaacgtcctgaggcttgtatgccgcgtggacagctcagccagtagtctaccgcatttttcaagtcgctttcacgccgtactctttgatcaaggatgttttccgattgggtgtggaataaaagggaaaaaaaacagatgcacagtccatggaagagtccatctggactcaagttcacttagcccaaataatcttgccgtcccgctaaagccacgtgcattaattcatcttgatatcaacacctacacgacatattactgggaaaaaaaagaaataatcggagaaaaagaaaaggacagtccatgtagaaatacaatt

SEQ ID NO: 41167 - DNA, 1629 bp, Oryza sativa
  Clone ID: PAT_MRT4530_44538C.1
atggcggacctcggcaaatcttcctccgatgcggcctccttgaagaatctctacacagacggggccatccctcccaagcaaaccatggcgagggaaaaaggaggtactaatccctctcctgctttaggccgtatggtagtggtagaggatttcatccgctgtggttttttgactcccccttcggaattacttttgctgactctcaacttctatggcatttcgcttttgcaccttaaccccaactccatcgccttcctgagcatctttgctcacctttgtgaggcctacattggggtagtgcccttcctggatcttttcctttttttctacaaactccattggatggaagccagcagagtctctgggtgttgcggatttcgtcttcgtgacgatatgaaagcgaagtatattcccttccagagccattcatctcggcgccaatggcagccgacaaggcggctgttatcaacggaggcgaagtgtcctcaacttccgcaggtcctgcctttgacggatgttatcgtgccccttgtcgatcaccagacttcctcctccctcaaggagaaggttgtggaggaagttgctgcagggtctgctgccgctggaggcagcgggcttaagaggaaaggttgggctcgtacgagcggcgcccccggatctcgtcagaagtccagcggctccgaggatgcgggcagactcccttctccttcaaagaggaggataataaagagagccgttggcaagtcttctgaatgtctttctgatgtcggcaggacggcctcgacgatatctgcacagagcggggatgaggtcgcgaccagcgcgactcccgccgctgcttctcctcgtgcgggcaccacgcccagcgtcgccgaatccgccccatcccccgtcgtgcccatggctgccctgccacctcctactccaacgggaccatcaacctggtctcaaatgatggccgagagccagcgccttctcgagacggcttctcgagaggtggtcgccgagatgggccgtgtggccgcccgtgcaacagcgtcggatgggcgggtggcccagctgatgtcggagctcgatgtcgcccgcgacgaccttcagaagataagggagatcgtggccggcaatgagatgcagcgccaagggttggagctgcagatgaacgatatccaagatcacatcatctccatccgcgagtcactccggaagagcttcaccaacctcaagagcatggtggctgagcgagatcatcgaatcctttactggaagacgaaatttgagggagtggagcttgagcggtccgttgtggttgtaaagaaggaccaggctatagaggcgctccgaggtcgtgaagtctggttgaactcgtacctcaatagctgctgcagtgctatgactgagctggaggacgtcgggcagcagattgacaactgcctaaaagaggagtgtcgtcgtgctagccgatacgctggaggtcacattctcgcctgcatcggagatcaccgctcacagatgaatctcgagttcctacgcaaagggtttcgccattcgtggctgtcagcgaacgagattgaccagctggcgtgttcctttgctcctttggctgagagggtcttctcgtccatgaactag

SEQ ID NO: 41168 - DNA, 141 bp, Oryza sativa
  Clone ID: PAT_MRT4530_44539C.1
atggcgataggtcgatggtgcggcgccgatccagagccagccctgcatagcagacaatcaagagacgatgatgaggacatcctccactattacccactggcaaagacgccaaagtcgggcggcgaccgtgtgagcttttga

SEQ ID NO: 41169 - DNA, 230 bp, Oryza sativa
  Clone ID: PAT_MRT4530_4453C.1
ctgttctcgacccggacaaaccctaccaatttataatttaaaagggataatggtttacatgcccggacaaactgcaactcacaaaactccctgaggaaactcaaacccaaacggctttaggattgtggtgtgacggctttgaagaagcttcgactaaggctatacaagtagcaaaatggtgtgcaccctactaaaagacgccacactccatagtagcggccctgatgaaa

SEQ ID NO: 41170 - DNA, 501 bp, Oryza sativa
  unsure (1)..(501): unsure at all n locations
  Clone ID: PAT_MRT4530_44540C.1
cttgnccttggggatggagacacatcatgcgcttcatcggtgcttgcgatgccgatggtctgcctgcaccgaacacaccacgggttccagaggaatctgcacaccgaccgatgccaagtacattcctgttggcggtcgacccgattgggaccatctatagttggagcgatggatttgaatgtaccaggtatacacagcctcaatggtgctgtagcttgggatggttggcccagcggatgccagtgaaatttgttgttgcttccggaaggcacactgtgttatgtccaccccctataggcttagctgtaacactggagtggtatagttgcgataaaacttgcccttggaaaccctggtgccataccccacggttgttggtgatttcttgcgaaaccacggtgcctacnatactgtgtataaacnccccacacntgttagaaccaacttcaatgattcaattcactcttccccttggtgttccaaaaaaaaaaaaaaaaaaaa

SEQ ID NO: 41171 - DNA, 463 bp, Oryza sativa
  Clone ID: PAT_MRT4530_44541C.1
atgctgcttgctcttatttgggagtttgatttcacgccatttatggttctgatcgttacaatttctgaatgatggtatatgatatccttgttccctccatacctactatatctcataatacttcagtactaagtagttcattttcttgattttcactccaaccattttccaccacaaacaggtaccataatgactatatctaagcatcgagtaaagccttctccaatacctgacagctggaagttggctgaaaattttacaactgcagttgtccttggtggatagttggcaaagatgcatgttatattcttcagagctgcatacaagtccaactatttcaccaggctgtcattgctttggtagctcttcctcatcaaaccaccttgggggatcatatccatgaccaccaagaggattacagcggcatatacgccaagctgtcaagattgtaccctttgcaaca

SEQ ID NO: 41172 - DNA, 511 bp, Oryza sativa
  Clone ID: PAT_MRT4530_44542C.1
tgtcactgacacgtgggcccatgtgaatctgggcccacatgttaatgacacaaggtaaagtgcacatgactgcagaggatctcattacacgagtccatatagaaatacatttacaaatagttgatattcggaattaaaaaaataaggaatattagaagagaagactggagttcatatagaaatacattaagaaatagctaaaattcagaattaaaaataagaaatattagaagaggagactagagtccatatagaaataccatttagaaatagttgaaattcggaattaaaaaaataagaaatattagaagaggagactagagtccatatagaaatataattcggaactgaaattcggaattaaaaataaggaatattagaagtagattatagagtccatatagaaatgcattaggaaataatagaaatttaaaattaaaaataagaaatattagaagttgagtatagagtccatatataaatacattaagaaaaaaaaaaaaaaaaaaaa

SEQ ID NO: 41173 - DNA, 606 bp, Oryza sativa
  Clone ID: PAT_MRT4530_44543C.1
atgggtgcaccgtgcacctggacgattggttggcgcgaattcgtccgtcgcgcgtgcgatgcgagagaagaaggctccgatcggggcattgctggtggcgcgccgcatcgatcgatggggccaaaattacgaggacgattggcgggcgggtcgccgtcgctcgggtcaccggagtccacaactctcgcagagtggcaagggtggggtgggggtgggggtggtggtgccctggtgggccgagtggcccacgacgacgttatcgccggtgggtgtatcttctccatctacacagacacaggaaaggcagggcagacgagcgaggtggcggcagacatgggcggcggcgggctagctcctgctccggcgtcggcgaggagggccgtcgccccgtggcatctgcctcctccggctccggaagttggcgtcgatgcggtcgtcggtggcgccgtcctcgtcgttgtcgccgtctccccacgagcagttgcggcgggagccgccgcggcggcggatgcgctgcggcgtgcggcggtagacgcaggcggcagggcgaggaggagcggcggcgacgacgaagtgaggaggaggaggaggagcgacaccgggggt

SEQ ID NO: 41174 - DNA, 189 bp, Oryza sativa
  Clone ID: PAT_MRT4530_44544C.1
atgggtaaagggggccggacgaaggaacacgaagccccgtttttcgcccggagacttctaacacgcagctccactgatctgctgtttgaacatccccaacttaattatgagttggctgcaggaccaacagaaattattgaagccatcaaaataggccaccactatgacgttgtcatgaacatgaagtaa

SEQ ID NO: 41175 - DNA, 223 bp, Oryza sativa
  Clone ID: PAT_MRT4530_44545C.1
gcgccttcccttcccttcttggcttcttggcctccttctcctgctcgcccacacacttcacctccgcgcttcccgcctctccgcattctgaccctccgccgcctccgccgcggtcgggtggtgtccgtgagagaggagccggaataatgctgtgcgtctcgccgacgacgccgggcccgtgcgcggcacggcgccctcaccgtccctcgtgcaccgccacgac

SEQ ID NO: 41176 - DNA, 257 bp, Oryza sativa
  Clone ID: PAT_MRT4530_44546C.1
atgccgcacgccgtcgccggcggcggatccatcgctcccgccaccccctgccatcgccggcgtcggatccgtcggtggcggcaccggatccgtcacccccaccgctcggcgtcgtcgtcggcggcgcatccgtcgcccccgtcgcccagcgtcgtcaccggcggcggatccatcgcccccgccacccattgtcgtcaccggtgccggatccgtcggcggcggcatcagatccgtcgcccccgccgcggccgtgagcg

SEQ ID NO: 41177 - DNA, 204 bp, Oryza sativa
  Clone ID: PAT_MRT4530_44547C.1
atggtggtttggtcgacgactagtggtgagggcagtgctgctggtggtggtggtgctacgtacacgcggttggtgagctacatgctcaggacgggggcaatagaaagtgtcatctgggggctcgagtcccctagcacccacgctggatccacccttggtgagaggatgaaaccatcatcaaaaccatttgggaaggcaaattga

SEQ ID NO: 41178 - DNA, 537 bp, Oryza sativa
  Clone ID: PAT_MRT4530_44548C.1
atgtctgaagaagaagtcaatggcaagatcatggtcacagtggagaatttaacagaggaacagaggcaacagacggagcagtttgtagctgattttcaaatgcgttgtcttcaatgtttcatcatgacaccagaagggccaactcagaagactcgattccccaagccgatagttgacaaatacttcaagatacagttgatgaagcagttcatcgcgcattgtttgagttttggcgaatacattacaaaatttgatcaagaggatggaccgatcttgagaagcaatttcatgattacttctttgctagagtcacaagaaggagaatcggctatggaatatattcagagatttcataatgtccgcagccgatgttatggtttgagcctaagtgatgagcaactagccgatctcgcattccaaggattgtcagcacctatcagagagagattcttttgccacgagtttgacagcctggttcatctaatggaaacagtatcggctcatgaaagccgattgcaagaagcaaaggaagattag

SEQ ID NO: 41179 - DNA, 2165 bp, Oryza sativa
  Clone ID: PAT_MRT4530_44549C.1
ttggttttggagcgcgcgggggaacggaaatggccgacgtgcggtcgccgccgccgccgccgagcaggcagcggcgaagcgtcgggccggcgctggacgcgctgggctcgctccccctcgacgtcctcgacaacatcctctcccgcctccacatccacgacgtggtccgcacctccgcgctgtcccgagcgtggcgccgccgctgggagtcgctccccaccgtcgacctcacgaggagccccggcatcggcgcctccgacgtggacgccctgctcctccgccgcaccgcgcccgcccgctccttccgcctcgccacgcgcgaccgctcctggtcccccaccgccttccacgactggctcctccgcctctcccgcggcggtggcggcggcggcctccgcgacctggagctgaccctccggtacacgtacatcaacagcaagctcaactcctgcctcttctcctttcgcgagctcacctcgctgagactccactgctgcggcctcccgcacgtgcccactgagttcgccgggttcccgaatctgaagacgatgtacctctcggtggtcaaagttcagaggcacgggggaagggggttggccaccctgattgctgcatcgccggtgctccaggaggtgactctcatcgacgtagtgctcattggagatggacccgacgaagattgggtgattcgggcttccaatctgcggaaattgacgatagctcttggctctgaatatggtggccggatggaagaccttccacggctggaggaatgttgtctctttggcctgaattatgccaaatacttgacggggatggcgcgagtcaccaagctcactttctactgcaattgcatgttgtcaactgaagttgacgtgctggagcgattgccgttcctgtttgagaaccttagaagcttaatccttggagtgaatttttgtatgatgtctcacatcttggctattttctgcctacttagaagtgcgcctgttcttgaagaactcgatgtttggaattggagtgagggtgcccaggaaatggaagcaaatgatgtgttcttgaatgctcagtggatcaatcatatgtttgccaaacttcatgttgtgcgcatgaagaaggtttattgcctcaataatgagatgcactttatagagttcattctgtccaaggcaagagtactgcgagtgctttccctcactcttgcgtctgattccctgagcagtattgaggaagcaattattgatataacagaatatccaagagcatcacctgatgcgcaggtcatctccagaggtgtagagccactttttttcctcagtgatatgaatggtttcctggatttatccgctgagtttcctgacgtggaggaggaagagacatcaggcttaggatcgctggatactgtacaccctcggagaaggcagcgatccaacggggagtctgtagctcagctgcagctgcttcaggagcagctgcaagagctggaaaaggagaaggatcagcaccacaagcctacggtggaagaattgaaagagattatccaggagggtaaaaaaaacgcaattaaatttcaaaattacttcgaatctaccatccagtctctgtctaagcaacacgaccttagccaatttaggcttcccccattgccagagttcccatcggagctgtcatctcatccggtcaccaccagaccaggagacactcctgtcgatcctgctgacaatgttgctgctaatgtacctgaggattctcgagaaggccatgctacttctggtgatgctgatgttcatgtccgttctccaatagacttcgttgccaaatgtgttgggaatggttgtgcagaatctccagaagaccaaatctgacgagagtttcatgattctagccatttctgtacttccttttgatgtgaaatttttagttcttgacacccctcgatggtggaacttaacagctaggttatgatctgttgataaacattgcatagccaatttagtcgggtaagggaaggcagcgacagtttttggatgaacaaatacacaaattcacgatggtactctagttatagattgacagcctttggatgaacaaagactgcttttggaattgacatttgggttcacactgcagttttcgctttcggcacatataagaacccactgtcc

SEQ ID NO: 41180 - DNA, 413 bp, Oryza sativa
  Clone ID: PAT_MRT4530_4454C.1
cccacgcgtccgcccacgcgtccgggactgtgtgccataaatcataattgcgtggaaaaccttacatgaatatctttcactgtcgatgacatgtgactggacggttacattactccatatttggtctcgatggttttctataattgataaatgttttattttcatttatatagtacatttatcttagatacagaggagggcttgttttattagacaatagctgtgggattttgaaggtgaagacgtaaagacaagactgagccaataattaattttcaccgacatgcatgtctcactcggcagttgcaacatacaatgctgttcttgtattagctgagatgttaaccacaaaccaaaccaacatttcaaagtttaacaattttaagatccaatgcagcaatacataacccaaa

SEQ ID NO: 41181 - DNA, 2556 bp, Oryza sativa
  Clone ID: PAT_MRT4530_44550C.1
aacaacacaataatacatgatcattcatcattcatcagtcatcactcattagttatcaccacattgcagtagcaacacatgttgtcctaggcatacacaaaaccatagttcggagtaggtcttttgtgccaaatatccaaaagcattgccatggttttacaagtttatcatgacacataacaggggttacaaacatccaaaatcattgcaagaacagtgcatgtccatacattcatgtcttcaaacaagagcaagtccctcaatccgatcttggatatcttgaaggcaactccaaaagcttgctgcttcttcattatcagctcgatacttgtttcgcagccaatcttgtgagcacattaaggcctccaagagttctggagtaagccggctacgatgctcactaagaacccttccacttgtgctaaatgcagattcagatgcaacagtgctaacaggaatagcaaatatatctcgtgctaccttcctcaatgtaggaaagcttgtcccagccactttccaccaatcaagaatcttaaagttttctgtattaattgaaaccaactcatcctctaggtacctgtctagctctgatttaacgcgtattgctgctggtctcctactagtaacacgtgctgtgattgaagacaataaatcagaattgacaagtggaggagctgaagattccgtgttatcctcatcatcttccacttcatactccttcatcaaatcatatagagtgtctttcacctctccatctttcgttgcagactcttcacttgactgaccagtgatggtttcaatgaacccaaggcgggttcgtggagacgagcgacctggtgtcgaaggtgctccccgtggtgaagaagtctcccaagtacggagggatcatgctgtggtcgcggtactatgacgggctcacggggtacagcgacaaggtgaagtccagcgtttgagctagccagggtaagctcgtgtcaggtcggcgttcgcgtagaatcacacgtgccgcgcgttccctgcaagatggagtagtttctacacatttcagaacaaagcaaacatgtacaataagatggccggcttgtatactcatttagaagcagaaaaaattgtgagaaatacacgtgttgcacggtcaaaagcacgtgcacaaggtaaagcaatactgagcatcctataggtagaattccacctagttttgcaatcaaggcctaacttgttttccatcttaactttcacatgctttgcaatttcctcaaacttttctactcttttaggtgtggctgtccaaaaggcaacactttcacgaacctttgcaattgaatcttttatcacatctaaaccatccctcacaatcaagttaagaatatgggcagcacaacgcatatgcaaaagtttcccctctagcataagcttacgcttgccgatctttttgatgagttcagaaatcaccttatcatttgtggtgcagttatcaagagtcaaagttgatatcttctcatcaagattccattcaaccaacgcttcataaagatgttcacaaataacttcagctgtgtgtggagcgggcacatatatgaatctcatgataatgcttctaagtgtccatgaatcatcgatgaaatgggctgtgatagccatgtagcctcttttttgattatcagaggtccacaagtcagtagtaatacccactctagacttagctccagccatatatgctaatgcccttttcttttcttcctcatatgtatccataatgtccttcctaatagtgttccgagtcaccatcttgaataatggctgaagtgcactaacaaatcttcgaaagccaatatggtcaacaatagataaaggatactcatgtaatattatcatggcagcaagctctctcctagccactgctggatcaaatgtgtatgtgtccacagaaactttccctccctctacggaattgaacctcaatgaagattgtgcaagtgtctttggccccatcttgatctttctcaatgtgcaaattttcaaatggtcatgtagatgtgaagtcccattgctgctcttccctccaagccgcttgtggcaatgaaggcattcagccttgacatcaccacagactttgactttcttgaaatccttccaaacaacagaagtaagcttcctctttgtgccaaaattctcagaatcatcttctggctcatcatcccatggatttgaataagcgcaggccgttggcggaagatgaagcttctggagttcttgggcagaaggagctcctgccttagtcgaagcagaaggtgctcctgcaatcgcaagacggctttttgacctagtggtggtcctttttataggtggttgcggcggccgacagcaggcctttgcaccggagttggaggaaccagatctgcccacatgaacaatggcagatccagcaacaggcacgacagcgggtgtggctgcagctgcagctgcagcgcttatagcatgcgatggctggtccaactccgcattggcgtcccttgcatcatcgtcagagcttagcggtggtgaaggcgaagccat

SEQ ID NO: 41182 - DNA, 1935 bp, Oryza sativa
  Clone ID: PAT_MRT4530_44551C.1
atggggaatcaaatggagagaaagtattctccgtcgggtctggcgggggcgggtttggttccccgtcccccgtccccgccctccgtggaggcccgatataaaatccacgccgccgtccgtcggccacagcgactgagcggcgccggctcccgatctcgcgtccgcgcccgcgcgtgcaggcgtccgtgcgctcagggccgccgcgcccgccgtgccggcatccgcgcccgcgcccgcgccgggccaccgcgcccgccggcccttatcccctccgtccccattccccagtccacgccgccgcgtccgtgcgctcagggccgccgcgcccgccgtgccggcgtccgcacccgcgcccgcgccgggccgctgcgcccgccggcccttatcccctccgtccccattccccagtccacgccgccggccgccgcgcccgccgtgccggcgtccgcgccagtgccgggccgccgcgcccgccgtgccggcgtccgccccagcgccgtcccgttcccttcactcccagcctcccaggtccgaggacgccgtggactcggcaccggccaccggacgtcggcctcctcgtccaccctccgtcaatatctgatccgtcatgtaggcttatttgttttgctcatggtggatgcaggtgaaggcttcggtggcaagaaaggggaaaacgacgagtccacacgacgaccagccgctcgagtccgccatggcttcgccttcaccaccgctaagctccgacgacgatgcaaggagcaccttctgcttcgactaaggcaggagctccttctgctccaagaactccagaagcttcatcttccgccaacggcctgcgcttattcaaatccatgggagtctgttaatgattctgagccaatacaagttgaagatgatgagccagaagatgattctgagaattttggcacaaagaggaagcttacttctgttgtttggaaggatttcaagaaagtcaaagtctgtggtgatgtcaaggctgaatgccttcattgccacaagcggcttggagggaagagcagcaatgggacttcacatctacatgaccatttgaaaatttgcacattgagaaagatcaagatggggccaaagacacttgcacaatcttcattgaggatgctcagtattgctttaccttgtgcacgtgcttttgaccgtgcaatacgggttgagaagctatttgattgtgctcctagtgaagaagaatgggcttttgctaaggaaatgtcagttgaaatgattcaaaagtttgataagtactggaaagatattcaagggccaatggggttggccaccattcttgatcctaggtttaagattgactacctccttgggttcattgaaaccatcactggtcagtcaagtgaagagtgtgcaacgaaagttgctgaggtgaaagacactctatatgatttgatgaaggagtatgaagtggaagatgatgaggataacacggaatcttcagctcctccacttctgataatgaagaagcagcaagcttttggagttgccttcaagatatccaagatcggattgagcggggatggaggctccacggggataaattacccgcacggaggcggtgatggggaaagatgttgccccgttgcatttcacggtgatggtgatggggaaaattccccaccgcggaggcggcggtggggcgaggatgccaggccggggcgaagcggcggcggcgcggcgtgcggcaaggcggcggtggcctggcggccggcgcaagggcggcgaggcggtgggagaggcggccgacggcgaagcggggtctgcggcgggcgagcgcgggaagaagctaggtggcggcgccggcgcgggaagaagctgtcttcggcgtccacccagcagagcttgccggcgtccatggacgacaacggcggcagcgtccttgctctcccttag

SEQ ID NO: 41183 - DNA, 873 bp, Oryza sativa
  Clone ID: PAT_MRT4530_44552C.1
ccggggatcaaccgcaaaaagaataatgtgagcgaattagaacaaagaattcgtgttctcaaacaagaaatatcagatcttgaggatagtgctcgagtagcattacagactttagaagagcccatcaaggatttaattccggttcaaaggcaaggtattaacgaagatgatttccttaaccagtttagtaattccctaaaagtaaagggcttagactttcatgaacgtatcgttaaagcctttcatacttctctaaaagtacaagatatttcggcattagtaattttagccggaattagcggtacaggaaaaagtgaattaccccaaaaatatgcggatttcattggtgctccactcgtcatgttgccggtacaaccccgttgggattctccccaagatttacagggtttttataattatattgaaaaaaagtataagccaactcaattaatgcattatctctatcaatatcagcaggatagaaaaatgcatggcagaatcatcatggtgctacttgatgagatgaatctagctcgggttgagtattattttagtgatttcctttctaaactcgaaacacgacgtagtaagccaacctatttatcattggacgtaggtagtttaaaacttcctgagaagcaacgagatattctgattcccgaagaattcctgtttattggcaccatgaatgaagatgaaaccactcaatccttatccgataaagtgttagaccgagccaatgtcttaacttttggtcgtccaaatgaattgaaattacggggaagaaaaatcaagtatgaaaaaacagaaaattatttaccttggaatgaatttgtaaagtggactaaagaacctgatcctctagagtcgacc

SEQ ID NO: 41184 - DNA, 2433 bp, Oryza sativa
  Clone ID: PAT_MRT4530_44553C.1
atggcttcgccttcaccaccgctaagctctgacgatgatgcaagggacgccaatgcggagttggaccagccatcgcatgctataagcgctgcagctgcagctgcagccacacccgctgtcgtgcctgttgctggatctgccattgttcatgtgggcagatctggttcctccaactccggtgcaaaggcctgctgtcggccgccgcaaccacctataaaaaggaccaccactaggtcaaaaagccgtcttgcgattgcaggagcaccttctgcttcgactaaggcaggagctccttctgctccaagaactccagaagcttcatcttccgccaacggcctgcgcttattcaaatccatgggatttaccacgaattcaactgctggtactggttgtgggagtagcagccagcaagaatcgcagtcacttccaccacaagcagagtctgttaatgattctgagccaatacaagttgaagatgatgagccagaagatgattctgagaattttggcacaaagaggaagcttacttctgttgtttggaaggatttcaagaaagtcaaagtctgtggtgatgtcaaggctgaatgccttcattgccacaagcggcttggagggaagagcagcaatgggacttcacatctacatgaccatttgaaaatttgcacattgagaaagatcaagatggggccaaagacacttgcacaatcttcattgaggttcaattccgtagagggagggaaagtttctgtggacacatacacatttgatccagcagtggctaggagagagcttgctgccatgataatattacatgagtatcctttatctattgttgaccatattggctttcgaagatttgttagtgcacttcagccattattcaagatggtgactcggaacactattaggaaggacattatggatacatatgaggaagaaaagaaaagggcattagcatatatggctggagctaagtctagagtgggtattactactgacttgtggacctctgataatcaaaaaagaggctacatggctatcacagcccatttcatcgatgattcatggacacttagaagcattatcatgagattcatatatgtgcccgctccacacacagctgaagttatttgtgaacatctttatgaagcgttggttgaatggaatcttgatgagaagatatcaactttgactcttgataactgcaccacaaatgataaggtgatttctgaactcatcaaaaagatcggcaagcgtaagcttatgctagaggggaaacttttgcatatgcgttgtgctgcccatattcttaacttgattgtgagggatggtttagatgtgataaaagattcaattgcaaaggttcgtgaaagtgttgccttttggacagccacacctaaaagagtagaaaagtttgaggaaattgcaaagcatgtgaaagttaagatggaaaacaagttaggccttgattgcaaaactaggtggaattctacctataggatgctcagtattgctttaccttgtgcacgtgcttttgaccgtgcaacacgggttgagaagctatttgattgtgctcctagtgaagaagaatgggcttttgctagtgaggtagttgataggctcaagttgtttaatgacatcactgcagtattttctggcacaaattatgtgacttccaatattcaactacttaaaatctgtgaggctaaagagcaaattaggaagtgggctgtttgtggtgattctactatagaggaaatgtcagttgaaatgattcaaaagtttgataagtactggaaagatattaaagggccaatggggttggccaccattcttgatcctaggtttaagattgactacctccttgggttcattgaaaccatcactggtcagtcaagtgaagagtgtgcaacgaaagttgctgaggtgaaagacactctatatgatttgatgaaggagtatgaagtggaagatgatgaggataacacggaatcttcagctcctccacttgtcaattctgatttattgtcttcaatcacagcacgtgttactagtaggagaccagcagcaatacgcgttaaatcagagctagacaggtacttagaggatgagttggtttcaattaatacagaaaactttaagattcttgattggtggaaagtggctgggacaagctttcctacattgaggaaggtagcacgagatatatttgctattcctgttagcactgttgcatctgaatctgcatttagcacaagtggaagggttcttagtgagcatcgtagccggcttactccagaactcttggaggccttaatgtgctcacaagattggctgcgaaacaagtatcgagctgataatgaagaagcagcaagcttttggagttgccttcaagatatccaagatcggattgagggacttgctcttgtttga

SEQ ID NO: 41185 - DNA, 128 bp, Oryza sativa
  Clone ID: PAT_MRT4530_44554C.1
atcgtacacgcgtacgatccgggctaatccggggcaaatctgaaatgcacaagcaggatttcctatgcccctcaattattatataccgagtggcagggtgctagacgtactgtttctaaaggaggttc

SEQ ID NO: 41186 - DNA, 1349 bp, Oryza sativa
  Clone ID: PAT_MRT4530_44555C.1
caactgtcctggtgaatgccgctcctggtgctcgccgccgcctacgcgctctgccgcatcctcctcttcctcatcccgcccaccgtcccctccatcgatgtcgacgcccaccacctctccctccgtctccgtgctcgccaactccatccctccctcctcctcctcctctgcttctcttctctcccaggactcccactggtaaagcttcctcttcttctccatctggctcctcctcctcctccccttcttcttcttgttgttgttgttcttcttcttattcttcttcttgttcttgttgttcttcttcttgctgttgtgaatcgtcgtcaaaaccactcctcctcgtcttcaagtttgccgagggcaatgacaacgagccacccacgctcatggacccgtgtgccatctcctcgtccccgctctcgcccgactgcaccattgtcttctccaccttcatggacacctatctcgcctacacccggcccggcgaggacgactggtggcagctcgacaccgatgacgacgacgacgacgaactcctactcatgggcgacatcgtcagttgccaaggtaaaatgtacgtgcccaccgatatgagctccatcgccatgctcgacgtctcctcctaccctccccacatcgagcggagaggcattccagagcccagctgcatccactccatggccaacgcaatgttggtagaatcacaaggcgaggtgttcctgctgcgccactacggctacggcgcccgcgactcggagctcctcgacattgacctgcatcgcctcgtccacgccaccgacgacggcggcgactacgtgtggcgcaaggtggacaccatcggcgacagggccatctttgtcgctgacaactgcgtcgtcatgtccgacgccaccaaggcagggatacgccccgactgcgtctacctcctccacaccggaatccgacggggcgaaaccgcagcgtctacgtcacgctgtggcgcgcgggagacgagcagtggacgatgcagcgaatcgacgatcacaccccgttccggacggcgtactgcaacccggtgttctacgacggcgagttctactgcttggggacccgtggtggcctcgccgtcttcaaccccaacaagttcctcaacctcaactcgctcccttgctgctgctgctgctccgagtccgagccacgcgcgcgcggcgacctagggttggcgccccagtctccggccatggcgttgtggtggccgctcctggtgctcgccgccgcctacgcgctctgccgcatcctcctctttctcatcccgcccaccgtcccctccatcgatgtatcttgttaatgatgctgttgacaaaggt

SEQ ID NO: 41187 - DNA, 1326 bp, Oryza sativa
  Clone ID: PAT_MRT4530_44556C.1
atggcttcgccttcaccactgctaagctccgacgacgatgcaagatctggttcctccaactccggtgcaaaggcctgcagtcggccgccgcaaccacctataaaaaggaccaccactaggcaaaaagccatcttgcaggagcaccttctgcttcgactaaggcaggagctccttctgctccaagaactccagaagcttcatcttccaccaacggcatttaccacgaattcaactgctggtactggttgtgggagtagcagccagcaagaatcacaatcacttccaccacaagcagagtctgttaatgattctgagccaatacaagttgaagatgatgagccagaagatgattctgagaattttggcacaaagaggaagcttacttctgttgtttggaaggatttcaagaaagtcaaagtctgtggtgatgtcaagactgaatgccttcattgccacaagcggcttggagggaagagcagcaatgggacttcacatctacatgaccatttgaaaatttgcacattgagaaagatcaagatggggccaaagacacttgcacaatcttcattgagtgaagaagaatgggcttttgctagtgaggctaaagagcaaattaggaagtgggctgtttgtggtgattctactatagaggaaatgtcagttgaaatgattcaaaagtttgataagtactggaaagatattcaagggccaatggggttggccaccattcttgatcctaggtttaagattgactatctccttgggttcattgaaaccatcactggtcagtcaagtgaagagtgtgcaacgaaagttgctgaggtgaaagacactctatatgatttgatggagtatgaagtggaagatgatgaggataacacggaatcttcagctcctccacttgtcaattctgatttattgtcttcaatcacagcacgtgttactagtaggacaccagcagcaatacgcgttaaatcagagctagacaggtacctagaggatgagttggtttcaattaatacagaaaactttaagattcttgattggtggaaagtggttgggacaagctttcctacattgaggaaggtagcacgagatatatttgctattcctgttagcactgttgcatctgaatctgcatttagcacaagtggaagggttcttagtgagcatcgtagccggcttacttcagaactcttggaggccttaatgtgctcacaagattggctgcaaaacaagtatcgagctgataatgaagaagcagcaagcttttggagttgccttcaagatatccaagatcagattgagggacttgctcttgtttga

SEQ ID NO: 41188 - DNA, 340 bp, Oryza sativa
  Clone ID: PAT_MRT4530_44557C.1
gcagagttggggaggaatcgaccgatcaatcaatacgatgttgccgccgacgaggaggaggtcgcgggttctatggtcccgtcggagcccgcgtgtcgaggaagaagacagatctagccaccgtgtcgatgaagaaaatggatccaggctccgtaatagagaaaatggtggatctatctttgttgcattttattgtattcgagtgtttcattctcttgtgttcgaatgttgcacatgacacaccatgtttcttcgatgttgcagtccattttgtatctttgttgcattttattgtattctaatgtttcatttctattgtgtttgaattgttgcacatgac

SEQ ID NO: 41189 - DNA, 1878 bp, Oryza sativa
  Clone ID: PAT_MRT4530_44558C.1
atggaatcgtcgtcaaaaccactcctcctcgtcttcaagtttgccgagggcaatgacaacgagccacccacgctcatggaccctttttctcaacacaacagcaataccaacaacccatcggcatggcggcaccaaatgctggagctcaagggtaaacaatgcttggcttgcttgcaaggccaatggctattgatgttggacgccgcctcctccaaccactgcttcttcgtctctcctcttgacgacatgaccattatttctctgcccccactggacacgccattggagcctcttcgcaggtgtgccatctcctcgtccccgctctcgcccgactgcaccattgtcttctccaccttcatggacacctatctcgcctacacccggcccggcgaggacgactggtggcagctcgacaccgatgacgacgacgacgacgaactcctactcatgggcgacatcgtcagttgccaaggtaaaatgtacgtgcccaccgatatgagctccatcgccatgctcgacgtctcctcctaccctccccacatcgagcggagaggcattccagagcccagctgcatccactccatggccaacgcaatgttggtagaatcacaaggcgaggtgttcctgctgcgccactacggctacggcgcccgcgactcggagctcctcgacattgacctgcatcgcctcgtccacgccaccgacgacggcggcgactacgtgtggcgcaaggtggacaccatcggcgacagggccatctttgtcgctgacaactgcgtcgtcatgtccgacgccaccaaggcagggatacgccccgactgcgtctacctcctccaccaacgatgccgccatggtgttcgcctctacactatccgcctggatgatcggactaccaccttcaccctgctgcccgatctcacctccaacgattcaatctactggctccttcctgcaccaattagctccatcgtcgacgacacaactcaacattattcaggcgccattgtacattcaagcagcaaaatcgatcaggaaaatggcgatggtatctctgtcgtcgacatcgcctccgaacaagcatcaccatgctggtgtggtcttcctactgacatggtagaggagatcgtgtcaaagatatcactcatcgactacttccgtctgcgacaagtctgcaagggatggagctccatcgtgaagcccatccattacgcgcagagatactcgacgtacccgatgctcatgagcatctgctccacttctaccggcgtctacaagctgttcgacccaatcgtcgagcaggagtacaaccatgaagaacaaccgtgcaggcctggttcagtcccaggatcacttccagatgctgctcttctcctcgagacacgacggatgggtgcttgcgacgagaggcgacaagtacatttcccggaggcgacgttccccgtcgacaaccagttcgacggcatatgcttgtctgcggcgccgacgtctcctgactgcatcgcgttctccgtcgagaaagaccggaatccgacggggcgaaaccgcagcgtctacgtcacgctgtggcgcgcgggagacgagcagtggacgatgcagcgaatcgacgatcacaccccgttccggacggcgtactgcaacccggtgttctacgacggcgagttctactgcttggggacccgtggtggcctcgccgtcttcaaccccaacaacacgacatggagagttcttgacaagccggaggcgcctgtacttgtggatggcaataattttggtgatgatccgattccaggtgacatgtactgccatctgctggagttcatgggttttcaggccgcacagcgatggggcgatcagcgtgttcaggctcaacaggtgtga

SEQ ID NO: 41190 - DNA, 139 bp, Oryza sativa
  Clone ID: PAT_MRT4530_44559C.1
aggcttgtttgcatggttgaacagttacagtacttgataactaagtactcctaccatcccaacatatagcaacttctagcgttcaaaatttgtcccaaaatatatcatctttttcacctacttcctcatctaaaccaat

SEQ ID NO: 41191 - DNA, 799 bp, Oryza sativa
  Clone ID: PAT_MRT4530_4455C.1
cccgggctgaggaattcggcacgagggccggcgcgcaccaccggacgaacaccatgccgccgccgtcgtcgctgccgtccaccgccgccgccgccaccgcttccgctgcgtttctccggccgtcagcgagcgcgcatccagcaagcgcctccgccccgcccaacgccgccgcgtgcctcaggcgctcgccgcggcgccgcctggtcgcggcgcgtgccgcggccgacggcggcggcgccgagacggtgttcttcgacggcggcgcgcactacggcgacctggcggcgaacctggccctcgggctgacgctgctgtggctaccgctgacgctggcggcggtgtcccgcgccttcatcctccggtaccgcttcacctcccgccgcgtgagcgtcatctccgggctctccggcgccgaccgcaccgacttcccctactcgtcggtgacgtccgtggtggtggtgccacggttcatcggcgagtggggcgacatcgtcatcaccctcaaggacggcaccaaggtcgacctcaggagcgtgcccaggttccgcgaggtcgccgactactgccgctccatggccgccgccgagggctccctcgccgccagcacgtgaggtcagctgggaggcgattgctctgctcaagtgtacacttccttcttcttcttcttcttcttcttcttcttcttcttcttcttcttcttctttttaatcgtgatgagtctaattattgaagaactgtgaaaaaagtcgaatatattttgatttttttcccaatcttgacgaatctgatgtctagcctt

SEQ ID NO: 41192 - DNA, 209 bp, Oryza sativa
  Clone ID: PAT_MRT4530_44560C.1
tttgactacttttgctagtactgtgcgcctgcgggtcgtgtttatattacctcctccatggcgccgcacccgcacagcaccacaccacctgcctagcgccaagctccaacagaagccgctagcttgacgcaagtccaaggaaggggggaagaggcaggaggatgggatcccccaagaagggcaagagcgccatgaatcacggcatctgg

SEQ ID NO: 41193 - DNA, 225 bp, Oryza sativa
  Clone ID: PAT_MRT4530_44561C.1
atgggagaaaaaactgaaacaagtacactggatgccgttatttcagccaaggatgaaacagaagtattcaagatagagtatattttgccaggtcacatcgagatcggagtcaaatcctccggccacatcgatcgattaacgaccttaattccgatcgatcaagctaagatcgatcgttgtctctgtttgcggtggccaccgccggccaagtcgccggagatgaga

SEQ ID NO: 41194 - DNA, 517 bp, Oryza sativa
  Clone ID: PAT_MRT4530_44562C.1
acggtttatatgggaatccacgaagaattactcgtgcctatggaacctgtggatttgatccaggagatgaaggaaattgaacacggaatcttatggtgaccactggcactgatgacacaagaagatgccacacagacagctgctttgatgcatccaaaagctgcaagatttaagggcagggaatgatggtaccagcccaaaagctcttgaggaatggcgcacaacggaagatggagcgtgcgaggcagcgggcgattgaaaagaacgggacctcatcagctgcgaaaacgcgatgaattgggaggtagctattgctgcacatcacctttgggggtgtcctggagctgctgctgtacgtatggtggtctcctggtgtctgtaaaatttcttgtacatcgtgttgttgttgttgttgtttagatccattttattttcttcaatttctcaagtaaaagacacaaccgggtagaaaaattaaagctcatatttttcgacctcaaaaaaaaaaaaaaaaaaa

SEQ ID NO: 41195 - DNA, 1187 bp, Oryza sativa
  Clone ID: PAT_MRT4530_44563C.1
cttacggcgacgaagaataaaactatcactatattttttccttttcctagttcttcttccaagcgcaggataaccccaaggggttgtgggtttttttctaccaatgggggctttcccttcaccgcccccatgggggtggtccacagggttcataactacccctcttactacggggcgtttacctagccaacacttagacccggctctacccaaacttttttggttcaccccaacattacccacttgtccgactgttgctaagcagttttgggataccaaacggacctccccagatggtaatcttaaagtggccgatttaccttcttttgcaatcagtttcgctacagcacctgctgctctagctaattgcccaccccttccacgtgtgatttctatgttatgtatggccgtgcctaagggcatatcggtcaaaggtagggcatttcccattgatataggaacttttgtaccagaaacaatagtatctccaattatagcccctctgggatgtaaaatatatcccttctcaccatccccatagtgtatgagacaaatgtacgcatttcgattagggtcgtattctatggttacgattctaccagatatgtctttttgattccgtcgaaaatcgattttacggtataggcgcttatgacctccccctctatgccttgcggtaatgattcctctggaattacgacctttaccacaacggtgccgtccatggatcaaattatttcgtggattggatttcacttgcctatctatggttcccttgcgtgtgctcgggataggtgttttgtataaatgtttcgccgtattattaagtattctcctttagtttttttctctatctagaagtggaatagaataacccggttgaagggtaatgatcatacgtctgtaatgcattgtatgtcctagaatagggcccattcttctaccctttccgggtagtcgatggctattcacagctactaccttaacaccaaagaagagttcgacccaatgctttatttctgtcttagtgaatcccgattcgacattaaaagtatattgattctttcccaataaacgaagacttttttctgtaaatactgcgtatttgattccatccataaatcgactttccctcctatgctctgagttccagtatcgataagaattcgagttcttcggacgcgtgg

SEQ ID NO: 41196 - DNA, 435 bp, Oryza sativa
  Clone ID: PAT_MRT4530_44564C.1
atgcaaacaagaaacactctgacagatgctacgtacgcaagccaaggcagtaccacaagtggactcaagaatgtgacgaaacctgaactcccttacaatgcaccgaagaatctgaccacaacaagatctatatttacatgccgtgcgccagcattggatgtaggtgagaaaatagaaaatggcaggataagaagaaaatcatgcccacctgttgcaacaatagggaccaaggagcagagattagatggcaagaagaaaggcctaccagctaaagtgaaggctgtgagcagtagcaatgagtctacttctaataatggtggccgttctggtgaggccacaacaatgaacggaacgagaaaaacagatgggaagaaagagcacatgtcaaagcatggaaaatcggctgaagaagtgaacatatgtgacttcaaatga

SEQ ID NO: 41197 - DNA, 488 bp, Oryza sativa
  Clone ID: PAT_MRT4530_44565C.1
cctagctccaaactgaacgagccacgacccgtccgagaggtgtatcgtcggcggcgacgtcatccgtgggcagatcgacctccacaagcttcgcggcgaggtctagtctagacgaggtcggcatcaacttcatcggtggccgtgcttcccccttcatcccctctgcttggacggggatccaccggccagatcgggcgcatcttcaggccaaggtaggaccttgtgcaagccccagctggtccgacctccctattgatctcctcctaatcatcctggaacgactggagcttcctcatgcacttgccttcgccgcagtctgcactacatggagttccgccgccacggctgccggtgtcccacgttctcgcactccatggatcatgtcttggggtaaccacgttgatcaaaggctggacgaacggcgccgctcggcggtgacctgcaacctctaccaccctgatgatgcagtcgacaagatctatagtgtc

SEQ ID NO: 41198 - DNA, 327 bp, Oryza sativa
  Clone ID: PAT_MRT4530_44566C.1
atgactactcggattgtatccatattggtctccctaattctacttgaacaaggtgacatctatgggtataaatacaagccccctaggaggagaggggacacgccacaaagcaaacaacaacaacagatcaacacaaatcgatacaagccagcacacgccaagacaagccaccggatatcgacatcagagataagcctagactgtcacgtccagaaattcccgaatagaattccaagcagaatgtgcattaaaatccccgtccaggaccggccggggtacacaaacgacaatgttgacattcagatccacgtcttacaaacatcataa

SEQ ID NO: 41199 - DNA, 1723 bp, Oryza sativa
  Clone ID: PAT_MRT4530_44567C.1
ttaacgccacatcaacagccacctcatgacaccatcaagaaaatgacattgatacccctgggccaccgccggcagagtcgctggagaacggagcgacgcgaagtcggacgaggagtagggacgcaaagcctcagacgggaataacccgtagatctgttctttaacatcacaaaagggaacagtacgctcaaattttcctgttttcacgtcgtacgtccttacacctccccaaacacgcagtccaagaagccaatcgaatgcatgtatgatcacgggggcagagaaatatatacagtgaggccgtatcccgggcaaattctgggtgggtaagcatgcggagtgattcaatctgaggaatagcgcatgatccatcaaaacattcccctgcaccacccccttgcatccatccggatcaaccttgcagatttggaacgcgatgccatccgggtagtgacgcgcgagaatcacacgaacctgcaggagatcaccccatggcgtcgacactagatgccgagtgaggatacatcctaatcctccgtagggccttgcggcataaatcacctcccttgttggtccgttgctcgctccatcaagatcccacttctccaccatcctgtgcaatgtcacggcgtggaacctccccttgtggtacgcacagtcgagatatctgtctcccccgcttagagttgaagccacctgccacctgctctggcctgccttggcaaaagaaagccgctcgccgttgttgtggatgatcatcacgacgtagtcgccgcctctggatggactgcaagacagcactgccttttggtagaaccatatccctaaccgatacgcttcgaacctgctgtttgtttccaaaaggtagttctccaagttccctccttcgctgccatagaccgcctccacgcaggcgaaatcggtaatcggtgggagggggatcatggccagtgtgacagggttgtggagcacgagattggagaggtcatttgccaaaaccagccagccgtgagaggccccgtagcacgcaacaaaggagccctttggaaaactgactctgtagatcttgtcaactgcatcaccagggtggtagaggttgcaggtcaccgccgagcggcgcctttcgtccagccttttgtcaacgtggttgccccatgacatgatccatggagtgcgagaacgcgggacaccggcagccgtggcggcggaactccatgtagtgcagactgcggcgaaggcaagtgcatgaggaagctccagtcgttccaggatgattaggaggagatcaatagggaggtcggaccagctggggcttgcacaaggtcctgccaagggcgacatggcagggagaaatcggatccgtttggagggattcctccaattattttactgaatgaatcggatccagtcaccgggaatccacgttggcccaagaggggagggcgacgagctcacccttggcctgaagatgcgccggatctggccggtggatccccgtccaagcagaggggatgaagggggaagcacggccaccgatgaagttgatgccgacctcgtctagactagacctcgccgcgaagcttgtggaggtcgatctgcccacggatgaagtcgccgccgacgatacacctctcggacgggtcgtggctcgttcaatttggagctaggacgagattaggggtctgtttcccggccggcctcgagggacccaatcccctatagg

SEQ ID NO: 41200 - DNA, 1619 bp, Oryza sativa
  Clone ID: PAT_MRT4530_44568C.1
tctaaaactctctctctctacccaaacaggttttgagaaagaagtggaggacagatccaaaaagttcaccttttgattatccaaacaagtttggagtttgttacctgaatctcctcttcttcctgtcaccggaagggaaattgataaaaaaaaagcagtgaaagcctcaaggaatgctgaaagatgtgcttgcatagaagaaattttccgtgtgagataaagcagattgctggttcactagtgctactgatctgctcaagtcttgatgtgagtgatcaactttcctgcactaattctacaccatttagactccgaaacgacgatgatataagaatgttgttctccattcatgatcatgaccttggggaggatggctaaagaattgcagtccatctgattggtggtcaaaacatagtgctgagatttatatctttgtgggcatggagagtagagggaagattctaatggagaggtatgagttggggagattgttggggaaaggaacatttggcaaggtgcactatgcaaggaatctggagtcaaaccagagtgtggccataaagatgatggacaaacagcagatattgaaggtcgggctttcggagcagatcagacgtgagatcacaaccatgcggttggtggctcataagaacattgttcagcttcatgaggtcatggcaacacggaacaagatctactttgtgatggagtatgtgaaaggtggtgagctatttgaaaaggttgcaaagcgtggaaagcttacagaggttgttgcacataagtatttccagcaactcattagtgcagtggattactgccacagtcgaggtgtgtatcaccgggacttgaagcctgagaacctactgttggatgagaatgagaacctgaaagtctcagactttggattgagtgcgctttcagagtcgaagaggcaagatggcttactccataccacctgtggaacacctgcatatgtagctccagaggtgattagcaagataggctatgatggtgcaaagtcagatatttggtcttgtggtgttatcctgtttgttcttgttgctggttaccttcctttccagggcccaaacttgatggaaatgtatcggaagatacaacacggtcctgaggagaaccgtattttgaaggaaagaactttgaatgaaaacaccaccaaaaatgttgctccggtgcttggtgtgagacgcaagaaaaatgctcatgaagatgtgaagcccatgtcagtgacaaacttaaatgcttttgaaattatctctttctccaagggatttgatctctctggcatgttcattgtaaaggaatggagaaatgaggcaaggttcacttcagataaatctgcctcaaccataatctcaaagctagaagatgtagcaaaggcgctaaatctcagggtaaggaagaaagacaatggtgtagtgaagatgcaagggaggaaggagggaaggaatggtgttcttcagtttgacatagagatatttgaggttaccacttcctatcatatcatcgagatgaaacaaacaagtggcgattcattggagtaccgacagctactggaggagggcatccggccagctctgaaggacattgtcttggcctag

SEQ ID NO: 41201 - DNA, 2273 bp, Oryza sativa
  Clone ID: PAT_MRT4530_44569C.1
ccccgggatttggaacctcttcggcacgagcattctatctctctacccaaacaggtgttgagaaagagttgaggacagattcaaaaagtctcaccttttgatacccgaatctcctcttcttcctgtaagccgctaaagactcaaggaaaggaataaacacaatggtgtagtgaagattgccaagggaggaaggagagaaggaattggtttcacttcaagtattggagatagagatatttgaggttaccactacctaccctatcatcgagatgaaacaaaacagagtgtcgattcattggagtaccgtcagctactggaggaggacgtccggccaaagctctgaaggacatttgacttggccctagcatggaggtgaatagcaacaaagtcgccaagaggagatttagatgtctcaagcatttagtttccgctcctcaaattcacttaggttttagctcaaatgaatttatttgtcttgcctgtgttctttttagcatctatgtttttgtatctggagagttcatgttgagacaatgtatgcaattgtatttggagagttgatgtttaggccatttatgcacaatttagatggagtctgtcgagagtaattttatgagaaattgagatggagagttaagggaagatactaatggataggtatgagttgggaaaattgttggggaaaggaacatttggcaaggtgcactatgcaaggaatctggagtcaaaccagagtgtggccataaagatgatggacaaacagcaggtgttgaaggtcgggctttcggagcagatcagacgtgagatcacaaccatgcggttggtggctcataagaacattgttcagcttcatgaggtcatggcaacacggaacaagatctactttgtgatggagtatgtgaaaggtggtgagctatttgaaaaggttgcaaagcgtggaaagcttacagaggttgttgcacataagtacttccagcaactcattagtgcagtggattactgccacagtcgaggtgtgtatcaccgggacttgaagcctgaaaacctgctgttggatgagaatgagaacctgaaagtctcagactttggactgagtgcgctttcagagtcgaagaggcaagatggcttactccataccacctgtggaacacctgcatatgtagctccagaggtgatcagcaagataggatatgatggtgcaaagtcagatatttggtcttgtggtgttatcctgtttgttcttgttgctggttaccttcctttccagggcccaaacttgatggaaatgtatcggaagatacaacatggtgaattcaggtgccccggttggttttcacgcaaacttcagaagttgttgtacaagatcatggaccccaacccaagcacaaggatttcaatccagaagataaaggagtctacctggttccggaaaggtcctgaggagaatcgtattttgaaggaaagaactttgaatgaaaacaccaccaaaaatgttgctctggtgcttggtgtgagacgcaagaaaaatgctcatgaagatgtgaagcccatgtcagtgacaaacttaaatgcctttgaaattatctctttctccaaggggtttgatctctctggcatgttcattgtaaaggaatggagaaatgaggcaaggttcacttcagataaatctgcctcaaccataatctcaaagctagaagatgtagcaaaggcgctaaatctcagggtaaggaagaaagacaatggtgtagtgaagatgcaagggaggaaggagggaaggaatggtgttcttcagtttgacatagagatatttgaggttaccacttcctatcatatcatcgagatgaaacaaacaagtggcgattcattggagtaccgacagctactggaggagggcatccggccagctctgaaggacattgtcttggcctggcatggagatgaatagcagcagtcgcaagagtagattttgatgtctcaagcatttagtttccgctcctcaaattcattaggttttagctcaaatgaatttatttgtcttgcctatgttctttttagcatctatgtttttgtatctggagagttcatgttgaggcaatctatgcacaatttagatggagtctgtcgagagtaattttatgagaagttgagctgcaatataaaagttggctttgagcctttcaagctttcttcaaaaaaaaaaaaaaaaaaaaaaaaaacaataaaaaaaaaaaaaaaaaaaagccttgttttgattcctgcagcctttggatcca

SEQ ID NO: 41202 - DNA, 576 bp, Oryza sativa
  Clone ID: PAT_MRT4530_4456C.1
atggcgaggagcggcggcggcaatggtgggggagaaggtggcggcggcggcggcaatggcggtggcgggggagggttgaagaaggggccgtggacgcaggcggaggacaagctgctggtggaccacgtgcggcggcacggcgaggggaactggaacgccgtgcggcgggagaccgggctgcagcgctgcggcaagagctgccgcctccggtgggccaaccacctccgccccgacctccgcaaggggcccttctcccccgacgaggagcgcctcatcctccgcctccatggcctcctcggcaacaagtgggctcgcatctcctcctacctgcatgggaggacggacaacgagatcaagaactactggaacacgcggctcaagcggcgggtgcgcgccggcttgacgccgtacccgccggagatcgagagggagatcgcgcacctccgcgcgcagaatctcaacctgtccgccgaaggcggcggcggcggccagataatatatctcgtttggtgtgcgtttggtggagcggttggggggtgtgggggcgtaggtgttctgggcttttttggggggtga

SEQ ID NO: 41203 - DNA, 654 bp, Oryza sativa
  Clone ID: PAT_MRT4530_44570C.1
atggcgcagtgcagcccggttaaaggcacggttgggcagcacgacggcgagcgttgccgcggcctcccgccggccaccggcgtcgagggagtggagagaatggacgtcgagcggcggcggcatgaagggagccgtgccgtcgcgcgtccctcctcctcgccgcagctcatccaatgccgccgtcgcagcgtcgtccctgacgtggatcgatcggctccccaggcggaggcgtccggcaatcctggatctgacatttggcggtcctacagtggagatgcaattggtggaccaactgtgggtgatcagaaggaggtgctggaagtctttagtcccaaaggcgtcttccacgcgtcgcgtctagatccaccattgtcatcgctcgaggccgccactgccaccatcgtcgcgcccgaagccaccggtgtcattgtcgctccaaagatctccagtggcggagctgtcttcccgaggccgagagcggtggataggcctctcctgacactggcattgaccgctcccgagccattgggtccgctgtcatccctaccgaactcccacagccgctgccatcccctggctgccgtcaccgctgctttcaccacctccggagcacctaacactgctgcggccttcaccacctcccagagcgcttga

SEQ ID NO: 41204 - DNA, 207 bp, Oryza sativa
  Clone ID: PAT_MRT4530_44571C.1
agtgttgctggccaagaggagcccagaatgagctggagggataggtgggtggtgatgtggttgaagctggtgggagggtgactgtgttgatgttggaaaactgtgcctgttggctgtgatggtgtgcacatggcctgtaccgcacctggcatccatgtcaacctcatgatgtcacaactggatgtgaatgcatggataaaatgtgga

SEQ ID NO: 41205 - DNA, 326 bp, Oryza sativa
  unsure (1)..(326): unsure at all n locations
  Clone ID: PAT_MRT4530_44572C.1
gggcaagtggcaggagaacttcgtatcatcacaagggcggcaaggcggcgggaggtccggatactctggcagaggtggaggctctggaagaggtggtggtggctaccagagggacaggggcagtcagggttctcgtggaggctatggtggtggttcacgcttccaggatggtggaagatctcgcactggttcgatggcgaagggaggaggtgatggcggtgcacgcatggtgagcctgaacagggctggtagaggttagagaactagttctccaggatagtattcagcgcaaagttttgcaagttctgaagcaccanntggttntt

SEQ ID NO: 41206 - DNA, 259 bp, Oryza sativa
  Clone ID: PAT_MRT4530_44573C.1
cggcacgaggatatgtcctatgaagatggatgaagatgtctacatatttagacctctacgtttcaatactctacctgtcgtgaaaatagcagctgagcctctaaacccaagtgagctccctaagatggtggaaggtcttcgtaaaatcagtaagagttatcctcttgctgttactaaggtggaagagtctggagaacacactatccttgggactggtgagctttatctagattctataatgaaggacctcagagagctt

SEQ ID NO: 41207 - DNA, 409 bp, Oryza sativa
  Clone ID: PAT_MRT4530_44574C.1
atcaacagacacgttcaatactcatttccaatctccattccattttgcgaagaatatgaagtcgcagcagttagacggccatggcgacgtccatcgagctgaccaacgaacacagctacgtatacgctggcctggtgctctacccgttcctctactcgtggatgagcttccaggtcagctaggaccgcagaaaggacaaggtgatgtacaccaccatgtacgccaccatgtacgcgaacaaggacgccaagatgttcaactggctgcagaactggcaccagaactcgctcgagatgatgccggtgatcatgccgacgctgttggtcacgctgctggaacacccgctcgacgacccggtgctcggcgtgttgctacgccgtggcgtaggtcttctacaggaagggctact

SEQ ID NO: 41208 - DNA, 126 bp, Oryza sativa
  Clone ID: PAT_MRT4530_44575C.1
atatttgatggagcagaaaccctccggtggaaagggcaaaacatcgtcggcgagttctgttccgtcgccttctgcggtgccagaagacgtcaacgcgtgatgtcgagcggcagaagacggtggtag

SEQ ID NO: 41209 - DNA, 930 bp, Oryza sativa
  Clone ID: PAT_MRT4530_44576C.1
atgaggctctgctggttgctgttcctggtggctgccatggcgacgctgcatctcgcactcggcgtgcctccctctgcccgtgatcttcgtcactgccccacttcctgcggggacgtgaacatcacatatccctttggcatcggcaccggctgcttccggccgggcttcgagctcatctgcaacaccaccaccaagccgcccaagctcttcttcggtaacacgacggagatttcttatcaatatccatacggatatgtcagggcctctgtcgtcttcaacatcgccaccaccccaggattgcttggcacctatagcaggtcatggcaggcacctgggagggtcttaagcacctacacgaccaattctctggtgattgtcggatgcggaatcgacgtctacttgttccgcagtcataccaatatattacaggggtattgcaggagtgagtgcaccaacatggcgctcatggacaaaaagttatcaggacgaccatgcaatggcatcggttgctgcaccatcgacttgccaggtggagtccgtgcctttcggtttaatatcactcagagggaagaaacacattcggttgcacttggtaattctacaattaaggccttcttaagtgacagccagttctacttcaatacggcagatctcctgtcagagaagataaacgcaaacaccatcggtgctacatcgttattcttttcagttgctattacagatcaactcaattgctcaactgctcagttgggtttgaataagacagattatgcctgcagcgacggtagcacatgcgttgatcagagaaaccagcgcggctattcttgtacctgccctgctgatagtttcgattatgacaatccctaccttctccacggctgcaaacaaggtattcctatacaatttattgcgactgagaataaagaatag

SEQ ID NO: 41210 - DNA, 315 bp, Oryza sativa
  Clone ID: PAT_MRT4530_44577C.1
atggtggtctcctgccagctcaagcctgcgccggctccggccgccgccagcaaaggcggcggcgcgcctcacctccagcagctgcgccgggcgtgcgtcgcggcggcggcggcgtgcgcgtgccccccgtggcgcgccaactcgctggagaacatcgtgccggagaacctgccgcggcagtcggctcgccggaggttcaacagcatcacggcggcggcggcggcggagagcgcgccgccccccgcgtcggcgtcgcccgacgccgtgctcccgttcttggcgccgcgctccggcatgggctgcttctccctctaa

SEQ ID NO: 41211 - DNA, 423 bp, Oryza sativa
  unsure (1)..(423): unsure at all n locations
  Clone ID: PAT_MRT4530_44578C.1
atggtggtctcctgccagctcaagcctgcgccggctccggccgccgccagcagaggcggcggcgcgcctcacctccagcagctgcgccgggcgtgcgtcgcggcggcggcggcgtgcgcggtgctcgggacggcgggcggccccggcgaaggcgccgtgatggcgcgtgcgccggaggcgacggcggcggcggcggcggggccggcgcggtggagcgaccgccggcagtgccccccgtggcgcgccaactcgctggagaacatcgtgccggagaacctgccgcggccgtcggctcgccggaggttcaacagcatcacngcngcngcngcggcggagagcgcgccgccccccgcgtcggcgtcgcccgacgccgtgctcccgttctttgcgccgcgctccggcatgggctgcttcttcctctaa

SEQ ID NO: 41212 - DNA, 274 bp, Oryza sativa
  Clone ID: PAT_MRT4530_44579C.1
ttttgtgtttttttttttttagcacccaaaagatctgtgcaaaaagtcataccgttggaacatcatgagcagaaaaaaacttaataaatacgaactgctgcttgatttcagcgaaaactaagtttgaggagattcgtctgagctaccagtcatgatatgttctctacccgaaaataactaagctttttgaaacaattaacatatgcacacctaacccatcgtaaatcaattaggctatccacattaagtgcctaaatactttgattacccagaa

SEQ ID NO: 41213 - DNA, 396 bp, Oryza sativa
  Clone ID: PAT_MRT4530_4457C.1
attgattcttcatctagtactagcatgactatcacttgaaaagggacaaggaaaccagaagttctagttttagattacaccttaataggatagcccaaaattagtgcctgggacaatatcacgttataacagaatatcagtgggtacctaccggttaaattctgacagaacacttcagtaattccttatgtcaactatgcgaggcaactgaccacgccacccctggttaacactaaaagctacacggtgcaactgcctactgcattacatcaggagaacattacagctagctgcagctacatatttacattttacaacaccatgagaactgccctgttagtgcataacaatcaaaagatgggcgaggctaatcctcgttggcggagtcctcatcct

SEQ ID NO: 41214 - DNA, 765 bp, Oryza sativa
  Clone ID: PAT_MRT4530_44580C.1
atggtggcattagcaccctatgatattggcgagtttcattgtcggcttcgcctgtggtacggcctcctcgggccgacaagctcccgcgccgccgcccgccctcgcatgtaccgctgtcggcaaccatctggcctccgcgcgccaacgagctcccacaccatgctccacgcggtcactgccgtgcgccgacacgaccgcccatgctcccaccgtgcgccggcgctgtcaccgccgctcccatcgcgggtcggcgcctccaaagctcccgccgtcgccacggccgtccctgctcaaaccgcacgccgacgccgtcgccgccgctcccaccgcgggtcaaccccttcgccgctcacgccgtctctcccgctccccaccatcgccgaggccgcctctgttcccactacgcactgccgtcgcgctcccaccgtggtttatcgcctccgccgctgctcccaccgcgtgtcgccgcggtcgccgccgccggtggtcctcctgccctcgtcgcctcgcccctctgtagccgtcgtgctgccggtggtcctcctcgtcgcgccgctgccgtcgagcccagctgccccccgagctgacacaaccactgccgatggtctgccagccctcgtcgcccctctgcagccgccgctgccgctggcggtcctcctcatcgtgccgccgccgtggagccaacgtagccgccgcagctgcagccgcgatgaccgtcgcacctccagccatttgtgctctggtgagagaggatacagagcataa

SEQ ID NO: 41215 - DNA, 363 bp, Oryza sativa
  Clone ID: PAT_MRT4530_44582C.1
cccacgcgtccgcgaaaaaagaatatgtaatacttaataatgctatttccttaggatcaaatggggcatgtatgatactggagaggaacataaaatatgatacagtgataccgggcggaatgcgcataaaatgataaaggcggcttaacacgatatggatgaaatcatgaaacaaactgttacaatggaacaggatgcatgatctctctatgtttggcacaagaatgactgaacgagaagagataattcctgatatggcagacctagagtttggacattgaggaactgaagaaacagttgtagctaagtacaaaggccaacaaaacggatgctagctgtaacctggtgctatcatgagagctg

SEQ ID NO: 41216 - DNA, 282 bp, Oryza sativa
  Clone ID: PAT_MRT4530_44583C.1
atgggacgacggatgcaacaagagcgtgagacaaaacattttgcatggctctctgactccgaccggcacaaggggagagaggaacggctgaacgatcgagatgtgagccgttctttggatcacacacgacgaattcaagtggccaccggggcaaccatggccgccaatgttggccacggaatagatttgcgagtccccatggccgttggtttggtcaagcgacgaacgatggccgtaaagtttatcccccactctcttcttgacttgtcccggaccatatat

SEQ ID NO: 41217 - DNA, 391 bp, Oryza sativa
  Clone ID: PAT_MRT4530_44584C.1
atggctgacggcgcggggcgtgatcgctacggcctcgggccggggaagagaaggaagacggatgggttcacgggcgtggtcaaacggcaggggcgacggctggcgcggctgctcctctgcgtccttggagcgggaacagaacggaggaagcaggggctgggccgagaggggaaagggagaaacggagggggagaaagggagctcgcgccatgccggtttggggagggagagagatgggagcgggaggcgctgcctccggtttttggacagatgcaggcggcgtggctcgggcacgcgcgctggctcgcggggcagggcgcggcagagcagcggctaggcggcgcaggcgtggcaagggcggcgaccgcgagggcgcgcgtgcgaggcaacg

SEQ ID NO: 41218 - DNA, 483 bp, Oryza sativa
  Clone ID: PAT_MRT4530_44585C.1
atgggccaccaccactgcccttccccctccccctccggccagatctgggagggagggagggaggggaaccgcctctaccaccgcttggagctgtgccaccaccgtcgtgtgggagggaggggagagaatttagccgcgctggggtgggagggcggcaacggcgaggaggcgcggctgaagtccgggcggcggcggcgcgggccgggcggcggggcgacggcggcgacgacggcgcggggcatcctcatcgtccttgccatcctcgtcggcatcatcgcgctcatcgtctacctcgtcctccgccccacccaccctcgcttctacctccagggcgccacccttcgccaactcgacctctccaactcctcctccaccgccggcgcggggcggcacgcggcagccggcggcatctcccctccctccctccctcgcagatctggccggaggagggaggggggaggccggcgggggcggcggcggtga

SEQ ID NO: 41219 - DNA, 287 bp, Oryza sativa
  unsure (1)..(287): unsure at all n locations
  Clone ID: PAT_MRT4530_44586C.1
caagcacactcatcgcccctcctgtcgttttcccgcgccacgtttccacgctctcgagccgccgattccaaagaaacgcgcaccaaactctcgtctagctccccgcttaacgtatcaacancatggtgtccaagaagacctccatcgncgncgccgccgncgncgccgggnacangggtgcancagaaacgtncctgctgccanagcgttacgccggagcggggacggcaaccgcagccgcgtnggtgcttcggcgcggtgttcaangtgtnnacgagcgttgtggg

SEQ ID NO: 41220 - DNA, 330 bp, Oryza sativa
  Clone ID: PAT_MRT4530_44587C.1
tcgcccacgcgtccggaaaaatacacagatctagagtcccggagcttagaatatcatttcggaccacgatcttgttgcatatcgctgtatgcgacacctctggagagggtgatggtactggtcgcaccattaggccttatgaggttgccatatctagactgctccagcaacgcgagctgagcccatcttaggacgctattacgcacacagtatgagcataccggactgccggtgcttgcaatgatgtgcgttggaactgacaaacatccaggtctgacaacaggacgggctggcggcgcagcagagttactatcaggacatgaacattgt

SEQ ID NO: 41221 - DNA, 122 bp, Oryza sativa
  Clone ID: PAT_MRT4530_44588C.1
atacaccacgggcccggtatgtcagccaggattggtctaccagatgtacccgctctcggtttgccgtacgttggtgaagcgacagtgcgttggccgaatgacctcgccgtcagcgagcagtc

SEQ ID NO: 41222 - DNA, 630 bp, Oryza sativa
  unsure (1)..(630): unsure at all n locations
  Clone ID: PAT_MRT4530_44589C.1
ctccgaggccgaaccggatatcgcatcgcacaattctagtattatacaacaaaaatttaaaacaactattgtcctgctacaatgaagatcattttcgtctttgctctccttgctattgttgcatgacanctcactgtctactttgatgttttaggttaaaatattatgcaatatcagatgaaatggctctctcctgctacaccaacagatgcttagcccatataatgtcttcgtaaggcaatgctatatcattgtagagaacaccttcttgcaatcagctgactgttcatcttgataaacgacctataccttgcatgagctcaatactgttggcatatcaatctcactaccagaattttaacgcttgtccatgacataacgaaccagctaccctctccaaaacgatgtctttctctacattgaaccgaaattctgactcagagctctagtactgctgcctttaaacttgccatctacatatgtgatctacccttggatctatatggcatccctgtagattaccaccccttgcacgttgatctgaactgaattttcagaatattgccattgctgaactgaaaatataagattcacgtattattactattggacatgtgagaacttgaatcg

SEQ ID NO: 41223 - DNA, 315 bp, Oryza sativa
  Clone ID: PAT_MRT4530_4458C.1
gatcatcaaagggcagcaagggcggctttttccttggggctcttattggggccattggggcccatttccgcgccccagttagccaagtggaaatataaggttacaggacacggcacatgcgcaactcggatagggcaagacacagctcctctgacaccctgtcccgtcagtgctctacaccgacatcacaccccgcgagagatgccagaggctgtttccccgcgccggcgcgctctcgctgtgcatacactgctctcacaagctctgcgagatgtgaccccagagtgtctttgcccccatacgcccggatgttga

SEQ ID NO: 41224 - DNA, 687 bp, Oryza sativa
  Clone ID: PAT_MRT4530_44590C.1
ccacgcgtccgcggacgcgtgggagctggtctcttacataaagaacgacagcagtgtgataccacgtattggtgcactaagagagatgaatttggagttctttgcaattgacatgcagggattcacaactgaccatgacatggcattcactgatttatatagtgctcagcacaactcgaaaaagttcaatgacactataagcactatggctactcgcattgctaccacatttgcttcgttgaaggaatttccttgtgtgcggtatcgtgccccaaagggcacagatccaatgacaacaccaaaatttgacatggttccaaaatggttagcgactgctgtttgggatattgtgtcaaaatataaatcaacaatacctgaatttccccagaaggagacatgtgaactgctcattgtcgacaggcctatagatcagatagcacctgttattcatgaatggacctatgatgcaatgtgccatgatctacttgaaatggatggccaaaaatacatatatggaggtgtcgaaagccgggatcagaacctgagagaaaggaggctttattgggaggatcatgatcctcttctgggttgagcttcgccacattcacatagctgatgctagtgagaaggttgtatgataagatgaataactttgtttcaaagaataaagcagctcaacttcattca

SEQ ID NO: 41225 - DNA, 270 bp, Oryza sativa
  Clone ID: PAT_MRT4530_44591C.1
atggcaaacttcctcgactacgacgcctacgacctcgagcgcggcggccaggccgaggtggcggcggtcgggcgcagcggcggcctgggcgaggcggcggcgagcagcgaggcaaggcttcatcatgcgctcgtcgtcctcctcctggtcgtcgctttctgccaagcttgcagaagaatcatcatagagttattagacatgcgcatatttggctcaacatattctgtatttccatttcgtaatccaatatattctctttatgagatctag

SEQ ID NO: 41226 - DNA, 2364 bp, Oryza sativa
  unsure (1)..(2364): unsure at all n locations
  Clone ID: PAT_MRT4530_44592C.1
ccacgcgtccggggttcaactccggtcggcggcgggatgtcgatgtcggggtcggacttcggcgccccgtgcgacgaccccaagatcttccgcaacatctgccgggatcgtatactcaaggacttgctgcagccggacaaagataaggagaccaaaagctcatggaaggttcttatcatggacaaatttacggtgaggatcatggcttatgcctgcaagatggcagaaattaccgatgcaggaatctcgttggttgaagatcttttcaagcgaagggagcccatgccttccatggatgcaatctacttcctccagccactgaaagaaaatgtcataatgcttctatctgacatgtctgggagatgtccactgtacaggaaggcatacatattctttagttcaccgattcctaaggagctggtctcttacataaagaacgacagcagtgtgataccacgtattggtgcactaagagagatgaatttggagttctttgcaattgacatgcagggattcacaactgaccatgacatggcattcactgatttatatagtgctcagcacaactcgaaaaagttcaatgacactataagcactatggctactcgcattgctaccacatttgcttcgttgaaggaatttccttgtgtgcggtatcgtgccccanaggcacagatccaatgacaacaccaaaatttgacatggttccaaaatggttagcgactgctgtttgggatattgtgtcaaaatataaatcaacaatacctgaatttccccagaaggagacatgtgaactcgtccgtgtcgacaggcctatagatcagtgtagaagtatattgaagaaattcagtatctttcctactgcttacaataatttccgtatgtctgcaaagatagcacctgttattcatgaatggacctatgatgcaatgtgccatgatctacttgaaatggatggccaaaaatacatatatgaggtgtcgaaagcgggatcagaacctgagagaaaggaggctttattggaggatcatgatcctctctgggttgagcttcgccacattcacatagctgatgctagtgagaggttgtatgataagatgaataactttgtttcaaagaataaagcagctcaacttcattcaagagatggtggtgaaatttctacaaaggatctgcagaagatcgttcaagctttgccacaatacggtgaacaagttgagaaattgaccctccatatagagattgctggaaaaatcaacaagtttatcagagagtatggtctccgtgacattgggcaggtggagcaggatctagtttttggagatgcagcagccaaggaggtgatcagtatcctcaggtcaaagcaggatatgagcccagaaaacaaattgaggttgcttattatatatgcaattgtatatccagagaagtttgaaggtgacaaaggggaaaagttgatgcagctagcaaaactgccacatgatgagatggatgccataaatagtttaagatacttggttggttcagatacaaaaaaggcatcacggcctggcggcttctctctcaaatttgatgcacaaaaggagttgattgagaaactgagcaaaggtgcattacctttgaatgaatacccatccatgagtgaacccagttccactgaacaaggatctacacaaagtgcagccgcgactaaaccagcacaagcacaacccatgtccaggagatcgcggcggacaccaacctgggctaagtctcgaaactctgatgatagtcaatcaagtgactcctcggtcttgagacatggatctaatgacttcaagaggctaggcaaccgaatttttgtcttcatgattggtggagccactagatcggaactgcggacggtgcacaagcttactatgaaactgaagcgcgaaattgtcctgggatcttctagcatagatgaccctccacaatttatttcgaagctgaagatgctaactgcaggtggtgccaatgacgtctaaacttcgcacttagtttgcaaatcaaccgatgaaacaaacttgtcaccttttgaaacccattgctacgaacagttagaaacgttggatgtcatcaatgactggactactcacaataattacacgattttttcatagtctagtatatataccaagtgagaagaagtgtcaaatgtacttaaaacatgtatgtagacaacatattttgcccacattatttattcttctttcagatgtaaaacgtagaacagttgcgacagttgttttgcccaaatttgtatatttatgaacactacaacaatgacatggtgacgattacactcatggatcaatcgattcccataatttgtagtgaccaaaa

SEQ ID NO: 41227 - DNA, 745 bp, Oryza sativa
  Clone ID: PAT_MRT4530_44593C.1
aagtaacatatattgtatttcacgtttgcgttctcgttaagttcacgtttcgttcacctacgttcgttcgttcacttcacttttcgttcacgcacgttcgttcgtttacgtacgttcacatacaacgttaagttcatgttcgttcacgttcacgttaggttcacgttcgttcacgttcacgtacgttcgttcgttcacgtacgtttcgttcgttcacgttctttcacgttctcgttcacgttcgttcgttcgttcacgttcacgtacgtttcgtccgttcacgatcgttcttcgttcgttcacgtggcggcagcggagcggcggcgtggcgccgcggctgtggcttggcgcggcggcggcgtggcgcggcggcggcgtggcggcgcggcatcggcgtggcgcggcggcggaccccgaacacgactccgccgcgccgacgatgccgaacccgaccttgatgcggccgccaccggcgacgacattggcggcggcgtctctcaccccagagatgcggcggcggaggaggcggcggaggcggcgacgacgacgcgcgcgagacaacggctagatacgacggcggcgtcggcgcggggatgtcctaggcagtggcggcgaaggagaagccgagagagattgatcggggaaaaacttctaagtgttggtggagaagatgagggcgcgcatcaggaatatatacacccctagatctttagtcccggttgatgagaacaaccgggagtgaaga

SEQ ID NO: 41228 - DNA, 351 bp, Oryza sativa
  Clone ID: PAT_MRT4530_44594C.1
atgcgggttctatatttcgcccgtggcgttgggctgggcggcagcagcagtggcgggcgcaggcggcggtggggcacggggttgccggcggcggcgcacggcgtgctgggtgcaggcggcggtagggcatggggctaccggcggcggcatacgacacgggcacaggtggagtcgggcgacacgacaacgcataagagcagggcagcaggtggcacacgggtacccgtcgagcatggcatggagttttgcccgatagaccttgcgggcgtgggtcgggtgcgggcacgtgggtctcgggccgggcatggattcgctctgcccgtgtccgacccggcccgttgccatccctaa

SEQ ID NO: 41229 - DNA, 381 bp, Oryza sativa
  Clone ID: PAT_MRT4530_44595C.1
atgggcggggtggttctgtccgacgtggaggcgagcatgatggagcaggggaaagcggcggtggcggcgatgacgaagacgacgacccagccatcgcaacatgtgagagccatgccgggcgatccgaccgtcgacgagcgtgagaggttcgaagctatggatgtcatcttcaagctagtattgacgctatttgttacaggtgtatcgtttgggggcgcggtcgctctcattgtggtggctttcctaaatgcggacgagaggtttcgtgggacaaagcttttagaacgaaagagaggagcgccctcctcaggtccgtctattgatgaccatgagcgagcttggcaatcgcacagggccctcaaattgcagcacgagcaactg

SEQ ID NO: 41230 - DNA, 353 bp, Oryza sativa
  Clone ID: PAT_MRT4530_44596C.1
aagcttggcaaggaaagtcaagtcaaattcctaggacagaaagggaaacttttgtttcggcaagatgggtgacacgagaaagacatcttgggggcatcaaaattttatgaaccaaggtttcaaaaccctgaatatctccccatatacattttaagggggtgggaaaaccttttttcctgcaccactttttgaccctgccggaatgacctttagcacattgaaccccacgggttttgacaggggcccgcactggccaatgatccccggatttcctttcttaacacggaagcacggggaaatgggggccggaattttggggggcctttttttgcacctttgggcctttttggcca

SEQ ID NO: 41231 - DNA, 505 bp, Oryza sativa
  Clone ID: PAT_MRT4530_44597C.1
tttggcgacccgttccgcttgagaggttacccataaaagggttggccaccgggaaggcccccgggtggaaaaaaattgaaaataattgtttttgccttaatccttgaaaaaaggaaagccctggcccttatttggaaccttaaattaattttcctgttccttttaaggaaatggaaaaagttatggccataatggaaagcccccaaaattcttaccttggttccggaatttccaaaaaaaggaaggggccaattaagttccggtaattgcggttgggtttttaaaaaggggaacctgcccttggaacccccgaggaatttccctccaaattcctaaaaaaattaaggaaccaaagccaaagtgccgtggaccgaagatctgttgcttttgctgatccaatagatagaaatgacgtgttcagttatagggataggatccatctggctctctctctattttctttgatgcacctttagagagaaagaacagtcgaagtagaaaaaaa

SEQ ID NO: 41232 - DNA, 232 bp, Oryza sativa
  Clone ID: PAT_MRT4530_44598C.1
caaaaatcaaaactcacatataaatgcaattatttttagacaagctccttctttctgacaacgggcggggcggactctcccacggggtggcagcgccagtaaggctaccgtgacgtacaccagcactgacgactggggaacgacgtgtgcatgaacccctgcccgacaagccggaactacataaggcggaggtgcgcggccagcaggggccgcatggactcacataagcagt

SEQ ID NO: 41233 - DNA, 442 bp, Oryza sativa
  Clone ID: PAT_MRT4530_44599C.1
ggaagggaaataaaactgttttattacttgttccattaaaaccatcacactcgggtccggggggaacccgggaaagttaaaaaccaaagcaagggaaattaaacggatttattacttgttccattaaaaccatcacactcgggtccggggggaacccgggaaagttaaaaaccaaaacccgtggttgtagaggggggccccgctcgctgttccatgaggggggcccgaaaaacccgccccacgagcagggcttccagcccacacccagaagggaaacggtggggatgcccccccccccgccggccaatcccccgcccggcgatgatgcgttttctccgtcgctcaggggccccccgaggcggaccggcctgcggcccggcccggcccaaaggggatgagtagttgccccgggccaaatatatatggatggacggcccccccc

SEQ ID NO: 41234 - DNA, 1677 bp, Oryza sativa
  Clone ID: PAT_MRT4530_4459C.1
atggcggagacgaggcggtgggagctggcggctcaccggaggctggagaaggggaaggtggtgggcgtggtggtgctggacggctggggcgaggcggcgccggataccttcaactgcatccacgtcgccgacaccccaaccctcgacgccctcaagaagggtggtccggagaggtggagggtgatcaaggctcacgggacggcggtggggctgcctacggacgacgacatgggcaacagtgaggttggccacaacgcgcttggagcaggccagatatatgcccagggtgcaaaactggtagatatggcgctagcctctggaaagatatacgagggggaaggttttaagtacatccaacagtccttcgagaacggtactttgcacctcattggcttgctcagcgatggaggagtacattcaaggattgatcagctgcagctgcttctaaaaggagccagtgagcatggagcgaaaaggatacgggttcatatacttacagatggccgtgatgtgttggacggtagcagtgtcaagtttgtggaattgattgagaatgaccttgctaaattacgggataagggtgtggatgcaagaattgcatctggtggtggcaggatgtatgtcacgatggaccgttatgagaatgactggcaagttgtgaagcgtggttgggatgcacaggttctcggtgaagcgccacataagtttcaaaacgcccttgaagctgtgaagaagctcagggaggatccaaaggccaatgaccagtatttaccgccatttgttatagttgacgaaagaggaagaccgattggccctataatggatggggatgctgttgtgacatttaatttcagagcagaccggatggtcatgcttgcaaaggcactagaatacgagagttttgacaaatttgatcgtgtcaggttccccaagattcgctatgccggtatgcttcagtacgacggtgagctaaaacttccgagccattttcttgttgctcccccagagatagagagaacgtctggcgaatacttagcgcgcaatggcatacgcacatatgcttgcagtgagacagtcaaatttggtcacgtcacttttttctggaatggaaaccggtctggctacttccacccaaacctggaaaaatacgaagaaattccaagtgacattggtatccccttcaatgaacagccaaaaatgaaggccgtggaaattgcgaagaagacaagggatgccatcctgagtcgcaaatttgatcaggtaagggtaaacatcgcaaatggagatatggttggtcacacaggcgacattgaagctactatcgttgggtgcaaggcagctgatgaagctgttaagattgttctcgatgcgatagaacaagtaggtggcattttcgtggtcaccgcagaccatggcaatgcggaggacatggtgaaaagagataaatctggcaaaccgcttcgcgacaaggatggaaatgtccagcccctcacctcacacactttgaatccagttcccatcgccattggaggccctgggcttcaaccaggggtaagatttcggtcagatctccccagtgccggccttgccaacgttgcggcaacagtcatgaatcttcatggcttcgaggccccagatcactatgagcctacgctgatcgaagttgtcgacaaatga

SEQ ID NO: 41235 - DNA, 1595 bp, Oryza sativa
  Clone ID: PAT_MRT4530_445C.1
atgtcgtcgtcggtgtcctccgtgcgcctcccgctgcgggcggctcctcccctctacggccgccgcgagtggagggccgatggggcccgggcgccgtctcccgcgctcgtcgccgtgaagccgctgtcgtgcagggcgcccgcgtcgtaccgctccgcgctgctcctccaccgccgccgccggtacgcgctgcccccggttcccgccacccccacctccaagcccgtccgccttctcgccaccgatcaatccgcccccgtggcgcgccgcccatgtcgtcgtcggtgtcctccgtgcgcctcccgctgcgggcggctcctcccctctacggccgccgcgagtggagggccgatggggcccgggcgccgtctcttcgccgtcccatggctcgggatgctcaccgggctgctcgggaacctgtcgctgctgtcctatttcgctaagaagaaggagacgggggcggtcatcgtgcagaccttgggcgtcatctccacctatgtagtcattgcccagctcgccatggcagagtccatgccattgccacagttcgtggccacttcagccgttgtggccgctgggctgctcctgaacttcctcaattactttgggtggctcccgggaacactctggctgctgtgggaggatttcatcacaataggtggccttgcagtgcttcctcaggttatgtggtcaacatttgtccccttcatccccaatagcttactgcctggcataatctctggttctttggctgccacagctgtcgtaatggcaagaatgggaaagctttctaagggagggattaactttgttggatcattatctggctggacggccacacttctcttcatgtggatgccagttgcgcagatgtggacaaattacctcaacccaagtaacatcaaagggttgtcagctttcactatgttgcttgcaatgattggaaatggacttatgattcctcgtgctgtatttatcagagatctcatgtggttcactggttctgcctgggcatctttcctacagggttggggtaacttggcctgcatgtactggatttactctctggagagataccattgcccatggcaacagctcacccgtgacttctttgaaggaacttcttttcggaaagtgaatagaactccattatgtccatattcagcagcaaactgctgccaggcaggaagctctcctacaataattaatggtgaccggcaagaacctgttcgacattggcattattgaggtgaagcactctggtcgacaacctattgtcgtggtgaaactggaacctcccagcttgctgcttgcagaaagtggcatgtgctcctacagaaattaccaggtggccagcttgtgcatctggcagagaagggtacagtgtgtagcttttcttcttttttttttttgtaagaaagaactttatgtttctcctcttgaataagactgtcaggtcatgctggtatgggaaaatgcaaaccactggccattgggtcattggtgatgtccagcagcttcagccgattcgattcctggtgatttatgctttcttgattattttttatggtgcaatgttgaactgttggtctttg

SEQ ID NO: 41236 - DNA, 494 bp, Oryza sativa
  unsure (1)..(494): unsure at all n locations
  Clone ID: PAT_MRT4530_44600C.1
cagccatatgcacgcgtgcgcacgctcggaacctttaaaccggtcgagctttcgtcctttttttaggatcaagaatacattcgccatcggttgaaacagtcaccatgggctgttacaaaagcttgccagcgaccgtcccgctattacatctccacctccgtaggaacacacatattctgaacaccaagctcgcttattatcattcgaattgagaggataaacccccttnnnggcagaaaaaaattacataaagggtgaaagacccgatntttaaacaatcaccatctgcgtaccatgtaggattattaaacccctaaaccgttaccgattcaccgcagnnatgattcccctcaacgaagtattggttgaaatccaccaaattcccatccctttagcgaacccttctacttgaaccttttcggtgtcgggaattctgaataaacgaaatgcagaaccgcagccagcagcaacctttgcaggaaaacctgaaaaac

SEQ ID NO: 41237 - DNA, 375 bp, Oryza sativa
  Clone ID: PAT_MRT4530_44601C.1
atggcggcgcgaggtggagttggttgtggtggcacggagagaggcctaccatggcaacgacgcgagaagttggacgtgctaggggcgcactggcgaggcgtgaagggaggaggccagctgtggggtgggggtgaggggaggggccgtggccgcgggcgccgccgcgcctccttcttcggcgagacccgccaccgtcgggactcctcctccggcgagaagggcaccgacacgtgggcgcggcgggtggcaccacggcagccggggcggggacagggggatcgaaggcggcgcgactcaccggcggaggaggcgctgaggcgcagatccgcctcctcctcctcgctgctcgacgcccgccggcggttgcccggctag

SEQ ID NO: 41238 - DNA, 851 bp, Oryza sativa
  Clone ID: PAT_MRT4530_44602C.1
aaaaatatggtttattgcgtcagccgaggggagggggcgcgcgggccgtgtccacgggagtggtgggccccacgcggcagcccctcggtccacggtggaccgggtgcacccgagggctcaccagccggcgccgtgggctccacgcgttagccacacccgagggcatgggcggctgacggccgggccccacgcaatggccacacgttatgcccggaggcggccacgtcggcacggccggcgggaggcgtcgcccgcgcccctatggtcgccggcggcggctataggcgcggcgaagcagcggccgagagaggggacgggaagggggaaagaggcgggggtccacggctcacctcggggcgacgccggcgacggaggaggcgaccagagtggagaaaggcggtggtgcggctcgggtcgatggggtcggcggcgttccggcggtcggcgactgaaacggaggggtggacgaggtcggcgaggacgcggcgatgccggaggagacgacgctgaggcgggggacggtcccggcgagcggctaggcccggccggaggtcgacggcaacggcggagagagaggacgacggtgcgggtgtgaatccgacgagggaggggggcggcgggatttgcggcggcggcggcgctaggcgcgggcagagcggcgggagcagcgggaggagggggatgataggtgggccccacccgtcagcgagggtggcgggcgggcccgctcgtcagcagtgtgcacgcggggagggaggggaggccgagtgggccgcggggagaggagagagaaggggagggagctgggccaaatttggcccaagagagagaggagagggttttaggatttt

SEQ ID NO: 41239 - DNA, 480 bp, Oryza sativa
  Clone ID: PAT_MRT4530_44603C.1
cattggcaagctcatctcgttgacggacgggaagatcaggacggcgatcgacacaggttgcggggttgctagctggggtgcttacttgctgaagaggaacatccttgcaatgtcgtttgcaccgagggacacccatgaagctcaggtgcaattcgcgctggagcggggtgtgccggccatcatcggcgtgatgggaaagcaacggctgccttacccatctaggtcatttgatatggcacattgttcacgctgcttgattccttggcatgagtttgatggaatatacctagctgaagtcgacagaattctaaaggcccggggatactggattctctcgggtcctccgatcaattggaagacacactacaaggggtgggagaggactaaggaagacctcaaggaagagcaagacaatattgaggatgtcgcgaggagcctttgctggaacaaggtgtgtgagaagggggatctcttcatctg

SEQ ID NO: 41240 - DNA, 903 bp, Oryza sativa
  Clone ID: PAT_MRT4530_44604C.1
atgagggagctgtcgtgcttcggcgacagctcggtcggcatcgccgccgccgcggccggtgactccggcggcggcggcggcggcgcgctggatcgctcgctggaggcggcgaccacgacggtgtacggtgcgtcgctgcactccgggaaggagctcctcatccgggtcacgtggacgcggagcgccgccggagccaccggcctcgccgtcgccttcgacgacgcgctctcgccgtcgtcgaggtgcgcccaccacgtgctgcacaagaagcgcgggagccggtccctcgccaccgccgccggcacggccgtgggcgtccactgggacaccgccgaggccacgtacgcgtcgggttcgtcccccgagcccaccggcgactactacctcgccgtcgtcgccgacgccgagctcgcgctgctcctcggcgagggcggcgcggcgcgggacctctcccgccggttcggcgacgacggcggtggcgccgtcgtcctcagccggcgagagcagctgcgcggcgcggcgacggcgcacaccacgcggtgcaggttccgggagggcggggcggagcacgaggtggcggtgcacgcgacccgcggcggcggcggcggcggtgagggggaggtgcgggtcagcatcgacgggaagagggtggctgaggtgaggagggtggggtgggggttccgcggcaaccgcgccgccgtgctcgccgacggcgaggtggtggacgtgatgtgggacgtgcacgactggtggttcggccgtggcggcggcggcggcggagctggagctggcgcgcagttcatggtgagggcgagggcggagaaggaggggaggctgtggatggccgaccagccgccggcgaggggtggcttcttcctgcacgtgcaatgctaccgccggtga

SEQ ID NO: 41241 - DNA, 465 bp, Oryza sativa
  Clone ID: PAT_MRT4530_44605C.1
gtccttgtggcggtcaagacatactggactgctgatgaatcagagcagcactagcacactgcacacagcacagaacacagacactaaactttggagctttcctcaagaagtctgaacccccgattgttttcagagctgtgatgatggcatcggagttttgccatttcggtgtaacataacagaagatatcatctggtcactcgttttcttcctcctttcgctaattctttctatatcaaaggaaaagttatggatggtttttggggtgagattgggcatggttggatgatacatgagtttgttagcaaggggaagaaatgcaaatcttgcataggttcctgccccagtttcacgcatggagcagacagcagaggataggttttttagcttgtaatatgatggcgtccaagtatccaacagacactgttagtctatattgaggttaactaagataggtatttatcg

SEQ ID NO: 41242 - DNA, 2907 bp, Oryza sativa
  Clone ID: PAT_MRT4530_44606C.1
gggcggggctggcggcatatggccccctttcacacgcacatcctcctctcctttatttaggaaaggggggtagggttagctgggattaggaagcaagctgctgctgtaatgtgacacggtgtttcgcatcaaaccacttgagtccactggcccaatggctgcctcactcactcaccaattcaccattgctagtgcaagagctcgcataaataggcagagctgctgctcctctcctctccctctcagcctctggaggaggaagagaagaggaggggtctctgcttcatctttcttcctgagctggcttctttactacagcagccatggctaaagagtatcctgcctcccccaaagctcagcagctgcaagaatccaagaagcagcggctcacctacatcctcgtggtgagcgcgctctgcgtcgccttctacgtcctcggtgcgtggcagaacaccacagtgcccaagccggcggcgagctcggcgatcaccaaggttggctgcgacccggcggcggcggggcagtcctccgccgtgccgtcgttcgggtcggcctcgcaggagtcactcgacttcgaggcgcaccaccagctcagcctcgacgacacgggcgccgaggcggcggtgcagccgttcccggcgtgcccgctcaacttcagcgagtacacgccgtgcgaagacaggaagcgcggccggcggttcgagcgcgcgatgctggtgtaccgggagcggcattgccccggcaaggacgaggagatccggtgcctcatcccggcaccgcccaagtacaggacgccgttcaagtggccgcagagcagggacttcgcctggttcaacaacatcccccacaaggagctcagcatcgagaaggccgtgcagaactggatccaggtggacggccagaggttccggttccccggtggcggcaccatgttcccgcgaggcgccgacgcctacattgacgacattggcaagctcatctcgttgacggacgggaagatcaggacggcgatcgacacaggttgcggggtaaggggagaagatcagaagaaacatctagcttcaggtttcttgatgtcgtggcaatgtgctcatgcttttgcatcttctttgcaggttgctagctggggtgcttacttgctgaagaggaacatccttgcaatgtcgtttgcaccgagggacacccatgaagctcaggtgcaattcgcgctggagcggggtgtgccggccatcatcggcgtgatgggaaagcaacggctgccttacccatctaggtcatttgatatggcacattgttcacgctgcttgattccttggcatgagtttggtgagcacttcaatacatttgaattggtttcaatgtatcttgccccaagttttcaagctatccttaggtccaaatattgttcactaattgagttggatgttctgaattttttgttagatggaatatacctagctgaagtcgacagaattctaaggcccgggggatactggattctctcgggtcctccgatcaattggaagacacactacaaggggtgggagaggactaaggaagacctcaaggaagagcaagacaatattgaggatgtcgcgaggagcctttgctggaacaaggtggttgagaagggggatctctccatctggcaaaagcctaagaaccaccttgaatgtgccaacatcaagaagaagtataagacaccccatatatgcaagagtgacaatcctgatgctgcctggtacaagcagatggaagcatgtgttactccattgcctgaagtaagcaaccagggtgagatcgcaggtggagctttggagagatggccacagagggcattcgcggtccctccaagggtgaagaggggtatgattccagggatagatgcgagtaaatttgaggaggacaagaagttgtgggaaaagagggtggcgtactacaagcgcaccctacccatagccgatgggagatacagaaatgtcatggacatgaacgcaaacttgggcggatttgctgcttctttagtgaagtaccctgtgtgggtgatgaacgtcgttcccgtaaattcagaccgggacacgcttggagcaatttatgagcgaggattcattggcacgtaccaggactggtgtgaagctttctcgacgtatcccagaacctacgacctgttgcatgctgacaatttgtttagcatctatcaggacaggtgtgacataaccaacatcctcttggagatggacaggatcctgaggcccgagggcacggcgatcatccgcgacacggtcgacgtcctcaccaaggtccaggcgatagcgaagcggatgcggtgggagagccgcatcttggaccatgaggacgggcccttcaacccggagaaggtccttgtggcggtcaagacatactggactgctgatgaatcagagcagcactagcacactgcacacagcacagaacacaggctcggctacctctctgaagactgaagaagtctgaacccccgattgttttcagagctgtgatgatggcatcggagttttgccatttcggtgtaacataacagaagatatcatctggtcacttgttttcttcctcctttcgctaattctttctatatcaaaggaaaagttatggaaaaaaaaaaaaaaaagattgggcatggttggatgatacatgagtttgttagcaaggggaagaaatgcaaatcttgcataggttcctgccccagtttcacgcatggagcagacagcagaggataggttttttagcttgtaatatgatggcgtccaagtatccaacagacactgttagtctatattgaggttaactaagataggtatttatctagtttatctgtgttagctcttggaattatcagtttattagttaattaagttcttgatgctcctt

SEQ ID NO: 41243 - DNA, 950 bp, Oryza sativa
  Clone ID: PAT_MRT4530_44607C.1
ggcacgagggttaccatccccctctccggcggccgtctccccatctccgggcctccggcggcgatcttgcggtgctaggtaattcctccggatcttcctcttcttcttcggattcgcaaggtccaagggtttctccgtcgtccatccaatccaggtgcgcgctcgggtttccgtgaactcctcggattgctgtgcctgcgttgtcggagtcggagtcggagtcggattcggagatggcgaggaggccagcctagcctatatagcatccgacgatttcgtggtgcccgcgttgtggtttgaatcacttctgtggaatggggagaagtgctcccccttcagctccggctgccgcggcggcgccggcgagaggcggacggaagcgcaagcgccacctggtgaccacttctccggcggcgcaggtaggcggctgggcgtctctccccaccgacctaacccgcctcgtcgccggccgggtgctcgccggcgacgtggtggactacattgcattccgagccgtctgctccggctggcgcgcgtgcgcgccctcgccgcgcgaccccaccctgcggaagcacctgctccgcccgcgcgcgtgggtcgcgctgtgcgacggcgacgccgcccgccccgacgacgcctgcgagatcaccttcttccacacccgcacggccaggagcctccgtgtccgcctcccggagctccgttgccacaggatcgtgggcttcaccgacggcctcatcatcctcctccacaagcgcaccaccgccgtccgcgtgctcaaccccttcaccggcgtcgccgtcgacctcccgcccctcgcccccgtgttccaccaggtggtcaagaaccgcaactccctgctctacatgctgcaccagcgccacgtctccgatgacccccattgccgtcatcgtctggttcccttacacggctggagtgctcggctgtga

SEQ ID NO: 41244 - DNA, 695 bp, Oryza sativa
  Clone ID: PAT_MRT4530_44608C.1
gcacgaggcaaaatctctttcgtgtcacctcaccttgcaccacctgctccgccgccgccgccgccgtcctcgatccatccatggccgccgcgagcttcgacggcgccggcggggcgctcggcgtgcacgcggcgtcgcgcaagatcgggaaatcggcggcgcatcagcagcagcggaagccggtgatcatttacatggtgtcgcccaagatcatccacgtcgaggcccacgagttcatgtcgctggtgcagcggctcaccggcccgggggcggcggccgcgggcgacggcggcaagaaggcggcgtcgtcgtcgccgagggaggcgcgcaggggggcgccgccggtgcgcgtcaaggcgcgggccctgaaccggcccgccggcggctcggccgtgtccgtgtcggtgacggcgacgatgcggcagcagcagcagctcgcctctccgtcgtcggcggcggcggccgggccgtcgccgtcgccgtcgacggggttcctgttcaacgacctcagcccgctccgcggcgccgcgctcaagggcgaggccgccgccgccgcgccgctcgtctcccccggcgccggctggcttcagcacgtcggcgaccacttcttcagccccgtcggcgcgccgggggcgctcggctcgccgtccgccttcctcgacatcttcgggccgctgccgtcgcagcaccaataa

SEQ ID NO: 41245 - DNA, 201 bp, Oryza sativa
  Clone ID: PAT_MRT4530_44609C.1
atggagaagcaggtcacccggatgagttcatcggtgtcagtggagaaaacggttgcaggagttgttgttgggcacgtgcagacgaagaacccctcttacaaggggctgtttctttggggcttggacttcatcaagacattcttccatgatcttgagttgcctttgcccaacatcgacagccttggttccgttctccattga

SEQ ID NO: 41246 - DNA, 770 bp, Oryza sativa
  Clone ID: PAT_MRT4530_4460C.1
ggctgacgtcatcaaaggaggggggcgccgacaggtgggccccgcacgtcagcggcttgagagagagagggaggagcgccggcatgcgggccccacgggcagcggcacaaggtggaagggacgcggctggcggctcggcacagctcaagccggccggccatggtgcggtggcggcggcgcgcggccaccagcggattgcgaggcagcggcgatcggcacgaaggcgacggcgcacggccggagcggcggctcggccaacggcggcggcgcacgtgggaagggagagaaaaggagggggagggagtcctcaccggaggaagcggtggcggccggcgcgggaaaacgaggttggcggcgacgaccggcgatgccgaggtacggacaggcggcggcgacacgctaggagaagacggagaggagtcaggagaggggacgacgaccacggcagcttaaaacgccggccgaaaatggggaggacggcgcgactcaccggcgtgcgaggagataggcgctccggtggaatgccggcaacgcgaggcggaagccgggaaagctcttgcggcggcgaagctaacggcggcggccctagcagcgacggcgcgcggccggagatgggcggcggcggcggagctcggcgagcgcggcgcggcggcggtagagggcgcggatggaagcggcgagggcggaaaacgaggaggggtctcgggggagcgatttatgggcgcgggaggggcagaaacggccagggagggcccctattgcgccggtga

SEQ ID NO: 41247 - DNA, 331 bp, Oryza sativa
  unsure (1)..(331): unsure at all n locations
  Clone ID: PAT_MRT4530_44610C.1
agcaacagtgttgccaacagctcaggctggtagcgcaacaatctnactgcgaggccattagttncgggcaagccattgtgcagccactactactgcagatggttcgcggtagccacttggaccagaatcgagagcgagctcaagctctgatggcccttaaacttgccatccatatgtggtatctatcctaactactacattggtcggaggagcatgcccaccagtgggtaggggcctgaacctggactggtaatagtataatggttcanatgttaaaaataaagtcatgcatcatcatgcgtgacagttgaaacttgatgtcgtataaatc

SEQ ID NO: 41248 - DNA, 373 bp, Oryza sativa
  Clone ID: PAT_MRT4530_44611C.1
tttgtgttttttttttttttttttttttttttttttttttttttttttttttttttttttttttttttttttttttttttttttttttttttttttttttttttttttttttttttttattaaaaattttaaaaattagtgaaatattaaaaaaaaaaaaaaaaggcccaaaaaattttaaaaaaaatacaggcattttaaatttgaaaaaaaaacaacacaatatgttctttgtgtgaaaaaaagtatataacagaaaaatgttgcaaaaagccgggacataaggtaaaagaaatgggctattatcaaaacaaaacacgtaggtgattgcagcaatgcccacgtcggcttccgagtagagcaatagatagcc

SEQ ID NO: 41249 - DNA, 2840 bp, Oryza sativa
  Clone ID: PAT_MRT4530_44612C.1
agagcagaagacacaactttcacaatgtaatcattttgatgattacatttctctttgcctctcaattcctgatgcaaggcactttccataattcttacaatttcccttacaattttgccataccacaggatcacataaagaaaatttgtttggcaaagagaactcgatgcttatgtttctagatgcagacaatgacatatgtttcacatccattcccatttttacctattctacatttctttttgccatccatcctaacatcctatgctaacatcaaggatagacaagcctcttagattcagaaggggagctgatattttgctgtttctgggctcctgccacccattctttgagccaatccaaacaccgaatccaagtgtctgcactcatcaaccatgtcctatgcataattttgccgccaaatgtactcctgagtcttatttctcaatgacatgtgttgttaattctggagttaggtcctacagaagactggtggcaactggcaaccttagctgcctcctaatcacttcctctattgattctgcaatttccagttgcttcatcacggtagcttgcagcaccttctttgtgcgttcgagatcagattcgatacattttatcctatcccaagattccaagagggagcgctctttctccaagggaatctctggtggcttgttgccaagctcatcgaccttaccctcgagcctctgaagccgctcgatgacaggactgatgcggtctacactgaaagtctccactgctggatgatcatcagaagttggttcaggctcagctggaggcaatggattgtcaacccgcatctcctgctgaccatatgctatgtggaagaaggcaaaaacttttataatcaaggccagcagtaatctgaagaaacggcggaaaaatccttcatccgtgttctctttaggtacgactgttcggcttctgttgctcgaggaaataccgcctctgttgcttgaggaacccgttgcatatgatgttgtgctacctccaaaaggccgagcttgagctcttacttctggggcactagttttatcaggcatcgctcctcctctaccatagtcaacagttttgtctaccacaacaaagtgatcatcgcagctgtagtaagctgcagagtctcgtgctctgatctgcatttcttcacgaactggagctaatcgactacattccactggccttctcatcattggagaactgagatcatcaacatctgaacccgactccactgttgatgtgtcactgcttctacccttcaaaagatgtagcctagcaaatgaaccccttcgttgctcaatctcagacaagcgccgagtatgtctagtaaattttgcctccttattatgtgcaagcttcataatgttaggatcattccatgggcctttgttagacttgaggcatcctccctcagcagcacaagtgcatgctccacccaaaaattcaggaagttggcttgcatctatcacttcaaggagttttccatgaaattttgttcccaaaacatgtatctttgatgcagttttgggatcaaggaagcctttcactgtattccagagtagtttgaaaccattaccagcattcacaacaaacatctcaggataatagtcactgtcaatcttctgcattctacccagcatgtccctggctgttttgctgaagttcttgagacccacaccatcgacatcaagtatggtcgtagtagaatcaatatgccttttcgctgcaatagagcatgctggaaacttttcatggaatgctctctcaaactcttgtacatgatacttcatatagcggtcaactgtagtaatgtgcatcagtttatttggttcaacttttcctagtctctctatgtataccggtcttccctgcctgtcaactccatggtaaccctgaggataatagacaaggacctcgtctagctcttcaaaattgaagtcctctagtattgtgtctgcgccgaattctttcctccactggagcatctcagcccacatttgaatggctttctcagtgtcaaatttcctagccttcaaaaacctcagcaacatgtggtaatcgttatgcttgtcaggcagcaagttcctgctaaaaagctcctgctggaaggaaaagacagcacgctcctcttcttcatccctgacatcttcgattgtgaatgagggccgattctccacctttctcttccccctcttcttgagtgaatgtgttagcttgtttgatgcattcagtgccttcttcttgagtgacccaatggatagccttctccgctcgtcctccgagttctccacatctgaccttcgatctttcctctcgtcaaacgagaacaggccctccatactctctgatcggcgccgaactgacattttgatggaaagagcaggagacctaatttgcaggctgtttgatacctccaatgtgcatatttctatgctgaaaacgactgctgctgctaccgcctcaaaacttgacataaaaatttgcaggggaaaaaccgcaaagaaagagacttgatccactaatcggaagttgtgatttttccataaagaaattctctgaagattgaaccgattgaacaattttcgcctcactggcgtgaagaacgggccaaatttatactgactctgaaagcgaatattcacgtcacctcggaaggagccgcatccctgtaggggtgcgcgaatgctgctggaggtccacgcgcccttctcagaggcatcgcatttttgctcggaggaatcgaccaggatgcgtgttgggtagctgtgtcgccccatgccgtcgctccagctcgccatcaactcgagctcccgcgccat

SEQ ID NO: 41250 - DNA, 2329 bp, Oryza sativa
  Clone ID: PAT_MRT4530_44613C.1
aaggtgaaggaaaaatccgggtatccttacgaatggcagtacagaaatgtgcatgtgaaaaatactttctatcttcgtttatctttcgagaaaagaaagggcgcaatttgagttggaattggaggggattacattggactgaagctcgtatgcacagttgatcaaacactcaccattatctctcggagcaaagaatcttgacagcctaaaaaagactctgtacagcaagaaggggggaaaaattatgtttctgaacttatcctacgaggcaagttgtgattggttttcacgaagccatcatggcagggggcaccacggtggcaacggggcaaccgccgcctcgctccccgtcggcggcggaggcggctgcccaccgccggcatatccggccgagcgaggcggccttccgccgggcgcgctccgtgccgatgctcatcagctcccagatcgcccattccacgccgggcacggccatgacctgggtcaccgccggcgcgcccaggcgccggcagagcagcacgagcgccgccgtggcgttctccctggcccagtccgtgccgcgcctcatttccgccacgagacgcgccacggcgccgtcgatgttgacgatcgcctccgcaccgccgcgcttggccagcgcggcgagcaccgccgcggcggtctcctccttgctaatcgctgacagcgccacctcggcgacgcctgcgtcaacgagcttgccgacgttctccctctcgccggccagcgtcagcagcgcggccaatgcgtccttctttgtgctcgtcgggccggtgcgcacgagatgcactaatttctccacgacggattggttcctgccgagcctgcggcggtaggaatgcacggacgccaagctgagcacggcggcggcggcgttctccttggcgcgccacgtcgcgccggagctcatgatatgggcgaccgcctcgacggcgccgtcggcgtgcatgatgcgcttcttgttggcctcgaggatggagagattaagcagcgccgtgacggcgttgagctggagccctgcatcctcggagtagagcaggggcacgagcagaggcacggctccggcctctccgacgaacgctcggttctccgagccggacttggatagcagccggatctcgtgcacgacgcggttggcggcatctggggagaaggagacggacagcttcttcacaaggaacgacgccgtcatgcgcgccgcctcgagcgcggccttgttggcggccaccgcctgggcctgctcgctcttgctcgcctcgcaggcttccatggcgacgccgttctcccggcaccacttggagatgaggttcttgagggccttgttcgacacgagctccagattggccaagacctgccctgtcttggggcacgttgacttgccggagctgaaccaccggtcgatcgactcgcgatcgtacgtctggccgctcgcgacgacgacggggtcgcgcattagatcgagagagattgggcaccggaagtccgacggcggcaccgggggctcgccgtcttcagcctcgacgtcagccttggaattggaatctgaaggccgaggcgtggcgctgaacaggacgcacttggcataccggaggaggccgacgagagcgatcatggaggccgtccatttctccgaggcacggtcgccgatctcctgctccaggctctcgatctcctcgctgcagctcgccgggtcgttgatgccgacctccaccaggatctcctccagcctctcccgctccggcacgatctcccgctcgatctcttgtatcagcgacagcacgctcgccttcagcgcctcctccgactccggtgccggcgagcaccgccggcactggcgcgacgcgagggcgaggacgtcgagcacgtcgtcggcaagccccagctcgacgaccggcaacaggtcgagcagcgtggccaggtcgtggttgagctcccgcagctccgcctccatctcgtcggactccagcagcagccgcatccggctgcgcgccgagcaatcggcgacgatcgccttgaaccgctgcagcaccaggagcacctcccgcaggcacagcgacgccgaccgcggcagctcccccgcggcgccgcacagcagcaggtcgtcgaacgcggccgccagtagcttggaccgcctcgagatggacgcgaacgcggcgcgcaggaacggcgcgggcgtgtcgacggcggacaggtcgcgcgccaggcggtgcagcggccggagcagctccccgtcggacggcgacgggggcggcaggaacaccgacgaagagccagacgacgacggcgccgccgccgccggattaccagccat

SEQ ID NO: 41251 - DNA, 1202 bp, Oryza sativa
  Clone ID: PAT_MRT4530_44614C.1
tcatttttccctgggcgtcgctggatgccgccgccgctccgctccactccaccggccgctcgagtcgcgatcgtacgtctggccgcttgcgacgacgatggggtcgcgcattagatcgagagagattgggcaccggaaatccgacggcggtgccgggggctcgatttcttgtatcagcgacagcacgctcgcgttcagcgccggcaagaggtcgagcagcgtggccaggtcgtggttgagctcccgcagctccgcctccatctcgtccgactccagcagcagccacatccggcttcgcaccgagcaatcggcgacgatggcgttgaaccgctgcagcaccaggagcacctcccgcaggcatagcgacgccaaccgcggcaactcccggcggcgccgcacagcctcgatatctgcgggctgcggcaactcctcggcggcgccccgcaggtcatccaacgcggccgccagtagcttcgaccgcctcgagatggacgcgaacaaggcgcgcaggaacggcgcgggtgtgtcgacggcggacaggtcgcgtgccaggcggtgcagcgaccggagcagctccccgtcggacgaccgctcgctcgcctgccaccgccgctccgctccgccgcccgcccgctcgctgcagctctcgtccgctgcgcgctcgcggccgccgacgccctcctctcccgtcggcgttctccccgcccgtgtcggctcagcgccaagcgcattggcgctgaggttggccgtctcagcgccaacgggattaggcaaaatggcgcacggtggcacgatatcagcgccagccccgttggcgctgacatggccaaccttagcgccaatgcgcttggcgctgaggtttctcatgcaggggaggtccatgtcggcgatcttgagggccttgggcacgtcgcagcggcgcccggggatgcatttcacctccgcctcccgcttcacctggcacaggcaccagtggttcttcaccaccccgcagcagccttccctgatcccgcgcctcaggcagttggtgaagtaggtcgtctgcgtcgcgcagtcctcctccggctccgccgcgtagttcgccgccgccgccgccgccatcatcaacaccgacatcaccaccacggccatcttcctcctcatggccgactccatggagctacacagatcaagatttcagctacagcttataggcgtttgtg

SEQ ID NO: 41252 - DNA, 306 bp, Oryza sativa
  Clone ID: PAT_MRT4530_44615C.1
atggcgagttgctttagaggcggctttcgcccggaaaagcagcggacgaaggccgccagcggcggcgacgacgacgacaacgacgggggcggacagctgacggccatcctcaacagcctggtacagaaggcatctgacaaatttcttagaggtttcatgggtgtcctcacgatcgcccgcgagtactccaccctgtgcgaaagtctgcagatgctccgacaagcggctgaatccgctggaagaactggtggcgcatctggacgcaaaaatctacggggtggctatgtcacccgcacgcaaaaataa

SEQ ID NO: 41253 - DNA, 873 bp, Oryza sativa
  Clone ID: PAT_MRT4530_44616C.1
atgcgtctccgcgggggccaagcgtctgtgtcgcacgatgacacgtttgcgccgtcgggaggaagtgcgaatcattgccgaggtggtggcgaaggaggtttggaaatcggcagcagtgtcatcccgtgtggaagggagggggaacgaagtgagcaccttagaggttctagagctcctgcacctcaccgattagctgttgtagcaccgccacctccctcatctccctcccgccaccgccacaacgacaccacctcctcgctttgccatttcctccttctcctactggatgccggtcatcgcccctgtccatgtcatccacggcttgcctccccctggcagcgccgtaccaaaaggcacatagctaatcagttccagccatatttcacaacctgggggccaatcaaccgcagagccgagcgccactcgtactggctgcccaatcgcccccaccaagtaccaaaccacctcaacgcaacgaggcgtacgcgcgccggcggcgttcggtctcgcgccgtggtattgccatttgccaatgcccagttgccacacctcctcaggtcgatcggacggacgacgcgagcgcgacagggccaccaccaattcacccacctttcacctcgacgcaccaccgggcgcaagcgcaagcgcaacctggccagtggcagcagccgacacaacgactcgcccccatttggacgcccacgacgaagccacgaccggagccaaagaggggagatgatcccggccggctttgtctgcgaatggcgcactcggttttgcgatcggatcggaccgaccatgcaccagcggaacaacgccgttgacagcgaccggcaacatgggaagcgtcagttggaacacataaaccggcac

SEQ ID NO: 41254 - DNA, 825 bp, Oryza sativa
  Clone ID: PAT_MRT4530_44617C.1
atgaaggcctcggtgaagctccgggaggacggggcggcgccgctgctgcgcgcgaagctccccgtggcgctcttctccgtgcccgccgtcgcctccctcaccgccggcgaccccgccaacctccgcctctccctcgccaccgccgcgccggcgctcccttccatccgcctctcctacgcgcccaaccgcgccacctcgccgctctccctcgccgtcgtccttggctccggccccggcggctccccctcctcctccggcgccgccgcctcggccatcaccatggccgtcgaggtcaacaccgccggcgccgtctccttctcgctcgccctcaagccttcgctgggcgacttcgccgtgcgcaagcggttcgactccgccgccgccggaggcggaggtggctcaggttcttcggcttcggcggcgtcggaggtgacgatgaggagcgccatcccggtgcgcggcggcgcggcggcggtgagcgtcaggtggggcgtgaggattcccgccgaggtgaccgccggcggggaggagggcgcggcggcgctggcgctgcggaggctgccgttcttggttcttggcaaggtaacggtcgagaggcggccaccgccaccgccggcgagcaccgccgaggagacgacgacgacgacggtggagaagacgaggagggagaacgagaggctgacgagggagctggacgagctccgggcagcggcaacggagaagacggagaggaagatgacctcggctgccgctggtcgccggagcagcgggtggaggtcgccggagatggccggagatcggaagaccgttgatttgggccggtga

SEQ ID NO: 41255 - DNA, 360 bp, Oryza sativa
  Clone ID: PAT_MRT4530_44618C.1
atgaatggttcttgggcacccctcatcgtgcagctctgttttaaggatgatgaccagcgccgccgccacgtcgccctagccgtcgccgccgcctcctttcgccgccgtcgggtgcgcacggaggaggagcaccccagccgtcccttcgccgccgtcgccggtcgccagagcgccgccgccgccgccgacccgagccgagtcaccgttggagctcgtcgccggccgccgttcgccgtcgtccgtcatagttttttttgcaccgtttccgacgttctggaggagagcgttttcgttgaggaaggttcggaagcatttgcggaagttcaaggcaagtcacacagatcccaaacaaccctttga

SEQ ID NO: 41256 - DNA, 1130 bp, Oryza sativa
  Clone ID: PAT_MRT4530_44619C.1
atgtgctgtcattcccatcccgatctgaccgggctcctcctcctcgtctcctgctctcttcaccgccgcagaccaggtcagcagttgagcaccatggcaagaaagttgagaggtcaggcggccagcagcggcacccaaaattccaatggactctcaaattccagtctcgagctcccctctgaacaccatttcttggcagcgcgcacaggcatgaacggctttgctccgaccggctaccagcagccgccgccgccgcctgcggccagcgcttcgccgggcggatggatcgcgtcgacggccatcttcatgtccatcttcttctccaccttcctcctcgccatggcggtctccgtctactgctgcctcctgtgcagagaccgcgtccgctcggaccgcgacgacaccggcgccgccgccgagcgcgcgcgtggcggcggtaccgtcgccccgctccccgtcgaggccctccccccggcctacccttatgtagttggaagctccgaggatggtggcgcgacggcggcgagcgggggcggcgggcgggagtgcgcggtgtgcctgggcgcggtgcgggagggggagatggtgcggcggctgccggcgtgcgagcacgtgtaccacgccgactgcatcgaccggtggctcgccgcgcaccggacgtgcccgctgtgccggcgtgagcttgacccgggcaagaatccgcctgatcagttgccgcgtgcccatcctccatcgccggcgacaaggagggcagaggtcgacgaggaggtgggtcgccgccatcgagcccggccaccgaaagtcctcgtcactgagccgcccctcctccttgtcactgagccgcgccgctgccgctcgtcttcctcggcaacgagccatccaccggccccacaagacccaccgtctcgcgagtccgccctccgcgtgcctagccggcggatccgccgtctgcaggccttgccgttgtcggttccgccgtcagcacgcctcgttgccaccggatccgccgcctcgcgagtcaccgaagctccgcccgtcgaccaagccaccgcgcgccacgagcttcatcgtcgtagctcccgaggcccggcaggcggccggatggagagatggagaaaggaaggagaatg

SEQ ID NO: 41257 - DNA, 441 bp, Oryza sativa
  Clone ID: PAT_MRT4530_4461C.1
atgccggcggaacgggatgggcggcggccggagcgggcgacggcggggcggagcggcggcggaggcagagcggggcggagccgaagggcgaagcggggcgggcggctgccgaagcggggtggagcgggggcgagcggatgtcgtcgagccgtcgccatcctcgccgcggcggacaccgtgaacgacgacgtgctcgcgcgcgggtggtcttcaactcgggggtgtccaacccggggaagggaggggggggggagctcctggcgccgtggttggaggacgccgaccgcgcccaacgacgacgagcgcgcggagaaggatgaggcggcggaggctgtggtgttcatcaacggggaggacgatgaggcgacgatctgtccgggttcaggggcctggttcttgatctctcttataggtgacctcaacgacctcaacttgatctga

SEQ ID NO: 41258 - DNA, 479 bp, Oryza sativa
  Clone ID: PAT_MRT4530_44620C.1
acaactcaccacagtgcaccgttcctggatcataatctccccctcaaaaccagaggcaatggactccccagcgacccccaccgacttctcgccgcttcacagtctggcaccctataatgaatcatgctatacaaaaggtaaagctgatgtgaccaccggcgctagaggggtcggccgggctaacggaggacatctacgcgtagaggacgacgacgcgaactcaccggtgcaaaaaaaactatgacggacgacggcgaacggcggccggcgacgagctccaacggtgactcggctcgggtcggcggcggcggcggcgctctggcgaccggcgacggcggcgaagggacggctggggtgctcctcctccgtgcgcacccgacggcggcgaaaggaggcggcggcgacggctagggcgacgtggcggcggcgctacgggcgacggctcgacttgggacaagaggcaaacggaagaggacgac

SEQ ID NO: 41259 - DNA, 3501 bp, Oryza sativa
  Clone ID: PAT_MRT4530_44621C.1
atggcgtcggcggcggcggcggcggcgtccgacgagcccccgcgcaagcgcgcccgaagcgccggcgcggaggaccggctgagcgagctgccggactgcctcctgcacgacatcctcgcgctggtcgggtcccggcaggcagtgcggacgagcgtcctgtcgcggcggtggcggggcctgtggcgctcggcgccgcgcgtcgacatcgaccagcgggagttccgccgcgcgtgcgggggcgaggagggagagccggtggtggactgcgacggcttcgaggacttcgccgacggcatactgtcgccgacgctcctgggcggcaccggcacgccgccgctggacgcgttccggctgcacctgctctacgaggggaggttcatcaccttcgggaggtgggtccgccgcgcgctcacgcgccgccccgcgtcggtcgacatccacgtcgagtacggcggcacggtcgactggccgccggcgctcaccctcggcgacggcgccggcaccggccgcctcaagcggctgcacctcttcggcgtgcacctgggcttcatctccggcgacggggggcggctcgccgagctcctcccggtcctcgaggacctgcgcatggagagctgcacgttcgggcacgagccatcatcacccaccaccaccatcgccatccccacgctcaggagcctcgccctcgccgtcgtgccccgccgcaccgcgaggccctacgcgctgaccgtcgcgtctccccgcgtcgcctccctgcgcctcttcctcccgttcagccgcacgcgcgcggccgcggtgcgcgtcgcccccgcggaggagggcgaggcgctcgcgtcgctcgtcaccgcgtcgatcactgtcctcgagacggaccaagagttgaatcggcgcatgaacaaacacaagctcgacttcctggcatccacccgcaacatgctcgaccgattccccaatgcactgctagacaaggcatcccaagaattcccaacgctccctagcttgacaaccttgcttctcagcgaatgcgatgttggagccaactgctacgtgctgaagagcgtcctccggaacgccccaaacttggagcatcttagattgcaccgttgcaagttcttaggtacgccgaagaggaagcggggaaactccaggtcgaaggggaaatcttcttccacatgccttgactcgctatcttccaagtgcaagagcttgcagtcagtggagatcaagtttcggccaattgataatgctcgtcaccacgaccttgtaggcctcggctacctcgaggccgaccacccggaggcggcccccggtccggcggcgccggaggcgggcgccggcgcgtcccccggcgagatattcgttcccacgccggcccagctcccgcgccaccgcgtcggctccaccctagacccgagctgggccacgggcgatggggagggggccgccgcgtctcgccgcaggaggcgcggcgggagggatagtagcgccgcggcgtcggcgccgccgtccgccgcggagctggcgctgccgagggacgagctgcggcggcttcagggggccgggattcggctgcggaacaggctcaaggtcgggaaggccggggtgacggaggggatcgtgaacgggatacacgagcggtggcgcaacgcggagctcgtgaagatcaggtgcgacgacgtctccgccatgaacatgaagcgcacgcacgagattctcgagagaaaaactggaggcttagtcatttggagatctggaagcaccatcatattatatagaggaactgactataagtatccttacttccatgatagagaaatgaagaatgacatggatgagtcatcagagcatacaagttctgatgacgaggacgcggatcttgctataatagcttccgaacaaagtggcagtgaagaggattctgataatcctgcagaacatggtagcaatcatactgaggagggcgatgatcttactagacggtttggtgttgatgcgcttgagggaaatttagacattggatctgcagagcaaagcattaacagtgctacaaaagatcagcaagcaatattacatacaagcactaatgtgtctcgtcctagcgagatcagtggtcgagctcggtcaaccttagttgctggtgttggttctccaaataagtttcggttacaattacctggggaggtcaaactcgcagaggaagctgacaaattattggatgggttgggtccacggttttctgattggtgggggtatgaccctcttccagtggatgctgatttgttgccagcaattgttcctggataccagaacattgatagtgatctcatttctgagaaactgaagggcttgacaggtgggacccttttatcaagggataatgagtcaattgtattctacagagggaaagatttcctgcccacagctgtctctcttgcaatagaaaagcgtagaaagtatggcaattctacaatcagtaaccctaagcttaattttgacaaaagcacaccgcaaaattcttctaaactgaagatggctactgatgtctcactagatgggcatgaatgctatgaaaagaagcataaagatgaaactgcagtttcagataatagagcagaatctcttaatgtgtttgcccagaatgttgaggccagattatctcaggcaattgcagagaaagagaagactgaaaagcttattgaagagctagaaatgtcgtctgagccttctagagctgaaactagagaggttatctcagaagaggagaggtacatgttgaggaaagttggtttaaagatgaaatcattcttattgctaggaaggagaggagtttttgatggaactgttgaaaatatgcaccttcactggaagtaccgagaacttgtcaaaattatatgtaaagaacacaacattaaagatgttgaatatgctgctcgaactctagaggctgagagtggtggtatattggtggcagtggaaagagtgagcaaagcacatgcaattataatatatcggggaaagaactatcagaggccatcaactctcaggccaaaatctttgttaaataaaaaggatgctttgaagcgttctgtggagtatcagcgttataagtccctgaagcttcatgtgcttaatctttcaaagaatatagactacttgaaggatcagatggttgctgggaggaacaatgtcatcacaggagtcgcaaaagcaataaaaacacacttcaagaagcatcctcttgctattgtgaatatcaagaaccgagcagacggaactccaattcagcagttgatttcagaactagaggaagcaactggatcggttctagtgtcgcgggagcccaacaaagtgattttgtacaggggttggggagcagatgtggcccagaatagcttaagtggaaataatagtacagaacaagttgaaaaggaggtgatatcacctcagctcctggaagccgtcagattagaatgtggattacaccctggtgaatcagagtag

SEQ ID NO: 41260 - DNA, 1188 bp, Oryza sativa
  Clone ID: PAT_MRT4530_44622C.1
atgtctagtgattcacaagtccattctagtcattctgatgagtccatcactagtgagaatttggaagatatgatgtgggaagaaattaatgatcctactgaagctcagctagaagcccggcttgaagctcaacttgagatgaaattgatggcacgcctagctgggaactctaatcagcgtggaggctacacacgcaggacagatgcatttggaaaggtgggtctttcaccatttcaaaaatgcactgctgccatgcgaatgttggcatatggtactccagctgatcttatggatgagacttttggggtagctgaaagcacagcaatggagtgtatgatcaattttgttcaaggtgtgaggcacatatttggtaaacaatatttacgtaggcctaccgaagaggatattcaacgcttacttcagtttggagaggcacatggatttcctggcatgttgggtagtgttgattgcatgcattgggaatggcaaaattgtccggttgcatggaagggacaattcacacgtggtgattatggggtacccactatcatgcttgaagcggttgcctcaaaagacttatggatttggcatgctttttttggtgccgctggttcaaataatgatattaatgtgttagaccaatccccattatttactgatgtcctacaaggaagagcacctcctgttcaatatactctcaatgagtcagattacaacatgggatactatctagctgatggtatctatccagagtgggcaacatttgccaaatcaatcatcagaccacagagcgctaagcataaattgtatgcacaacatcaggaatcagctagaaaagatgtggaaagagcctttggggttctacagaaacgttgggccataatacgtcacccggcaagagtttgggaaagagaagagctagcagatataatgtatagttgtattattttgcccaacatgatagttgaggatgagaaaggttcctatgacataccggatgacaaaacatatgaacaaggtcaattctctgctcagataacaggacttgaccacggaccaatatatggatttgcagaggtactagagaaaaacagggctattcgtgatcgatctacacatcggcgtctcaaggaagatttgatagagcacatctggcagaaatttggaggtcaaccacaacaagattag

SEQ ID NO: 41261 - DNA, 329 bp, Oryza sativa
  Clone ID: PAT_MRT4530_44623C.1
aaccctcaaaaaaaacccaaaattgaaacatacctaaggccttgcttaaacaaaaacaacatggaggggacattgcccgttccattttaacaaacaaaaaaacccccaaaccccatatggccattaatcccaacctaccctaacttggccaagacctttccaaaaacaaattttgacaaaccttaaaacttttccccctcttcggggcttttgaacctggctgcatgggaaaacccctcaataggggccaaaaactttcccagaaggtccttgaagcccttttttttaaccttaggctttgaaattatcacagtttttaaagtcctaac

SEQ ID NO: 41262 - DNA, 122 bp, Oryza sativa
  Clone ID: PAT_MRT4530_44624C.1
atggtcggcaggccccatgcccagcgaggcatgaaaaggcagtcccaccggatccccgcttttgggttccacaatccgacggtcgtcctccttatctctaatggctccctccacctgatact

SEQ ID NO: 41263 - DNA, 3579 bp, Oryza sativa
  Clone ID: PAT_MRT4530_44625C.1
atggctttcatagtttgggcactactactcttccttttacatcttcccacaatagcgaccggatccagtgcccactttggcggtaacaacactgttaggtgccatccaaaccaggctgcagcgctcctccagctaaagcaatctttcttctgggttaattctccggtcatccttccgacatggcaagatggaaccgattgttgtacctgggagggagttggctgcgatgcttcttctcatcttgtcacggtacttgatctcagtgggcggggcatgtacagtgatagttttgaacctgcactcttcagtctcacatccctacaacgcctagaccttagcatgaattccttgggtaccagcagtaccaccaaagatgctgaattcgataggctcacttcgctcacccacctcaacctctccaattcgggcttggatggtcagatacctatgggcatcaacaaactcattaaccttgtgtccttggacctttccaagcgctatgttaacgataacagtgatatctcttttaatgagagtgatgatgagattatctttacaggtgacagttataatcatctgcaggaatccaggttaatgtccctagtagaaaacctaagcaatttgaaagagctctacctcgaccatgtggatatgtctacaaatgtagatgactggtgcaaaacccttgctcaatcagttcctcgtcttcaggtacttagtttagatggttgctctctcaacactcctattcatcactcccttttgaggctccattctctcacagtgataaatcttcagtccaaccctggtatagctgtcaatctatttccagatttcttcatgggtttcgccaatttaactgtgctccgactttctcataataatctcgaagggtggtttcctgacaaattcttccaactgaaaaatctaagaatcctcgatttgtcctttaatatgaatctgttagggcatttgccaaaagttccaacctctttggagacattgagactagaggggaccaacttttcctatgctaaacgaatttcttctagcaatttcaatatgctgaaggagttgggtcttgaagggaaattaatttctaaggattttctcacgtcgtttggtttgatctggtctttatgccatctagaactccttaattcggaattgttaggagattcaggatccaatttgttgtcatggataggggcccacaagaacttgacatgcttgatactatctgagtttgacttctctagcacaaagccttcatccattagtaacttcaagaatttgagaagcttgtggttgtttggctgtaacctcactaggccaataatgtctgcaattggtgatctcgtggacttgcaaagcttggatatgtcaaactgcaatacatacagttcaatgccatcttcaataggcaatctcacaaatttaaaaagcttgtatatcaacagccctgggtttttagggccaatgccggctgcaattggcaacctcaaaagcttgaagagcatggtattctcaaattgtgaatttactgggccaatgccatccacaattggcaatctcactaagttgcagaccttggaaattgcagcttgtcggttttctggaccaataccttattcaattggacaacttaaggaattgagggcgttatttattgaagggtgcaatatgtctggtagaataccaaattcaattgtcaacatgagcaaactgatatatttggggcttccagcaaattatctgagcggcaaaattccagcacggcttttcactcttccagcactactcttcttggatctttttggtaatcatttttctggtcctatacaagagtttgatgctgtgccttcatatctgatgagtttgcagttgaccagcaacgaattgacaggagagtttcccaagtcattctttgaactcactagtttaattgctctagaaatcgacttgaacaacttggcaggctctgtggatctttcatcttttaaaaggttaaaaaagctccgtgatttgaatctttcacacaataacttgtctgtcattatggatgacgaaggcgataactcttcatctacgtatctctctgaacttaaagagctaggacttgcatgttgcaatataactaaatttccaagtattttgactcgtctgagtgacatgtcttatttggacctttcttgcaataaaatcagtgggaacataccaaagtggatatgggagaaatggagcagtagcgtcgtgcatttaaatctctcccacaacatgctcaccagtatggaagttgcttcatatcttctcccttttaataggcactttgaaactttggatcttagttccaatatgcttcaaggacagattcctataccaaacttatcagctgaattcttggattattcacataatgcattctcttctattctgccaaacttcactttatatcttagtaaaacctggtatctcagcatgtccaagaataatataagtggaaatataccacattctatttgcaattcaagcctgctggtacttaacctggcgcataacaactttagtgggccatttccgtcctgcctaatggaacaaacgtacttcagaaacatattaaatttgaggggaaatcactttgaagggatgttacctaccaatgttacaagatgtgctttccagacaatagatttaaatgggaataagattgaaggtcggcttccaagggcactaggtaactgcacatatttggaagtccttgacttgggaaataataaaattgccgacacttttccatcttggctaggaagtctttccaatcttcgtgtccttgtcttgagatcaaaccggttgtacggttctataggttatacgtttgaggacaaatctggagatcacttcccaaacttgcaaatcattgatttggcctcaaacaacttcactggcagtttgcatccgcaatggtttgaaaagtttatatctatgaagaagtacaataatacaggagaaactatcagccatcgtcatagcatatcagatggattttaccaagatactgtcacaatctcatgcaaagggttctctatgacttttgaaaggatcttaactaccttgacagcaatcgacttatctgataatgcattggaaggaagcattcctgagtcggtcggaaaacttgtttcactacatgtgctaaacctgtcacataatgccttcagtggaagaattccaccccagattggcggcataactgctctggagtcactggacctgtcttcgaattggatttcaggggagattcctcaagagcttactaacctgacatttctaaccgtcttgaacctgagcaataaccaattggagggaaagataccagagtcacgtcaatttgcaacatttgaaaacagttcatatgaaggcaacgcaggactttgtggagacccattgcctaaatgtgccagttggagtcctccaagtgctgaaccacatgtagagagctcctctgagcatgtcgatattgtgatgtttctctttgttggcgtgggctttggagttggatttgcagtagctgtccagtga

SEQ ID NO: 41264 - DNA, 466 bp, Oryza sativa
  Clone ID: PAT_MRT4530_44626C.1
atatgaaaacccactgaacattgttcaaccacaactgaacagttctcaaggttgttatacacatccacctccttgtcaactgcaagaaacctacactaaaatgaccatgaattgaatctgccatccctgctatagttgatcagtagaatgaagttatccaatggaagtgagacacacacacatacacacctccattgttctcccccaagtccggtcactactcagcttgcaccggcgtcttcccggcacaggcagactcgtaggcgtcggcgagacccgggacgcacccctcaaaggggacaacaaacttctccaagaacttctcttcagttggcgccaccgcgttgaagaagcaccggtcttgctcgatcagacccctctccttgagaagtttcaccacgagatggcggggcaccagcctcctctcgaggctgtacatgagcagcaccgaccgccgcgcgacgta

SEQ ID NO: 41265 - DNA, 339 bp, Oryza sativa
  Clone ID: PAT_MRT4530_44627C.1
atggcgatgcgcgctccaactgcggcgggtctcaccgggctgcgtgcgtacgccgatatgcctgcccatctcgggatcggttgtttttatgcctctcgccgtggtctcgcggtcggcacgatggtcgcatcgtcgtgcgtgagctgcctatcgacaggtggtgtgccaatgaggagatacgttgatctgtggtttccaaaagtccggaattctcgtgctggactttttcgcgagcacctgcactttgagcatgaggtgcaacggctgatcttcttcgatgatagacaacgaaaatttcaggtgggtatcgtgtacgtccgaatcttgaggcgcatctag

SEQ ID NO: 41266 - DNA, 825 bp, Oryza sativa
  Clone ID: PAT_MRT4530_44628C.1
atgccgacatgcgggacccctgcaccggtgtcccccgccggccagtcttcatgcgccggagaccgcgccacatccaccggtagctcctcctcgcaccgaggtcgcctcctccaccgccggccgcgcctttcgcgccaagccagcctcctccaccggacgcgcctctcgcgccaatctggcctcccttcatcggccgcgcctctcgcgccgagccggcctccgctgtcatcggctgcgccactctatgccaagccggtctccgacccctcctccaaacgatgccaccgcagccgctgctgccgaacgcaccaccgtgccacagcagccgctgacgccgccgatgcgacgagctctgaggcctctgcctctgcaccgacaggcgttgccgctgctgcctcaggccgcagccgcggctgccactggcaccgccaccgttgcccatcaccagccgcgctgccagtcaccgccgtccgcgagcctcgcgccgcagtcgctcgggctgctgccaccagggctggcggcgctgcaggcgtcgctcgcccccggcggtgcgagcaccgccgcccgcgcgcatctcaccgtcgcggcggccgccgctggctgccgtgcaagtcgtcgtcgtcgcgtcgccgcgccgtaaccgtcgccgtcgccgccgcctcgtcgcgccggtgtcgccgctccgcggtctcctccgccaccagcacccactccggccggatctggccaggggatggccaaatccggcgaaggtgacgctggatccgccgtctcctcgccgggatcggtcgccgcctctcccgcgctgagaggggtcaccgccat

SEQ ID NO: 41267 - DNA, 345 bp, Oryza sativa
  Clone ID: PAT_MRT4530_44629C.1
atgggaggctggaggggagaggagaggaggggaagggagagggcgaccggcgacgacgagatccagaggtgcgccgtgcaccctgcgccgcgccaccgtcgtgcgccctatgccgcccaaccgccgtgcgtggatcagcaaggagaggagaggaggcgcgagaagagccagagcaaggtggcaccggggagacgccaacgcaccgccggtggagcaggtatgggtgcgacggagggaaggttgtttgcgacgaggctagactccatgacggcggcggcggcgtctcctgaactaactgtcggtgaaagatttacccacaatttatgccaaatgacatctacttga

SEQ ID NO: 41268 - DNA, 415 bp, Oryza sativa
  Clone ID: PAT_MRT4530_4462C.1
ttgccggcggaacgggatgggtggcggccggagcgggcgatggcggggcggagcggcggcggaggcagagcggggcggagccgaggggcgaagcggggtggagcgggggcgagcggatgtcgtcgagccgtcgccatctcgccgcggcggacgccgtgaacgatgacgtgctcgcgcgggtggtcttcaactcgggggtgtccgacccggggaagggaggaggggggggggctcctggcgccgtggttggaggacgccgaccgcacccaacgacgacgagcgtgcggagaaggattaggcggcggaggctgtggttttcatcaacggggaggacgacgaggcgacgatctgtccgggttcaggggcctggttcttgatctctcttataggtgacctcaacgacctcaacttgatc

SEQ ID NO: 41269 - DNA, 2022 bp, Oryza sativa
  Clone ID: PAT_MRT4530_44630C.1
atggcagtgcagagaacagatgctgcctcttggctccgtgagctggttcttgtttacgccatgtgctggacagtctcactgggttttgttgcgggtcaaaccgggcagttgaatgtcgatgcctcgccgcagaatgcaaggaagatccctgataagatgttcggtatatttttcgaggagatcaaccatgctggggctggtgggttgtgggcagagcttgtaagtaacagaggttttgaggctggtggacctaatacaccttcaaacattgacccatggctgataattgggaacgaatcaagtatcattgttgggactgataggacatcctgttttgagaaaaatccggtggcacttcggatggaagttctttgtgattctaaaggaaccaataactgcccttctggaggtgtaggagtctacaatcctggttattggggcatgaatattgaaagaagaagggtttataaggtgggcctgcacattagatcttcagatgcagtatccttaactgtttccttgacaagctccgatggtctgcagaaactggcctctcacaccataacggctagcaagaaacagtttgctaaatggacaaagatagagtttcatctgaaatctagccaaaccaatactaattcaaggctccagcttacaaccagcaaaagtggggtgatttggctcgaccaggtgtcagttatgccatcggatacctacatgggacacggttttaggaaagatctcgcttctatgttggccaatttaaaacctcaatttcttaagtttccaggtggtaactatgccatgggaaattatctgcgaaatgcatttcgatggagtgaaactgtgggtccatgggaggaaagacccggtcacttcaatgatgcctggggatactggactgatgatggacttggattctttgagttccttcagctagctgaagacctcggtgcttcgccagtatgggtggtcaatgatggtagttcaaatctccatggattattaggagcaagccaaaatgaagaggtatctactgcaacaattgcatcattagtgaaggacgtggttgatggcatcgagtttgccaggggagggcccaagactacatggggttcagttcgtgcagcgatgggtcatccacaaccctttaaccttgactatgtttcaatagggaatcaagaatgctggatgctctattacagaggcaattaccaaaaattctattccgcgattaaagctgcctatccagacatcaacgtcgtgtcaagttgtgataaatccactatttctccgtccaaccctgccgatctatatgatgttcatgtttatacctcatctagtgatatgttttccagaactagtatgtttgacaatacgacgcgcagtggaccgaaggcaattgtaagtgagtacgctgtgactggaaaggatgctggcaaaggaacactggtagaagcactagcagaggcagcatttctcgttggattagaaagaaacagcgacgtggtagagatggcaagctgtgcaccgctctttgtaaatgacaatgatcgcagatggagtccagacgcaattgtgttcaactcatggcagaactatggatgcccaaactactggatgctacatttcttcaaagattcatgcggcgcaacgttccacccatcaaacattcagatttccagctacaaccagctggttgcatctgccatcacttggcagaatagcaaagacaagagcacttacctgaaaataaagctagtgaactttggcaaccaagctgtgaatctcagcatatctgtgtctgggctggatgagggcatcaagagctcagggtcgaagaagaccgtgcttacttccagcgggccgcttgatgagaactcattccagcagccacaaaaggtggcgccagtgtcgagcccggtggacaacgcgaatgagcagatgggcgtgttggtggatccatactccctcacgtcgttcgacctgctgctgcaaccgagcaagcactcgaccatatga

SEQ ID NO: 41270 - DNA, 210 bp, Oryza sativa
  Clone ID: PAT_MRT4530_44631C.1
cacatgtagctgcctttgctctccattcaaaaacatcacatgcatgctcggctctccacataaacatcaatgtcgagaatgccatgaagaatccatgcagattttaatatttttcagctgggaatacagtgaggcaaggaatatactcgacatccaaaaatcttgttggaataaaggtacagtcttcagatcagatgagcatctccacca

SEQ ID NO: 41271 - DNA, 460 bp, Oryza sativa
  unsure (1)..(460): unsure at all n locations
  Clone ID: PAT_MRT4530_44632C.1
agttacgtgcgaaaattgatttgaattcggttagaattcaacacgcctgcactgctgttgtgccattcatcccaccctgcctctgcctctgcctctgctcttcctgcgctgcgcgcctgcccctttgggccatggcggctggtcgcgccgccgccttgccggagcggatgccacagccgcagctctggaagcctggtggccgcgccatcctcacctcaccctgccctcccgcacgcggcacgcaccacagcagccgccgtctgccgatggggattggcggaggttggaggagatggtcagatgactcagatggggaaagttgggtcttctcacgatgcagcgtcggcactctgtctgacccggctgcttctatgcgcggaggagcacgaggaagaggggggggggggggttggtcagcgggcggcgcgagggtaccgagccgaattncgtaatncaggtt

SEQ ID NO: 41272 - DNA, 223 bp, Oryza sativa
  Clone ID: PAT_MRT4530_44633C.1
actgagaggagtgttgcttatcaaccatggatatggactgcaggaaaccatgaaattgattttgctccagaaattggtgaaactgtacctttcaagccttatacccaccgttaccatgttccttataaagcatctcaaagtacttcacccttctggtattctatcaagagagcttcagcacacatcattgttttggcctcatattcagcgtatggaaaatata

SEQ ID NO: 41273 - DNA, 1060 bp, Oryza sativa
  Clone ID: PAT_MRT4530_44634C.1
atcaacttgtaagagactgtctttgcgggcagatgtacgactcgagtcctgtagattttgttagtgatttgggcacccgatttctccttcacccaagtgtcctgaagatgtctcaaccgcctcgtatcctatcatggatgactagaggcattgcctcgggactagacacgctgttcattggcaaatttgaagcgcaacgtgcagaatattgggacacactatactcatcagtgcatgttggtccaatactcatattctgttctgaagacgatgaacttgctccgtgttcaattgttcaaaaatttggtcgacgtctgctggagcttggtggtgatttgaaccttagttaaatggcaaaattcccctcatgtaggtcactacaagcatcatcctgaggaataccgagctgcagtaactgagctactcacaaaggcttcaatgctttacatgagcaggaggcaacttaacagctatgatctaggcacaagtgagcatagcgacatgttggcctccgacgtgcataaagctggcacgaattcaaacaacaggctaagaagggcaccagatgatccgattgaccatttcttgctaccgagttccatggagtatcatgaaagcagcaacgaagagccgaaaccggagttgttcaacatgcccagtgtggaaagcattaacaacccccatggagtgttgggtcagatgctttacgatgtatgcgtccccaagaacgtagaaggctgggacttcaagccttctgcatcaataaacgggaggcatataaattctattgctcgtcagcatggcactttcaatccgataaaatgcatacggcgctcaaaattgtaaaaatgttcaactggagtaccctgatgcatatagctgaccggtgtatactatgagagaacattgtttgatggatgctggtgaaaatttgagatacctgctatccattgaataaaatgcgagatatttttgtagataaagtaatgaagtataatatgttactattgctgaggaactgcgcatatgtacatgagtgctttattatttctgttgctct

SEQ ID NO: 41274 - DNA, 277 bp, Oryza sativa
  Clone ID: PAT_MRT4530_44635C.1
cgacgctgggcaccccatggccgaggtgttccgcggctgccggagaggggacatcgagcgcgcggcggcgagcctcccggtgttctgcaacgtggacatccccaatggcgtaagcggtgtctgctactgtctaccgagaactggctactagccttctgtatgtagctagctattggctgtgcatgtgcgtgatttggctactaaataattggcgtgtacttatatctggaagcatgtatgatgaataaatgatgaactcagatgttattctgtttca

SEQ ID NO: 41275 - DNA, 458 bp, Oryza sativa
  Clone ID: PAT_MRT4530_44636C.1
cgccagcctggggctagccgccaggccgtcgttctcgccgtggtaaggcctctcctggcgtcgctttcgtcgaccgcctgccctcccccctcccttcggcccgacgtggggtgcgccctctctgcgtcgccgccatcggcgaccagccttcctgcgtgctcgccagctgcctaagcaccaccaccattggcctgccgtcaaatccgcctacaggcttaggcccatctaggagccgggactagccctcccgtatattctgctctcaagtgatgcctcctgccgacattcccacaccgcgcagagtgctggaggaggaccttggcctggcggaggtccacagtgcgccccgatccgccggtcggcgtttttgcctcggggcggcctgcctctgtatatggcttggtcctccgtctccccctgggtccgacggacttgtttcggggaggacgtctgggcag

SEQ ID NO: 41276 - DNA, 522 bp, Oryza sativa
  Clone ID: PAT_MRT4530_44637C.1
acgacggcacgggactatgagagagcgaggaagaagaagatattaatttacatacatacatacatacatacatacatacatacatacatacatacatacatacatacatacatacatacatacatacatacatacatacatacatacatacatacatacatacatacatacatacatacatacatacatacatacatacatacatacatacatacatacatacatacatacatacatatatatatatatatatatatatatatatatatatatatatatatatatatatatatatatattaaatttgtttggtgctccatggtgcccgggcatcattgttgaaattgagtatatacccaattcaaatgagtatgaaactttttcaattacttattgttttgttaataggtataggtctctctctctctctctctctctctatatatatatatatatatatatatatatatatatatatatatatatatatatatatatatatgggcaatgtgaaagctttat

SEQ ID NO: 41277 - DNA, 670 bp, Oryza sativa
  Clone ID: PAT_MRT4530_44638C.1
gaatgactgcagcctcttagtaccctatttcagtccatgaaacttggttcatatgtgcgttgttcaggtattttgaacagtgaatcgagcacatgttgtggtgtcttagaaatcgagcgtgttgatcttgtagatgatgttgttgagtggggctcctcacatgcatcactcaagtagcttctctgaagctcgccccaaaagaatccgtgctcatttatcggaacgattatatgacatgtttcgcatttcatatgtaaactggtatgaactttttgctatgcaggcagttgacacttcctcacacagtccatttcctaggaagatgtttggagagctcatgccatttatttgagcattcgggaaacacctttccatgttttgaagggaagacatacccgagatatcaagtaatgcatccagagccttctcaacatcgcatccatattgaccgagcacgtctctgaccacacccatgccaagctccgaattatcccccagcatagagcacaggaactgctcggcctcttcaacactatacttgcggtcgccaccacttccgtccttccaagcgttgcccttccacgcgttcgttttgtttacgggcgaagtggcaggtcgcgtgtacgccttaccgatcacgtccgcaaccatcccggtcgcagccacggct

SEQ ID NO: 41278 - DNA, 2292 bp, Oryza sativa
  Clone ID: PAT_MRT4530_44639C.1
atgaggccttcgaagaagaaatggaaaaaatcgaaaaacccctcgaaaaacggcgaaacgggtggagagagtggaggagagaaagagggagctcaaaagatgaggccttcgaagaagtaaatcgaagaagaagaagccctcgccggcggcggcggccggcgcggcggcgccgacgacccctccggcggcggcggatgggggagcggggggcgagtcgtgctcgccgcggtcggaaaccctaaccctagctgctcgggcggcggcggcggcggtggcgtcggagacggagtcgagcagcagctgcgaggcgtccacgtgctcgtcgtcgtcgtcggcgttcaaccccgggtcgtctggggcggcctcgacctcctccctctccgccttctcgtcgtcggcctccaccgcgtcgtcgtcggccgccggcgacgagcggcgcgacatggcgtggctgctggacgccttcggcaccgccacgatcgaccaggtggactccgcctaccgcgaggccggcggcgacgccttcctcgcggccggcatccttggctcctcgcctgcgaccgggatggttgcggacgtgatcggtaaggcgtacacgcgacctgccacttcgcccgtaaacaaaacgaacgcgtggaagggcaacgcttggaaggacggaagtggtggcgaccgcaagtatagtgttgaagaggccgagcagttcctgtgctctatgctgggcaataattcggcgcgtgggggcaacgcttggaaggacggaagtggtggcgaccgcaagtatagtgttgaagaggtcgacaaattgaaatgctttcaggctctggatgcattacttgatatctcgggtatgtcttcccttcaaaacatggaaaggtgtttcccgaatgctcaaataaatggcatgagctctccaaacatcttcctaggaaatggactgtctgaggaagtgtcaactgcaggcattgaaaaaagttcataccaggggaagcattaccgtgaattagctggactgtctgaggaagtgtcaactgcaggcattgaaaaaagttcataccagtttacagatgaaatgcgaaacatgtcatataatcgttccgataatgagcacggattcttttggggcgagcttcagagaagctacttgaaggttgcatgtgaggagccccactcaacaacatcatctacaagatcaacaagctcgatatcgccggattcgtgtactccaccgtagcggatgagtcgaccgctcccgtgaagcccaagggaaccgccaggaagaaccccatgaagcagtcccgcttcgacttcaccaaggtggacgccgcgctcctacccaccgtcatcctcgtcggccgacccaacgttggcaagtccgccctattcaaccgcgtgcattgtttgccactatcttgttctcttgaaatgtttgcttctgacttagaggttttgattatcgaaactagatttatacgaaggagggaggcattggtgtacaatacacctggggaccatgtcacccgtgacattcgtgaaggagttgccaagcttggtgatctccgtttccgtgtgcttgactcggctggacttgagacagcagcaacatctggtagcatccttgctcgaacagctgacatgactgggaatgtgttagctagatctcaatttgctattttcttgattgatgtcagggatggtctgcagccactggatcttgaggttggacaatggctgcggagacatgcatctgggatacataccattgtagcaatgaacaagtctgagtcacttgatgagcatggagtgctgactgcggctgctggagaagcccataggttgggttttggtgacccagttgcaatatctgcagagacaggcctggggatggcagagctttatgagacactaaggccattgtttgaggactacatgtttcagctaacaaacagtggacactgcaggttggatggaaagattgcaaagtctaaaagtagcatgaatcaccctgaagttctgatagcacggcaagcaatagaagaaggtcgtggacttgttgtgattgtcaacaaaatggatcttcttagggaaaaccgaccattgtttgacaaagtgatagatgctgttcctaaagaaatccagacagttattccccaggttacaggaataccagttgtgtttatgtctgcattggagggtagggggcggattgctgtcatgcgccagggaaggagcgcagaaagaggagaagagcttgcgcaaggaagaagaagcgacatcaaggtggtgctgtga

SEQ ID NO: 41279 - DNA, 529 bp, Oryza sativa
  Clone ID: PAT_MRT4530_4463C.1
gggaacaaacatgaacatccaaattaagccccaagtataacggggtatatatcgatctggtatttggatgaattaagggacgggacaaccacaagggaacattatagcgaactagctttgccataagtttctccttttggaggggcgaacagctacatttttcaaccatgttcctgaagggaaccgaaactttttttttaagcggccactacagtttttaaaagtatccaacattttgggctgtcccgatgatctgaaagagagatgaaccaacatcccccaagacgaaaaatccaagcccaatgggtccaacaggaaaatcatttccttttttgactggctcaggaacaaaaccccttttggggacgtttttttaaaaccgggccactttcctatttgagagaccccttgggggaggcatgaacctttcccctgctttggttgccaaatggaaatcgccgccactcccctgtttagcccgaaattttttttgggggcgccagggggaggaaaccaaaggttttttttc

SEQ ID NO: 41280 - DNA, 459 bp, Oryza sativa
  unsure (1)..(459): unsure at all n locations
  Clone ID: PAT_MRT4530_44640C.1
atccccttgcagcanntccccctttccccagcnggnttnatancaaaaangcccccaccaatcgccctncccaanatttncccaccctnaaatggcaaaatggcaaattntaacctttaanattttgttaaaatcccctttaaattttngttaaancaccncnttttttaaccaanaggccaaaatcggcaaaancccttntaattcnaaaaaataaacccaaatagggttaattttttttccattttgggaaacaaaaatcccctnttaaaaaacnntgnannccnncctcaaaagggnaaaaaaccctctatcaggggcaanggcccnctactttnaaccanccccccaaatcaatttttttgggggtcaaaagtgccctaaaaccctaaattcgnaaccccnaaaggggaaccccccaatttaaaaccttaaacggggaaaaacccggcaaaattt

SEQ ID NO: 41281 - DNA, 273 bp, Oryza sativa
  Clone ID: PAT_MRT4530_44641C.1
ctgcatgtcggatgtgtttggctctggagatccccagcgtgagatcggcggcgtcccgttgaaatcctcgacccgatcaacacctgtacgacaagggcgcctacaaggatgacgctccgtgaacgtggcatgcccgtgttcacagaagaacttcgaggtcgtctcgccaactacatagatcgggggagtactagcagccttgtacaagacaagatcctcacatgctggaccaaaacattgttgacttatctgaagaataaaatatccacataa

SEQ ID NO: 41282 - DNA, 1876 bp, Oryza sativa
  Clone ID: PAT_MRT4530_44642C.1
ccaccaatatcgactgtagtaaagtgctatgaagaaattcctactgcaaatccaaagttgtactgctataggaaagctctaattttgggtactgttacaggtaagtacaattttaaaatcagtgtatgagtatatgacgctggaataggcaaaacaaagttctgcatagcgattgacaaatgatctctctacctagcatcttcagtgtgttgctggcaacctctaggtccaaagtgttgggaacacttcaagacccttttccgacacaatgcacaataatggcctcggcatcccgggcaagatatatgattgttggtgcccagctctacagcaacagtctgtacatgtatgacttttcattccgacggccacagtttggacagggataagttaacagcacccattcaggttctaagagttcagcatcttcgtcagggtcgccaccaaaattttcatcatcctgctgctgtgggttttcatcttgttccctctcaaacatatcacagtttccattccagaaatgatcatatcctccaattgctttgttacaacgatagcagaagaatctcccacagttcccacatgtcatcttgttgcaaccttcaatttttgagatagccatcttacaacgagggcattgcttagaatcacgaagtgcttcctggatatttatcaactcgtctatttccctcttttctttcaacaattgttcctctggtatggaatacaatttctgtcgttccggggaaacaacttggggtctggggcctactcgcatagatgacatccttgtcaggcccttcaaaatgcgtattttttcttcaggagtaatacatgtatcccccacatggcggcggcgtttgcacaaagtgcagaaggtaaaaaaacaacccgggcattgagcatcattgtcaacttccaagcaagcagcagaacacctggggcagtaaactagatcaggcattgcatctaacagtttctgtagagcaaatgattcccattgtgcatatccatcatctcgtagaaggcttttcaatacggatggcggaagtggattgcggcaatttgtatcaggacatgccagctgcattaaattcccttctttcacatggattttgcagtgagactccatacagagaaggctttccaaaaatatcttatgagatctcttctcactgtaactctgcataagaggaatagtagactcaactaaaattcttctcgcgatagctcgttcatctccaatttttaatgttttatctggatctaacactatttcatcattcaaagcaatggaagaccacgaagagctattcagccaatccacccatctgtatatgacttcttgccctggaagctctgtccaaacctcatcaagcgcagcacacaggtatgagacctttggttcatccaaccatttagctgcaagatgatagagttctccgccattgtggttttcactatcatcagttccaaccatagctccacttcgacgaagattcaagaacacacggatactatcaggaagtgtataatgcacaaaaatctgaataaatcgaagattgtccttattctccaagatcaccatatcatcaccaaaaatagcttgcagtgctattacctcgtcttcctgtagttggttattggcttgcagctgctcctccggtaggtcgtcctccccacgagccctcgcggccatcgactcaagcagcgcagccgcctcttcctgcgccgcccagtaggtgatgtcaacctccgccgacggcaagggcttgtcatccccaacatccctcacagccacccccgccgccgcggcggccgccgaggacgaggcttctctcgacatagggtttgaggatgagccaccagccgccat

SEQ ID NO: 41283 - DNA, 677 bp, Oryza sativa
  unsure (1)..(677): unsure at all n locations
  Clone ID: PAT_MRT4530_44643C.1
gtcacactctgcacaggtcaattaatgtctctccccccccccccccacacacacaaacacaatcctagataattaggtgtagcatcctagaaccgagtctatcaacacatgaactaatcatcttcttctaatctcactcactcagactcagcttgacacagctcaagccaagccattcatggggggcgccaagatcggcgagctaggcgaggtgggggaaggcgaggcccctggcgagcacgtagcggaagctgtggcggtagggggcccactcgacgaccttgctcgccggcctgctctggcggcaccgctgcaccgccgccctcaggctctccggcaggcacctctgcacggcgtcgacgagcctctccggcgacagcctcgcgtccctggcgtacgactccaccagcttcggnagcgtcacccgctggtccttcctcaccccgagcgtcgcccggatgtactcctccctcgccgcctccagctgctgcgacagccgcttcgggctcagcaccctgacctgccatcggcatgaacgcacatcaccgatcatgaattgcggttctgctactgcagaggagtatgcgtacttcgacgcancagtgacgatgcgcaacgcgcagcggatgcagtgctgctgccgctgaaacatcgcctgcgacgagccgccagcagca

SEQ ID NO: 41284 - DNA, 138 bp, Oryza sativa
  Clone ID: PAT_MRT4530_44644C.1
atggacggtccagatgtgcaggcgccgacagttgaggcaccctctctgggccagcctgtggctgtgctggatctatattgtgctcggccatatgttctcaacccaaacatttccaccgtggaagactactatggttga

SEQ ID NO: 41285 - DNA, 123 bp, Oryza sativa
  unsure (1)..(123): unsure at all n locations
  Clone ID: PAT_MRT4530_44645C.1
gtaggactccattccccagccacccgcgcggtcnaaacgctaagccgccgagagacatggcgcccgcagcacaaatggcagctccaccaccanagacncacggcgtcagattncangtccttc

SEQ ID NO: 41286 - DNA, 2001 bp, Oryza sativa
  Clone ID: PAT_MRT4530_44646C.1
tgttcgattggtttttgaggttggggtgtgttttgatctattaagattcgattatttgacttccgctgacgtaatctaccattcacccctcctgtggtaggcttggttatttgtgttcgatcctacagataaatatctttaaaaattgataaatatatgagaagtcataccttgattcaaaagagagaaacaactaatcattttaggatttattgtttgcagatgacagcttattattttttcaagcggagcggtttttgccctgttgctacacaggaggagatcaagggtgttctacaggtgcaaagggcaagctttgaggagaaatatgtgggactcccaaccccagatggacgaatgaaagctacacagtttcaaccactcggccaaagattataaaaaagaatgacgaattggaatgagaaatatatgtcggcaggagctaaggatgtgttaattaaaagcgtagctcaagctctgcccacatatacaatgggtatgtttaacatgtctgataagttttgcgaggaatattcacaactggtccggaatttctagtggggacatgataaaggagagaggaaagttcaccggatttcttgggagaagctaaccagcccgaaaacttttggaggaatgggatttcgggatataaaatgttttaaccaagctttgttggctcggcaagcttggagactattgaccatgcctgatagtctttgtgccaggattctgaaggccaagtattacccccatggaaaccttttggacactgcattcccttcagtttcatccccaacctggaaagctattgagcatggattgcaattgttgaaggaaggtgttatatggaggattggtaatggaacaaatatcaaaatttggcgccaccgatggatacctaagggtgacaagtcagtggtaccgaggaagaataacagaaatagttatatgtgaatgaattgctaaatcctgggacaaaggaatggaatgaaaggcttgttcggcatgtcatgaaggaagaggatgctactgaaacgctgcgaatgaatctgtctggtgcaattgacgaagatttccctgcttggcagccggagcggacaggaatgtttacagttaaaagtgcttatagattggcatggaacttaaagcagccaacgtcagcatcttctagttcagaagccgatggggagaggaaaatctggagatgtctttggaaaacaaatgtacagcctaaagttaagattttcgcttggaagttggcgcatgatagactgccgacttgggagaataagaggaaaaggaaaatagaacaatcaggcatatttccgatctgtgctcagacggtggaggatggcttccatgcaacggtggaatgcacaaaagcaagagccctgagagaaggaatgcaggagatttggaagttgccgggagaagaatgtttcgctagaacgggaccagattggttactggtcctactggatgcatccgatgatgcgatgagagctcatgtattgtacctcttatggcgatcatagtatctccggaatgacgttatacatgggtcaggcatagaaggtatatcaaattcagttatcgtcttagccaattatgtggagtgtttggtaccaacacaacaaagcgtcgatgatccgaaagggaaaaaacccatttcggcggtgcatgctgaggctatggcgtgtgtggaaggtttacgattggccacgaattgggtgcatatgccgatgatttatgaatttgacaactcagaagtggttgctaacctcgtgaagaagactcagttgagatcggcgtgggctgggacgatcagggaggcactaagatggatggagtgtctacaacaggtgcaggtgcacaagataaagagagaatcaaatggagtagcgcataagctagctagattagtagtaagttcaggaatctacggtgaatggttgttaagttctcctgcagaactcactgaactactcaatctagaat

SEQ ID NO: 41287 - DNA, 162 bp, Oryza sativa
  Clone ID: PAT_MRT4530_44647C.1
atggaggaacaaatggattttttccacgatgaatcatcaatacatgcagcaggtgatgatcaacaaaatgtcaaaagaggtgtggttatggagtgtgtcaggagctcaaggagtgccgaccgtttattttatgctggagtcaatgatttcaatgatatctag

SEQ ID NO: 41288 - DNA, 678 bp, Oryza sativa
  Clone ID: PAT_MRT4530_44648C.1
atggacgacaaggaggacggcgtgtggtggggcagagatgttggcgccggcggcggggtggtcgacgaggaggacggcaacggaggaggcggcccgagagccaacgccctcgccatgttggcgccggcggttgaggttgagaggcgtacgcaaagcgcagcggcggaccgcctccacccgacgccgcccgggccgtcgcgcagggccaaccatcgcccagcctcagcgtcacctccctccccccgtcggcgcctccctttccaccaccccatcccccggccctccccgcagaagaagagaaagggaggagaaagagagatagaaaagggggagagaggacggccctccgcccctcatccgcctagttcgccggcgacggcgcagcgcggcgctgaggctaggcggcggttgatgcaacgcgaaggcgccctggaggcggcccaggcggtgtcgggtggcccggccggatggtgcacgacgggaggggaagaggcgacacgggaaggtggccgctgcgggtcgtgctcgtgcggccggctcggtcgtgcgcggaggcggcgcccgcgcagccgacttggttgtgcgtggcggcggcggttcggcgacgagctcgagctgggctcgggtgtggtgatgacgacggcttgggcggatgaagacggcggcttcggtggtaga

SEQ ID NO: 41289 - DNA, 360 bp, Oryza sativa
  Clone ID: PAT_MRT4530_44649C.1
atggttggccctgcgcgacggcccgggcggcgtcgggtggaggcggtccgccgctgcgctttgcgtacgcctctcaacctcaaccgccggcgccaacatctctcagcaagggcgcggcagcaagggcccgacggcgagggcgttggctctcgggccgcctcctccgttgccgtcctcctcgtcgaccaccccgccgccggcgccaacatctctgccccaccacacgccgtcctccttgtcgtccatggccgccgggagagaggggggagaggagacaggccttcacgccgcctccggatctccgtgccctacctccgcaccgccgccgggagagagagtggggaagttgccgccggatga

SEQ ID NO: 41290 - DNA, 285 bp, Oryza sativa
  Clone ID: PAT_MRT4530_4464C.1
cgcgtccgcgaacacttcgttcaagctattcgctagttcctcaacatgtgactcgggagctcgagggccacgcgaaagcgcgtcttcttcaggtcgcgatgctttccgagatcgccgtgggccttaactacccaatactacatttacttcaacatcattagaattgatagtcatattatgttcatcaccattgacagtgtgtcagataactacaggcaaatctagcaaccgtactttgagtcgtcttttttttactcaacactcaaccatttcctattaatctta

SEQ ID NO: 41291 - DNA, 594 bp, Oryza sativa
  Clone ID: PAT_MRT4530_44650C.1
atggataaggatccaagcaggcaagcacagctcttctcaggtcaagcaccgtgcagcgacggcgaccgttccggcagcggcgtgcgcggctccggcgggaggcgcggcgacggcaacggcggccgctgcggcgagggcgggcgggcggcggtgagggctcgcggcgagggagtgcgggcgacggcggcggccgcggcgagggctggcggtggcgagggcgtgcttgcggcggcggcagccgcggcaacggcgtgcgggcgacggcggcggctgctgctgctgctcccgtggccgctggcttccacgctgaggcatcgtcgtccgcctccgcctccacctgcccccaccatcgctgctgctgctgctcccgtggccggcgacgaccccatcctgctcgacgtcgacgtcggcgccgacgccgccctcctccccgtcccttgctccagggcagccgtgatcgttaccattgctgaatgcatagttattaggatcggaccagacacggttttcttgttagtttggacgaccttctcaaagatgttgatggcgcaggagttcacgatggatatagctagaaggagatgccgaaggtcg

SEQ ID NO: 41292 - DNA, 672 bp, Oryza sativa
  Clone ID: PAT_MRT4530_44651C.1
atgctgagaaacatgatgcttcatgaagccccttacatggccacatcaaccaaagaaatagaggggaggggaggacctggagcaagggacggggaggagggcggcgtcggcgccgacgtcgacgtcgagcaggatggggtcgtcgccggccacgggagcagcagcagcagcgatggtgggggcaggtggaggcggaggcggacgacgatgcctcagcgtggaagccagcggccacgggagcagcagcagcagccgccgccgtcgcccgcacgccgttgccgcggctgccgccgccgcaagcacgccctcgccaccgccagccctcgccgcggccgccgccgtcgcccgcactccctcgccgcgactgccgcccccgcgagcatgcccttgccgccgcccgcacgccctcgccgccgcccgccctcgccgcggccgccgccgccgccgtcgcccgcacgccctcgctgcgactgccgcccccgcgcgcacgccctcaccgccgcccgcccgccctcgccgcagcggccgccgttgccgtcgccgcgcctcccgccggagccgcgcacgccgctgccggaacggtcgccgtcgctgcacgttgaggttcaaagtgagggtatagatgcaattatcccaaagaggatccatgccaccgagaagaaggatccctga

SEQ ID NO: 41293 - DNA, 428 bp, Oryza sativa
  Clone ID: PAT_MRT4530_44652C.1
cgccacgcctcccgggaaggatttgaccggttgatcttatgggatttttcttggattggcatgagccggttggaaattcttaaaggtcaattttaaaagggttcaattggccaggggtgcccagcttgaagaaggtggtttttttgcctgagggattaccagggccaaacttggcactttttttaaaaaatgctaacctggcaccagggcttaaggttttggaggccagaattattggtttttaaaacccacagccttgtttaaccaaagacctcctattatctactgttagggaggctagaccttcgacatcagcaaaccaaaaaatgcagtatgacatggacttcggccaattggaatcgtctaggaggtctgtttcaccgaaggcaggggaatctaaaggaaaaaaggtcacgctggcttgagtc

SEQ ID NO: 41294 - DNA, 389 bp, Oryza sativa
  Clone ID: PAT_MRT4530_44653C.1
ggggaaacaaataaaatttttttttgaaaaaccttatttttttttttatttttttaggggacacaacacccacttgattatttttttgtggcactaaacccatttttcccaacccaaaaaaaaaaaacttgttgggcccaaattccttccaccccaattaacccctggttaatttcgggcccccactttattttccggggaccaaattgggggggtcccccccaccctttttttttaccgggtccgcaaaggggtccgcaaagttttttaaggggccctttcccgggaacattggcctgaacaaaaaaccccaccttggaaaacttggggagggggccgtttttgatctcctttaccttgagctcccgaaaccccttggggtctttggg

SEQ ID NO: 41295 - DNA, 243 bp, Oryza sativa
  Clone ID: PAT_MRT4530_44654C.1
atgcccaatgttgaattgatgagaagctacatcgctttcttgagggtgttcggcttgataggagaaaaaaggagcaatgaatatgtggaattcatcagtgcctccatcaaggatctcacccccaccaccgaggccgctgcatctccaccaccccaagaatctccttcttcagtatccactaggtgttcgatgaagtgccctcacaacgatatgacggcgagctcaaaccacatcatcgagtga

SEQ ID NO: 41296 - DNA, 1521 bp, Oryza sativa
  Clone ID: PAT_MRT4530_44655C.1
tttttttggtctgtcgttctgctctgtgtggccttgttctcttttcttctcatcaagctgtgtggaaattttcgcatctggtgatattcaggaagagccatttttcacaacgtcaggcagattacatacctaagcaatgtgcataatgattctatagcacccgtatgtggcactaaatatatatctacttataacaactcttgaaaattcaaatacatcaggaaatgccgaaaacaactacgagtacaatatcagctttcagtgtgatggactgataatctgcaatcattgtgcatggccatcatgaactcagtcttctcatcaagctggtacgaggttgggctctgatgaaggtgatgattcaagcagtggattcttctggaactcattccttagttgtccgcaagcggcattagcatcaagcccacgggtttgtcgaacgcttacggttatcttccgagcttctagcgcatcaacaaacgcttgaaccacttttctgtagggcctcttgtattcagaaccttgaatcggattataaggaattaggttcacatgataaccaccgccacatgtatgcagtagctctgcaagttcttcagcatgctcctttgcgtcattaatcccagctagcagagtgtactcgaaggatacccttcgtccagtttcgaggaagtaattcttgcagtcatccattagtgcctccaagggatatgactttgcacttggaacaattgtttcccgtagtttctgatttggggcgtgcaggctgactgcaagtgttgactgaagcttgtgagatgctaacttttttatagtgctgggaacacctactgtggagattgttatcatcctttgcccaatttttagttccttgttcaagcatcgatgtgcctctaaaactgatttcaggttcaacataggctcacccatccccatgaacactacatttgtcaccctgtgttggaacgtctcctctatggccaaaacctgctcaacaatctcatgtgcatgaaggtttcttgcaaaccctcccttgccagtggcacaaaatgagcaacgcaaggggcagccaacctgtgatgaaacgcaggcagtgagtcttgacgggcctttgtcatcatcgacagggatccctactgtttcgatcaatctgttatcctccaacttgagaagtatcttggtagtgccatcggaggccgtcacagcatggtgcactggcgagcggccaaccttccagccagcgccgaccaaggcctcacggaacacctttggtacgtggctaaattcttggatttgcttggccctggacttgtagaggaggtcgtgaagctgcttccccctgtaactttgctggccgaggtcgacggcgagctgccggagatccggttcggagaggccgaggagcgcgcgttcgggagagctcgcagacgcggcggcggcggcgacgcgagttcggagcgcgcgcgcgagcggggcggcacgcacatgcacttgctgcggcgcggccattctcatcgtgca

SEQ ID NO: 41297 - DNA, 765 bp, Oryza sativa
  Clone ID: PAT_MRT4530_44656C.1
atgaggacggaaaggcttgtgttggttgtccttgaaataacaaatcccaatgggccgtcggcccatctctctccccacgctcggcgccccttcctgggccggcccgctcctcccttcccctccccgaagtcctccctccctccctctctctttcgggcgccgacaggtgggccctacctgtcgggtcgtccccaacctctagccgtgcgcccatgccggcaaccaccgctgccgccccacctcctccgctcctcccgcgcccacgccgcaccgttcccacatcctccccccgacgccgcccacgccccgtcgctcccaccccgcgcgcgctcgagagggcgggattcgatttcgaatcccaccctactctctctctctctccaccccacgtcgccggcgaaatcagaggctttcccgcacacgtctgcctgccccaccacctataaattgtcccccgagctcctcttcccctttcccgtctcgccgcctctcccgtgctcctacgagcccgcaccgctcgccgaggcgccgcttgcgccatctccggccgtggccgccgtggctagggcgtgcctcgccacgcaatcaccgccgcttacgtcgcgccgcgagagctacctcggcgcagctcactttccgtgcgcgctgccgtaccgctctccccacgccacacccgagccggcggcgccgcccatctccggtcggcggtcaccgccgctagagccaccgccgcgccgcacagttgccgccgtcacgctcacctag

SEQ ID NO: 41298 - DNA, 387 bp, Oryza sativa
  Clone ID: PAT_MRT4530_44657C.1
acgggccaagacgctggtgacgctgtgctcccggctttacgcatcacggcagagaggtaccttagcctcacccgcaagatcatgccggaggacgccgccgtgagggtgggggagtcgcaaccgcggccgcggtacccagagcgatccgtgcacctcctgtccttcgccatggtggggttgataccgccattttccatccacggatcgaggtccttgaccgcaaccagcgcgaacaggatgggcaccgccgggaacaggcagaagtcagaaggcagcttccctcatggctgagaaaccttgtcgcgactgagaaaatttcattttcccgaatgctagtgtattaatccccgtcccaggaaaagccggggtacaccatacaaacatgat

SEQ ID NO: 41299 - DNA, 264 bp, Oryza sativa
  Clone ID: PAT_MRT4530_44658C.1
atgacaagcagcaccctccagggcaggtgggaaaagcggcgatggccgcggcagcctccaagactagcggggaaagcggcgacggctatggtggcggcatcggtgaaggtggcgccgtccagacaagttagaggaagaggaggatgtcaggagagtggaggtggtagcggcaagagagggaaaacgacaggcggctcctgcaaggcaggattcgacgaggcaagcgccatccgctgcggcccctcttccactcttcccccctga

SEQ ID NO: 41300 - DNA, 530 bp, Oryza sativa
  Clone ID: PAT_MRT4530_44659C.1
gcacgaggcttctgccacacctttaagaggtctactgcattcctatttttttggtaccatcgcgaaaaatctcagagctgaaaaataccattgtatatatcattgacatgtgccacatacgatggtattttccaattcgtgtatctccatgatggtattttttaaattttctcattattctagtgtcaagtatagtggttcttcgtccggtaaaattagcttttatgtcattgagatgggaatgatccatgatcattaaggaacaaaaacacaaccagttttaccatgcgatgtttgtgcataaacctgtaaatagcaatgacacatcatttgtgacatatactgttgtaactacacagactgcagttccgtatttccttttttagtacacctttatcatctttaccttcttaacactttctagtgatgtccaaatagtctggccattgctaataagtaaatttattaaacaattatatcagagcgcaaagcaccaagttggcaacctctagattcatgctagcgtaaag

SEQ ID NO: 41301 - DNA, 372 bp, Oryza sativa
  Clone ID: PAT_MRT4530_4465C.1
acgagcgagctgttttaattttgaggccacgaagagagctcagctgctggctgtaggtgacttggtgataaggaggaggaggaggaggagggcaccgacatggccggagccagggcgtacagcggggcggtcctcggagccaccggggcgcgcgtccccgacgatccaggcttgggcgcggttgtgtcgcggagagggggggtgctagaaccgctgagcgtacaggacgggccgcgaatgtccgtggtccgagtaagggccgactgcgacgacacctccaccttggccagcggtgaggagctagtgggcgaccttaaggcaaagtgggaggcgatcgaggacaagccgacgggtcttctttacagcgggggg

SEQ ID NO: 41302 - DNA, 1395 bp, Oryza sativa
  Clone ID: PAT_MRT4530_44660C.1
atggggttgggtgtagagcctctaggattgagggctatggacagagatttcgctaagcagatagggattgaggatgtgagcgagtgcccccacctttgtgcactagcttacggttatctgaagaagactgagggttatgaacaaaacctactcgcgttcttccataacaaaataaactcggacgctcttctcgtgctgttgattgaggagctagacaaatgtatactcggctacttctccttccattggaaatttgccactgaagtaatcacacaggttctaacagcagagcagcctagaagaaagctcaaaaccatggtgttagaagccactagaaagatgaggtttgagagggtgtcaaggaagctgaaggtgacgaggctgttctccacgctggtggaggaactgaaggtcatcggggtcacctgcaacgacggccagctgcgcgacgccgacgccgacgtgatggtcccggcggctcaccgcgaccgcagcccggtcctgctcctgatgggcggtggcatgggcgccggcaagagcaccgtgctcaagcagatcatgaaggggttgttctggtccggcgcggcggcgcacgccgtggtggtggaggcggacgcgttcaaggagtcggacgtcatctaccaggccatcagctcgcgcggccaccacaacgacatgctgcagacagccgagctggtgcaccagtcgtcgatcgacgcggcggcgtcgctgctggtgacggcgctgaacgaggggcgggacgtgatcatggacggcacgctgtcgtgggagccgttcgtgctgcagacgatcgccatggcgcggtccgtgcaccggcagcggtaccggatgggcgtgggctacaaggtcgccgccgacggcaacgccaccgagcagtactgggagcccgtcgagggcgcccccgtgcccagcgggaggaggccctaccgaatcgagctcgtcggcatcatctgcgacgcctacctcgccgtcgtcagggggatcaggcgagccatcatatcggggcgagccgtgcgggtgagctcgcagctcaagtcgcacaagcggttcgccggctcgttccgcaagtactgcgacctcgtcgacagcgccagcctctacagcaccaacaccatcgccggcgcgaagttgatcgggtggaaggacgtggggagcaggctgctggtggacgtggaggagatcgggctgctggacagggtgagcaggatcaacgaggaggccaacggcgtgcacgagctgtacccggacggccacccgacggacggcgccgggtcggtgtgggaggatctggtgtcgtcgccggccagggccgcgatacagcgggagctcagggaggccatcctcgatagcgaggcctgcttcccgtcgccgtag

SEQ ID NO: 41303 - DNA, 1710 bp, Oryza sativa
  Clone ID: PAT_MRT4530_44661C.1
cgggctgcaggaattcggcacgaggctgcagctctgctccgctgcaatggcgcgccaccccgtgctgatgctgctcgtcgtggtggtgatgagctggcactggggcggcgcggcggcgcaggtgttccggccgccgtggaacggcacgttcccgatggggccgggcggcggcggcggggggagcgtgggaggaggagggggagcggcggcggcggcgtcggtgccggcgatgttcgtgttcggggactccctgacggacaacgggaacaacaacgacatgacgtcgctggccaaggccaactacctcccctacggcatcgacttcgccggcggcccaaccggccgcttctccaacggctacaccatggtcgacgagatagctgagcttcttgggctgccgctgctgccatctcacaacgacgccacgggcgacgccgcgctccacggcgtgaactacgcctccgccgccgccggcatcctggacaacaccggccagaacttcgttgggcgcagcccgttcaaccagcagatcaagaacttcgaggcgacgctgcagcagatctctggcaagctgggcggcggcgccgccggcaagctggcgccgtcgctggcgcgcagcatcttctacgtcgggatgggcagcaacgactacctcaacaactacctgatgcccaactacaacaccaggaacgagtacaacggcgatcagtactccactctcctcgtgcagcagtacaccaagcagctcaccaggctgtacaacctgggggcgcggaggttcgtgatcgccggagtagggtcgatggcgtgcatccccaacatgcgggcgaggaacccggcgaacatgtgctcgccggacgtggacgacctcatcatccccttcaacagcaaggtgaagtccatggtgaacacgctcaacgtcaacctcccccgcgccaagttcatcttcgtcgacacctatgccatgatctccgaggtcctccgcaacccgtggtcctacgggttcagcgtggtggacagagggtgctgtgggatagggaggaacagggggatgatcacgtgcctgccgttccagcggccgtgcctgaacaggaacacctacatcttctgggacgccttccaccccacggagagggtcaacatcttgctcggcaaggcagcctactccggcggcgccgacctcgtccaccccatgaacatccagcagctcgccgcctggcagccgtagcagctgtcgccgccggcggtcgtgacatatatcctctctcttactctcttcgtcccgaaatataaagaattttggatgaatgagacatatctcagtactacgaatttagatatgaagtctgattagattcgtagtatgtgttacatccatccaaaatcttttctattatgtgacggatgaagtacttagggtatgaatctattcgtttttgcatgcagtgttactatgttgttgtagctaggtaggggatgagctaatgaacgagctggggtggtgtttgtttgtgggtgtgtttgtgtgctcagtttggattagggcaagtgctgcttgtgtttgtactactactgctgctgaataccgatggacttgtgggttgtcatgtccgagtagtgataaattactgctactatgaataccgagaaacgaaactaaactcgacactagttctccaaaaaaaaaaacctcgtgccgaattcctgcag

SEQ ID NO: 41304 - DNA, 181 bp, Oryza sativa
  Clone ID: PAT_MRT4530_44662C.1
tgtgtgttttttgtgagtgatgctgtattatattgaagcgttacatcagaactaatacagtagtagtaagactcgacgatatgcatcagcactcagcactcagacgacgatgtgtcggcatgctgctgcatcgatgcaagctagcacgtgtcacagactgactcagtgactagcagatagc

SEQ ID NO: 41305 - DNA, 209 bp, Oryza sativa
  unsure (1)..(209): unsure at all n locations
  Clone ID: PAT_MRT4530_44663C.1
ttaaaggaccagtctaggacttatgtgggcccagcagtggtcattagcgtcgtcacccgaacgttgttagttcgttgctgaaaggttagttaccgttgcgaantaaagtagagggntttgaactgtcgttgtgttatatcattcgatgtatgttgattggttttgtttttcacaaggagtatacatatattaagggacaaaaaaaaaaa

SEQ ID NO: 41306 - DNA, 869 bp, Oryza sativa
  Clone ID: PAT_MRT4530_44664C.1
cggtgctctacatgtttgggctgatcatcaccactgccatatccgcgtgtcgtctgatacagcatgactacgggggtgaggtcaacaatggcggcgccaacctgaaatctgcgctgaagttcgtctactccatcgccttgctacagggtgtgctcttctgttaccggttcacattgtgctatgagcagaaaaggctggtggatttggtggttaacaaatatcgctttgttactagtttgagcgagtcagtgatggcgtacatgcaagagacgatgatcgggtgtgagaaggacccgtcattcgtcaaaggaaggaacctggtcacatatgccgtcggtttaaccaagtctggatcccctgatggcttcctctctggggtgaggatcctggactccctcctgaatacgccaatgtacaagtacaatttctttctcgaggttgaggtcgaggtcgaagagcagaaagcaatgtcacttgattgtacgagggcatacaatgccgaggcgagggagcacgctgcaaggatcgtggcgcaccttgctggtgacctccacctggagcagtttccacaagggatccattgcacagcttttctgctcgaaggtccccctacggattgtgatggcaacatccctgttaattacgaagaactgatgtgccaggccttgagtatcttcatgaagctcgttgcacacgaggaactacaaatgctggcggcagttttatctctgattgtgacgatgacacgaaacttaatggatgctgaagatttgcctcctcttatcgatgcaattaacagggcagccaacggcttcagcatcttaacggagctccaatcgatggtcacaaagctgtcaatgaagagtaag

SEQ ID NO: 41307 - DNA, 2695 bp, Oryza sativa
  Clone ID: PAT_MRT4530_44665C.1
atgactagtggaatggagcccgttgatgactcagagtgggaggaagttagctccatcaacaactacgcgctgttcatgggacacatgtctatggccgtcaaggggctaggttatcttcttgttttatggaccactgttatccttcttggtggcttcgtctccatactggggaagaaggatttttggtgtctcacaataattacccttgtccagaccgctggagtctccgacatctttctgaacgaaaagctacgatatacttggaggtcgtttttaggctttttctcagctacggatacattggaaacggaaaggggtgccattagctggttctatggccgatcacggtcacgctcctactacctgaacaacctagtagtagttgtcatatggctgctccatttgttcgtgtttgccaccatcatctgccctctagcggtgctctacatgtttgggctgatcatcaccactgccatatccgcgtgtcgtctgatacagcatgactacgggggtgaggtcaacaatggcggcgccaacctgaaatctgcgctgaagttcgtctactccatcgccttgctccagggtgtgctcttctgttaccggttcacattgtgctatgagcagaaaaggctggtggatttggtggttaacaaatatcgctttgttactagtctgagcgagtcagtgttggcgtacatgcaagagacgatgatcgggtgtgagaaggacccgtcattcgtcaaaggaaggaacctggtcacatatgccgtcggtttaaccaagtctggatcccctgatggcttcctctctggggtgaggatcctggactccctcctgaatacgccaatgtacaagtacaatttctttctcgaggttgaggtcgaggtcgaagagcagaaagcaatggtaaagcagctcctcctatcggcatcctacagccaagatggcggcctgcacacactgctgcagtcacttgattgtacgagggcatacaatgccgaggcgagggagcacgctgcaaggatcgtggcgcaccttgctggtgacctccacctggagcagtttccacaagggatccattgcatagcttctctgctcgaaggtccccctaaggattgtgatggcaacatccctgtaaattaccgagaactgatgctgcagggcctgagtatcctcatgaagctcgctgcacacgaggactgtcagcgatccatcaacaagacggagggcctgctagccaagatcatggcgcctctgcggtctggcctgctcaaccacaacgatgaccctaatagtgcgtggttcagaacagtgcatgcttcgatggttgtgattctccggcttgtggatgctcctggccagactggcaaggaactccgccgcaaaatctcaggagacgtggaagccatggctagtatggagaggattctaggttgccaaggatgtgggctcggatcgttccatgatagttccctgtttatgcaagcattggacatttacacacgaatgcacgagcacacgctttctaacatagtgacgagggaatatttcattgagaaattgttactcatcttcactcacaaagtttataaggaggccaacatcatttttgggttggcagtggtaggtgaaaagcttgcgacgctatgttcccatggcaaagcaaatgccaagttaatcttacaagtgaaagatgatgtcgttggtgatctcacaaaaatacttgtacaagacagatatcccaaggaatacagaataagcgccgcgcaaatcctcgagcagctgtgtgttcatcacactgatgatgatgaatatatccagagcctcaaggaagccttaaaggttaagagtccagaggtgcttgtgagaacacttcgtgccgaatctgtggacagacaaatgctggcggcagttttatctctgattgtgacgatgacacgaaacttaatggacgctgaagatttgcctccacttatcgatgcaattaacagggaagccaacggcttcagcatcttagcggagctccaatcgatggtcacaaagctgtcaatgaagagtaaggtgactatagtgaacagattgaacacattgaagcttatcactgagatattcatactaatcgttagacatggaagccgttacaccgtagaagaagcagagaacttgattaaatcactgtcgaaggctgcgaggaacatgtcggaaattgaggacatcatggttatctctggatgtagcagcagcctaaagactcttggttccctcgtgaaagaagctgaggaactcctgcctagagcaagggcatccgaaatggaagtgataattgagcatcctagctgtgtcaatcgaaatcagattaattaaatcgtatataatctgtattattttaatccgtaccctcattggaagactgtgtgccggggaaatctgatagtcgatctgaaaaccgaaattaaaaattactcgtgcctgtcagtaataaaatcaaagtgaaaatcggcctttaatcagctgaggccaatgcatagtattttttttcttacacttttgtacattccattttgctgctcttctcttctttttttctactctttcccaatcatgtaacaacgtaacttatcatttctatcaatgaaatggctgtaaggtagagctggctctacgttcttatgtttaaaacaaaccacacaccccc

SEQ ID NO: 41308 - DNA, 417 bp, Oryza sativa
  Clone ID: PAT_MRT4530_44666C.1
atggcggagagggagttaatcgacagggataaactcgtgcttatagatttgcagttccacggtttccatggagtgaaatcagaagagaaaactctaggtcaaaagttcgttgtggatgttgatgcgtggatggatttgagtgttgctggggagactgacagcatatctgatacggttagctacacagatatctacgggattgccaaggatgttgttgaaggcccatcgcggaaccttttggaagcagtagctcatcgaatcgcaagtaacgcattgcttaagttccctcaaatctcaaccatcagagtgaaagttgggaaacctcatgttgctgtacgtggaatcgtcgattatttgggtgttgagatattgaggcatagaaaagatgtgggaggcgatcgtcaggagcttcattga

SEQ ID NO: 41309 - DNA, 246 bp, Oryza sativa
  Clone ID: PAT_MRT4530_44667C.1
atggggccatcggaaatcggtgaggtcagcaaacggaaggtcactgcgacaacaagattggcattgtcttcgttgaggatggagaagacgggagaacgcgaggctgagagagagggggacgaggaccagggcaccgacgacaaggtggaggtggtcgcaaggtgcttcctacgtgtctcgagcttgccgcatcgcgctccctcgctgctcgtctctattgtttgctggtacatcatcctcaattga

SEQ ID NO: 41310 - DNA, 388 bp, Oryza sativa
  Clone ID: PAT_MRT4530_44668C.1
cagccattcgtgctagatgtgcagaagtgcagatggtttctgacatgccatgctttgccttgggttgaatgcgaagatatggaagtagaaataggactagaggactggccgcttacctagtccctaccatgaatatgggctgtgtttgaatccaaacttcagtccttttccatcacatcaacttgtcatacacatacaacttctcagtcacatcatcttcaattccaactaaaattcaaactttacgctgaactaaacactagttgtgtttgtacggttctccagacgttgcttgaatgccttgtgggcatttgtatcgtgatgtatcgagcggcgagtaattgcagtgtaataataagcggccatgtctggtgataagctgttgttt

SEQ ID NO: 41311 - DNA, 101 bp, Oryza sativa
  Clone ID: PAT_MRT4530_44669C.1
gtctttctttaaacggcaaggagacggctaatgaggggcggcaaaatggacggcgtgcgcagatccaaagccgtccgcggggcaagacacgacacgagagg

SEQ ID NO: 41312 - DNA, 1461 bp, Oryza sativa
  Clone ID: PAT_MRT4530_4466C.1
atggccatcatgcacgcgcgcttcgaggtctccgacgtcgtcggcggcgacggttccagcagcggcgggagcagcccggcgtcggtctccggcccgtccgacagcgacggatccagctgcagcagcagcagcgccgccgacgagctattcccggacgcgcgcgagcttccctccacctccgcctctgtgccggtgctcgccggcgtcggcttccacccgatctctccgacgtcgctgtccgtgctctccgacatcgacgtgcacatgcagcgcatggcgcgtctcctcccggccttcgcgtcccccgccgccgcgccgcgcgcccaggcgctgggtcggtggctcgccgggttcgacgtcggctgggtgctggagatggacgccggcggcggccggctcccgcggcgggaggtcgggaggagggtgagggtgtgggcgcaggcgctgagcaccatggaccgcgtgttccgcctccggcaccgggaggcgcgcaacccggccaacgaggccgcggcggcgcagctcgccgcgctcggcgagctggcgtccgcgagcgccggcgcgatgctgaggctggccacggccgtcgcggcgctcggggcctcgccgtcggcgctgctcgcggcgctcgacgtgtacgtgccggtgtcggaggcgtacccgggcctcgcgaggatgttctcctggagcaccgccgcggccgacgcggcgctcgccgcgctggtggacgccgcccgccgctgcgtgcgcggcctcccggcgtccatacggtcgcactacccgtggcggatgccgcagggcggcgaggtgcacccctgcgtcgggttctggatgggctacttccgctgcatgctgcgcaaccgcgtctccctctacctcgtcctcgccggcggcgacggcggcgagacagcgacgacgcccgctctcgcgcccggcggcgagggaggcctagtggccgacctgatctcgcgcctggaggccgtgctcgaggagaagtccggcgagctcgcgttcccggggctgaggcaggtgttcatgctgaacaacacgcacgccatcgtgcgccgcgccgtgcgctccgacctcgccatgttcctgccgccgggatggacgcgcgcccgggaggagcgcatggagggctacgtcaagagctacctcgacgcgtcgtgggcgcccgtcgtgtctcgcctcgccgccgcggcgacaaagccggccgccgtgagcgtgctccggcggcggcgagacccgctggcggcgttcaactcggcgctggagaacgcctgcagcgcgcagagatgctggaaggtgcccagcccggtgctccgccgcgtgctccggcgaaccgtgtcggagcacgtcgtgccggcgtaccgccggtgtctcgaggcggctgagacgcccgccgccgcgcgcaccgtcgaggagctggagcgccagctatcggagttgttcgaagggtag

SEQ ID NO: 41313 - DNA, 1009 bp, Oryza sativa
  Clone ID: PAT_MRT4530_44670C.1
atggctccgcgcaagcctgctccagccgcagcgaccggaccggacccctgcaagattggcgaagactgcaccggcttcctcggcacttcgctgttcaacaaggcggatctggcgaagctcgtcgcgtcaagtacagtggttgaaaagcaagccttcttcgctggcgatgcagtggttcatcgccccgttgatggctggaccgttgtcttcgccgccttctttgatgcaggtcttcgcttcccatgcgacgtcctgctccccaaggtccttcaacttttccaagtggagcttcctcaactgagtccctcagtcctagttcggatcgcgatcttcgactggatttgccaaaccgcggggttcgtgccataaactgatcggttcggcgctatcttcttcgccaccgttcactcaaagatggtggtcactccggttgggacaaagaaaaccgtctttgggagtgtgaacttcaatgttcgcgctgtatgctccgatttgtggccagtgaatgcctccatgccaaagtgggagcggcattggatggagaggtggttctaccacacgaatccctatggagctaagacagacgcgacgaaggcaatccgatagggccggctagtgatctcccctaaccggaagctgaaggtggcgattgatgggacgatcgagtcccgtttcacccttttgcggagaaccgcccatcggttgagctgctgtgatttcgtggaggagttttgcatgttggcagatcaccgtaaatgaggatgaacgggttctcgacttgcctcgccttgttttgccaggaggcgttaatcttctcaccctaacccaggccgaaaatgaggcccgaactctgatcggggacctcaccattcatgagtatagccagctcctgacgcgtcaagtcaccggtcgggcaaatcgggtttacaatggctgcccctagcgcgccctggcgacgcgctccaacatgccggggctgaggacgacggcgaggtcctcgaaccactag

SEQ ID NO: 41314 - DNA, 629 bp, Oryza sativa
  Clone ID: PAT_MRT4530_44671C.1
ttaccccaagtcctgacatcgggagagtttagtgtacgaggagagatcaacaataccgggcgctttattttctgaaattgggaatgagtacaaatctagatgcccttaacgaggatccattggagggcaatctggtgccagcagcacagcaggtaatgtccagctccatatgagcgtatatttaagtgtggttgcaagttaaaaagctcagtagttggaccttggggcacagggcacaggcactggtcacagcactgcatcaggcgagcacctcagacctggctgcagacccttctggccaggcgatgcagctgcctggcactttaactggcacggtgcagtgcactgccaggcgcccgttgacttgtggaaagaaattgaggagtggctgcaaagcaagccatgcagctgctgggatgacaacttgagcctgcgggatgaacaatgcatgagggattgccgttgcactgattggtgttggcacttcggggatcaggataatgattaatagggacacgtcggggccattcgtatttcatagtcagaggtgaaattcttggatttatgaaagacgaacaactgcgaaaccatcttgccaaggatgttttcattaatcaaaaaaaaaaaaa

SEQ ID NO: 41315 - DNA, 1155 bp, Oryza sativa
  Clone ID: PAT_MRT4530_44672C.1
atgggtactctttctgggatgatgagagccatagttcatgtcagtttgttcatgttctttgtggccgtgttccctttcaagaactggtaccaaaggcttagcccggactgcctcccgctagccaacggcggcggcggaggaagcggtagcgtgacacggaagccggcgtcgagatcctgcaaggacgacgatggcggcatggccgtcgccgcggacagctcccgcctctcgtcgtacctcccgtcgtcacagctcgattccaagccgctgcgcgctcgggcgccgcagccgtcgtcctcgtcggccgccgcctggagcccggcgcgcgaccacgcgcacgcccaccacaaccaccaccaccaccaccacccgtccgactcctccgacacggcctcgccgagctccaacggcgcgggcaccggtggcgacgtgctgctgcagtgggggcacaacaagcggtcccgctgccggcgcgacgcgtcctcctcggccaacgcggctccctcctcctcgcagcgccgccagaccgcctccgccgccggcaagatcctgcgccgctcgtcggcgccggcggagaagctcatgccgccgccgcccccatccaccaccaccgggtcgtacacgcgcgggtccaacctgaggtccgcttcgtccttcccgacgcggtccgccgccgccgccgccgtcggagacgcacaccaccacaggtccgccgtggaggagcgatcaggcggcgggtacaagcggtcgccggacaaggcgcacaagtccgccctggacgcggcgctgcacatggattccaagaacaaccaccatcaccaccaccacgactcgtcggtgaccgcaaacggcggcgccggcgccggcgagaagatcggctccgagcggtttgagctgccccggatctacatctcgctgtcgcgcaaggagaaggaggacgacttcttgatcatgaagggcaccaagctgcctcagaggcccaagaagagggccaagaacgtggacaagaccctccaatatgtattccctgggatgtggctttcagacttgacgagaggacggtatgaggtgcgagagaagaaatgtgtgaagaagacaagaagaggaaaattacctagatttagggcatcagtgacccagattggttgggtctaa

SEQ ID NO: 41316 - DNA, 881 bp, Oryza sativa
  Clone ID: PAT_MRT4530_44673C.1
gcacgccccaaacaattccctatcccctcatctcactgcagctttccactatactaccaccaccactgagctgccactactcatccagctaactaggagaaggaaaaaagaagaacacagatactttggtaacaagcaagaaattggcacagaaatggctctgaggctgtgggctagctcagctgccaatgccctcaagatctcatgcagtggagccaccagggctgcacctgcctactcaatctccagatacttctccactgttcttgatgggttgaagtacagctcctctcatgagtgggtcaagaatgatggctctgtggccacaattggaattacagaccatgctcagggccatctgggagaggtggtgttcgtggagctgccggaggcgggggcgaaggtgagccagggaggtgcattcggcaacgtggagagtgtgaaggccaccagcgacatcaactcccccatctccggtgaggtcgtcgaggttaacgacaagctctctgagacacccggcctgattaactcaagcccgtacgaggacgggtggatgatcaaggtgaagccgagcagcccgtcggagctggacgccctgctggacccggccaagtacaccaagcactgcgaggaggaagacgctcactaggctcttcctctctgttttttttcttcccattttgtcactccgacctaatttctccctgttgcaacaactgctctgtatccgtatacgattaataactgaatcttcaggctttgccatgtgttcagttggttctctgaacttctggtgggtctatctattcatctatgcttaattagtcacttcaaaaaaaaaaaaaaaaaaaaaaaaaaaaaaaaaaaaaaaaaaaaaaaaa

SEQ ID NO: 41317 - DNA, 487 bp, Oryza sativa
  Clone ID: PAT_MRT4530_44674C.1
agtctcgcgcgccccctcgccccgctcggctactccttcctccccaagccctccccctcctcctccgccccattcctcctcctctccctgtccaccccggcctccacatccgctccacccgccgcctcccactcgcgccgctcgccacatccgactccttcgaatcctcttcatcctctgccgccgcgctcgacttcgctgagcccggcgccgccgaggagtccgacatgccggaggagtcttaccaggaggaggggtacgcaccggaggctgaggaggaggcagcggatgatgatgatgaggaggaagccgtcgaggcctccgcggaagttgcggaggaggctgaggacgtagaggaggtcggcacctcctatgaaaagtttgtaaatataatcaatttaccacaactatgaaaagtttgatcttaacaaaccttttgtatttacaatcagttgtaccatagcatatatttattgttgtttcccac

SEQ ID NO: 41318 - DNA, 485 bp, Oryza sativa
  unsure (1)..(485): unsure at all n locations
  Clone ID: PAT_MRT4530_44675C.1
gctttccttctgcgcggcgccgcctgccgccgccttctacgcgcccaccgctcgcctactgcgcgcccgccggcgccactccgctcgcgcgcggctgcactcgccgccgcctcctcccgcctgagccgctgcgcccaccgccgccgcctcctgcccaaaccgcctgcttccctgctcgcgccgcgacggagaggaaggagagtttgtgctgctggttctccattcaaggtggcttgggtgtgcgttctgatcgatttggcgttctgatcgatttggtgtgacgtgtttgtttcagcagggaaggactgcaaggagcaccccaacgtcaagcagttcaagtccatgcctgatgctgtgtcactttgctcactgaaaaaaaaagagaacatttataggttttttttgctgcttgtgagaggatgctgccgaatngaattaagacagccttcagaatctggtatatctaatggtctgaaaattttaca

SEQ ID NO: 41319 - DNA, 411 bp, Oryza sativa
  Clone ID: PAT_MRT4530_44676C.1
gagcgcctcgcccagctcttcgaacaggccggcatcgtcgaggtctccgaggtcatctacaacagagaaacagatcggagtcgtggatttggatttgtcaccatgagcaccgttgaggaggctgagaaggctgtggagatgttccatcgctacgatgttgatgggaggcttctgactgtaaacaaggcagctcctagaggcgctcggctgttcagcgagcatggcaaagtagtcgacgccagagttgtgtatgacagagaaactgggcgttcacgaggatttggttttgtaacaatggcgacacaggaagaattggacgacgctattgcagccctcgatggacagagtttggatggccgtgcgctgagagtgaatgttgcagaggagcgaccaccgcgccgaggcttttaa

SEQ ID NO: 41320 - DNA, 396 bp, Oryza sativa
  Clone ID: PAT_MRT4530_44677C.1
cagtgggaggaggggctctgcctccatcccttgaagcttgcgcggaggtggcggggctgggtcgtgacgacggcgatgacggcgggggcggtgtggagcggagcggcgacacgggcggcaggcgcggcaggcgctaacggcggcggcgaccaggcggtcggccaccacggcgcgcgcgcgtgggaagcaacggtgcgtggcgatttgagcggtggtgacgggaagcggcaacgagagcggagagggagggcgctcggctcggcgcggctcacgcgcacgcgcgcgcggcgcacgggcagagcgagggagagagagagagaaagagaaagatgggccgagagggaatcggcccatcgaacccgggggaggcaaattagacttttgcggaggaattga

SEQ ID NO: 41321 - DNA, 1511 bp, Oryza sativa
  Clone ID: PAT_MRT4530_44678C.1
cattcattcccggcatggcctcctccatcgccatgtccctccgctccctcgccgccaccgacgccttcctccccaagccctccccctcctccgccccattcctcctcctcctctccccgtccaccccgcgcctccgcctccacctccacctccgctccacccgccgcctcccgctcgcgccgctcgccgcgtccgactccttcgaatccgcttcgtcctcctccgccgccgcgctcgacttcgctgagccaggtgccgccgaggagtccgacgtgccggaggagtctgaccaggaagaggaggggtacgcgccggaggccgaggaggaggcggaggcggatgaggaggtggaggaggaagccgtcgaggcctccgcggaagttgcggaggaggccgaggacgtagaggaggtcggcgagtacgtggagccgcccgaggaggccaaggtctacgtcgggaacctaccctacgacatcgacagcgagcgcctcgcccagctcttcgaacaggccggcatcgtcgaggtctccgaggtcatctacaacagagaaacagatcggagtcgtggatttggatttgtcaccatgagcaccgttgaggaggctgagaaggctgtggagatgttccatcgctacgatgttgatgggaggcttctgactgtaaacaaggcagctcctagaggcgctcgggtggaaagacctccccgtcagtttgggccttctttcaggatttatgtgggcaatctcccttggcaagtggatgactctaggttggtacagctgttcagcgagcatggcaaagtagtcgacgccagagttgtgtatgacagagaaactgggcgttcacgaggatttggttttgtaacaatggcgacacaggaagaattggacgacgctattgcagccctcgatggacagagtttggatggccgtgcgctgagagtgaatgttgcagaggagcgaccaccgcgccgaggcttttaatgggatagcaggctttgtgggggtttaacagcatcggaggcatcatagcacgtctgatactggtttagtccctcaaatagtagctttcttgcgattcttggttctgtatcctcccaagtcctttctcatgcctgctgtttactgctcctttcttgttaactgttggttgtggccacgagttgatgcacgtaggctactgttatgatgcccctctaccccaatttgtcgatgcatccaaaagttttgtctaacatttatctatttaagcaaaagaagagcatggtgtgtgtggcattagtgctgtttctaaaacgcgagccgcgttctcgctctcgctcgctcgcccgccttaattttaaaaaaacctcctatgaaaagtttgtaaatataatcaatttaccacaactatgaaaagtttgatcttaacaaaccttttgtatttacaatcagttgtaccatagcatatatttattgttgtttcccacaaatggtgggtttattctattagtctcaacttcagttcctttc

SEQ ID NO: 41322 - DNA, 314 bp, Oryza sativa
  Clone ID: PAT_MRT4530_44679C.1
tgtggggaatcagtagaagggggaaataaaaacaagaggccccactaaacgatgcagtcacaatttgtagctaaaataacaccagcaattcttagtacagaacacaaaaaaggaaaaatcaacacccgactgcgagaacagtcaatgatgaaggcgatgccacaccatactattattaaaaggcaacccacattacaaatccccatgtaaccaaagggaggacaatagagcatgaattgctaaaaaatcgaggcgtcaggacagctttggataaggatcagtcccaagcactagaaaaaccttgcccgacacct

SEQ ID NO: 41323 - DNA, 697 bp, Oryza sativa
  unsure (1)..(697): unsure at all n locations
  Clone ID: PAT_MRT4530_4467C.1
atggcgtgcctccccgtccccaccatgctcctccgctccctcttcttcttcctcctgcgccccacctccctgctgctcctcttcccacagcagcaaattgccgatcgtggcctcagggcctccttgacctctactggtcgcatccgtgcccgcgcgctcaactacgaccccgacatctactggagggacacatatgtggtgtccgtgcccttctttgcgatgttgtccgcagagatgacgcttggatgggctgccaagggtgcgtttgccacaagcaacctctactcgttcaccaccggtgacggatatgagcgcgtcacgggagtggatgctgtcgaggagcgggtcaaggaggaggaacccaacgccgaagagcgcgacggcgatggccggtcaggcgcaccccaggggcgtgccactgtcgcctccgacgctccaaagagcgcacgcgggtttgggcgcacggttgggtagctttgcgatgttgtccgcagagatgacgcttggatgggctgccaagggtgcgtttgccacaagcaacctctactcgttcaccaccggtgacggttagtgtacaaactcgctcggttcctccatgtactgcgtggacaaggagtgtggatgaaggatggacgagtcantgtcaccaggatatgagcgcgtcacgggagtggaatgctgtcgaggagcgggtcaa

SEQ ID NO: 41324 - DNA, 3092 bp, Oryza sativa
  Clone ID: PAT_MRT4530_44680C.1
atgtctcctctcgcccttcggcatttccttgtgaaatggtttttaaaattctcctccctgtccctctaattcttttagctgtcaaacctgaaggacaagccatcagctttgtgcatgtttggaagtcaagtcaagctaagcctcaagcttcgtgcaaagagcgagacagatggtcagcatgagggacaatttcatcgaatcaggaccctgtcagtttcatggggcaactcagtgcaattctaatagtattccacatcagcctcttgaagatcagcctcaaccccaagtcatggctaatcaaactcaaacagtggaagagttgttacaacagatgcgacgtcggtaccaaatataccagatgcaacggcaatgtcaggagtcgcgtcaatgtcaccaaccgcaggtgcaagtccagatgccagcccagaacccgaatcagagtcagagtcaggagttcccaatattggcaccgaagaccctctagtcccaatcctccttccagtccccttctcctggaaaagacatgagttctcatcaaatgcaacaatgcacttgaattggtcaatagccgagctaaccgagagaaggttaaccgttagggatatagctttaccatcctccatagctgcattagcctgaggtgcacctcggcctctaccatgatctccaatgcgacctccacggtcacctcctctaccaccatggcttcctccaaagccaccatgatttccaccaaatccaccataccatcctcgcattgatcccctaccaccactgtttcggggagtgggacaattgcagctcacatgacccacttggccacaattgtagcattccctatcatcagctacaatgtatgctgatcccataggatttgtacccctcatcaattttaacctcatttcctcctgtaccatggctgaaatggcctcttccatagtaggcaaagtagcctggtgaaacatagctgctcttctatcctcaaactcattgttcagccccttgttttgagcctcaaccatcatcattacacttccctcttctgagtacatgctgctcaatgttttccatacaactgctgcattttgaatggtttctagcatccgagcaatagatggagccaccgaattcctcaaccatgacaccacggttgaatttgtagtattccacatcctccaagctgaactttccttatcagcaggctctttataatcctcctgcaaaaaatgatccaccccttttgccctcaacattagttgggccctccttgaccaactcaaacaattcttacttccttccaatctcaattcatttggcatcaattctagtttcaattcggctgatcctccacctctagtacctatcattcccaactttactagatcctccaacaaatctttcatctcatcctttatgacaagggatgatgaagcaatcactacttctttttcctgacttcccacaacaccttccccttgcatggtaggatccatttcttcctcacaacagagtattgaaccggaccaggcttcaggcccctcatctgcatttgggttctgtggaacaattgacatgacgtcatctttagaaattcgaccttgtccatgggcaatgccatgaggaggtgcattgatgaggctggccttgacaactgatgttgggaaattcaacaagttaatcattttcctccagtgtgtaacgatggaattgcactcactgttaatacgactttggtagtgttcctccattgcatggcatacatgtttaaggaagtgtctcccattcaaatcaaaatcaacatttttaccaagcttagcaaaaatagctgacacctccccatcactgcataaatgatgtacaattattcctttgcgaccaagaaaagcaatatcatctgctctacacagaaggaaagacatgaaagcagaatatgcagtcacatcatttccaaactggggacatgtctgctcaaatgcaattaagttcctaaaatgggagacggtgctctgatcaacaaacaaataaggaaccatcaaagtaccattgtcaaagctaatatctaacagagaatggggattattcctatcaaatgactttttcttgaattgaactccagcttgatggtattgcactgcccgacggccacgaatacgtggatggtgatcctgaaagcagttaagcaaaggatctggtgacatatcgtgattgctatcggcaagcttacgtccaattttcaaatacctatagcatatattagcgaaagaatgaaaatatcttcctctctccaggtattgtgaaccctcaaccagctttttactaggcttgaggtacatctggaacaaatgcagcatatgatggaaatctttaggccgatgtgcttcctggattgctcttggatggtattgtatgaagttctccaacgattgagctactttgtctgtgagaaatgaaataggcctctcatttccagcaaaaagttcatatatcctcctaacaataaagaaaggaatttggttctctagtagcatcaggtcttgttcaatacagctgtcaaaccaggttccaatttgccaattattacattgagaagattcaagttcctcagtgtgatcaaagtcagttccttgactagtaacttcccgacttgaaccagcaaggacaagttctctctgtgtgcagatagagttatccctgctgcattgctcaccaaaattaccttgacttgtagtgcttttgtgtattgttctttccattataatgtccgaactgtcagcactacatatatttgcacccaaagtggatggaagtattccctctaaacctctgaaatggtgaacaaaaaggcaagaatcaaggagtagcatctgcagaaatttgtcatgttgcatgtcaatgtcttcatagcatgcccgtgcttcctcctctaaatctttgaccaaatttaggtagtcctccaactttatttcacgattcagtttaagaaaaagatcaaggcaattccatttttccttctcaaaggctagcaagtacgacaatccatggtggtatggaccaattgataacataattggctcataagccccatgatccat

SEQ ID NO: 41325 - DNA, 262 bp, Oryza sativa
  unsure (1)..(262): unsure at all n locations
  Clone ID: PAT_MRT4530_44681C.1
gancannacncaccaatngcgctcgtctccncctcctccnccaccacngccgtcgcgcgnttccccngcgcnannggcctcctccttcctcngcngcgcgcnaggagcggcaggctgctgctgaggcaggccgagtcgtcgtccgcgnnggcntcgttcgccgtggcnccgcggcgcctgacaggccaatctggttccccggcagcaccccgncgncgtggctcgacggcagcctccccggcgacttcggcttcgaccccct

SEQ ID NO: 41326 - DNA, 297 bp, Oryza sativa
  Clone ID: PAT_MRT4530_44682C.1
tctccccagagatctgggacaaagaactctcctggggtaccaaaccccagttttatggttgatacatacccccgggcaacaagccgcagcactgcacaagcaggcagccaaccaccagccacaagcagccagagttcggtcaaaccacacacctgattgatggaagactgcctatgtgccgggtcgtgacagaggaagggggcgtgacgtgggaagggtttgggttagaggagttatggtgtttatggtgatgatggaaacaatcaagtgggtactgatggataaccaagtgggtat

SEQ ID NO: 41327 - DNA, 1530 bp, Oryza sativa
  Clone ID: PAT_MRT4530_44683C.1
atgggcacgacgtcggtgcagaagagctggcgcaaggcgtgcggcgcgatcaaggactccaccaccgtgggcctcgcccgggcgcactccaaggacctcgacgtcgccgtcgtcaaggccaccaaccacgtcgagcgcccgcccaaggagcgccacctctccaagatcatcgccgccgcgtccggcgcccgcccgctcgccgacgtgtcctactgcgtccacgccctcgcccgccgtctctccaagacgcacaactgggtggtggcgctcaagacgctggtggtgatacaccgcgcgctgcgggaaggcgacgccgcgttccgggaggagcttctcagctaccggcgcggccgcggcggccattgcctgcagatgtccagcttcaaggacgactccaccccgctggcgtgggattgctcggcgtgggtgcgcacgtacgcgctgttcttggaggagaggctcgagtgcttcagagttctgagatacgacattgaagcagagcgtctgaggacagcagagggagctccaaagggtcagagtagaactagaagcttaggtaaggatgagctcttggagcaacttcctgcactgcagcagctgctctatcggctagtcggctgccaggtgctgaaggaaagtttcaagatttattgtgcagtcaatgatggaatcattaatcttgtcgaaatgttcttcgacatgacaaaaattgatgctatcaaagctttcgacatctacagaagaacaggacatctgccgccgtcatcatttcttggaacaatggaagagtacatcagagaagcccctagaactgctcctgttgcaaataagaccgtagaatatcgacaacttgaattcattccaaacaaggaagaagaacctcctcaaccgttacctgaggtgttagaagaacctgttaaggaggagattttacctgaacctccagaagaaccccatcatcctgcagctgaggttgatgatgaacctgaacctaccacaaccgctgatttattgggtttaaatgaagtgaaccctgctgccgcccagcttgaagagaacaatgcactggctctggccattgtatcaccaggtagcaacacatctgctggtgcaggcagtggcttcggtggcatgcttggatcgtcaggttgggagctagcgttggtcactgaacccaccaacagcagcagcaaccaactactgacagagagcaagctggctggagggttcgacaagctgctgcttgatagcttatacgatgatgcatcaaggaggcagcaaggagcccagatggatcatcctcgggatccgttcgccatgtcgacaagtgtcgcgccaccgaccaacgtgcagatgtcgatgatggcacagcagcagcaatatttccagcaggagcagcagcagcaaatggtgttagggatgccacagcaattctcagggtggcctcagtatgctggtgtttctcaggcgaatcctttcggtgatacgtattcaggtggtactctccatggaagcagcagcttgatctga

SEQ ID NO: 41328 - DNA, 1781 bp, Oryza sativa
  Clone ID: PAT_MRT4530_44684C.1
atgggggaggtgaaggagaatgaggtggtagagatttttgagcatgatcatgacaacaagatcagatctcctgaaaactctgtgccaccagccatggtgctggacctcaacgagggcttcggcgagggcagcgaggaagggggagttggcgaagacggagatgaagaagacgatgatgaggacgacgacgacgacgacgatgacgatggcggtagcacaagcgaagttgccggaggagggaggagctccagcaacaacagcagcaccaaccacaattccgggagcgacaaggaccatgacatgaacagcagcagcagcaaggccgacggcggcggcgacagggtgccgacggtgcggcagtacaaccggtctaagctcccccggctccggtggacgcccgacctccacatggcgttcgtccacgccgtcgagaggttgggcggccaagaaagagcaacaccaaagcttgtgcttcagatgatgaatgtgagggggctcagcattgctcatgtcaaaagccatttgcagatgtacagaagcaaaaagctagaccacgagtctggccacgagagaggagccatctcatcagtgttttcgcccatggagttccacatgaggagaggggaccatcgtttccaccaccacgacatgttcttccagcgagccgccgccgctggcgtctcgccgttctcctccaggatgctgcacgagaacggcggcgggttcttcgcttcgaggaatcccggcttgccggagtccagccggctctacggtctcttccaacgccggcagcaagctcccatgcaaaaattcgacttcaagaactgcaatagcttcagtaggaaccaggagtgggcgttcaaccagcagcacgcggcggcgagggccgccggcgccgtcaacggccacggcccggcgaaagggctcatccacgagatgatcttccggaaggaaggaaagccgacgtcgcatctgttcgacgtgagggacgccatcgcctccacccgggtgacctcggcgaccacggccgccgccgccgaccaccggctagacggcgccgggaaggccggcaactttgattggatcgggagcagctcctcccggccgctcacgaggacaatgtcagcggcggcggcggctaccatgggcgaccaccaccatcttcggtggcgaggcggcgccgccggcagcgggaacacgacggcgtcgtcggatccggtggtcgcaagcgaagctgccctaggttccctgctcgagagggcaaagacgaaagcgaccgaggcgatgcgcctcgagacgccggtgaagatgacggcggcggcggtggcggcggaggagatcaacggcaggacgccggacttgcagctgagtttgagcccgaacgcgggagatcacagatcagccggcgagaagaggaagttcttgagtgagcaggaggtggacagtgacaagcagcagctgccactcacgctttccctgtcgctccggggtggtggcgacaatggcggcggcggcggcgcagaagccgccgggaggttagaggaagagatgacaggtagcagcagtagcaagaaggccgctctggggctgagtactttggatctgaccatgtcgatcaaggcattggagtgagatctttcaagtacttgtcccaaggccttccaagacatgcacactgcaccatgagattaattattaataagactgttaattttgtttaaccatgcttccagaccatatataatacatatatatcttatgttcaaaaaaaaaaaaaaaaa

SEQ ID NO: 41329 - DNA, 1207 bp, Oryza sativa
  Clone ID: PAT_MRT4530_44685C.1
gatgatcctcctatggaagttggaagcttatatagtatgattgaatttaggtcaattgtgaggcaacacgctgttaaggggtaatttcagcttgggacaaagaagattgataaagaaatgtttaggggcttttgcacagctgagagatgcccatgggctatcgtggcaaggttgatgcctgatggtgtgtgtgtattgcaggataccataaaaaaattcgcccattctcgtgcatcaacagggagagtaaagataaagatggcaagttataagtgggtggcaaataacacaattccttttctaaagaaggatccaactatgggtgcaaagcagctgatggggacttagaaaccaagtacaatatcactttaagataccatactgtgaatagaagtatggcaaggctaaagataagatttttggtacatatttgtttaacttcaaggctaaggttgagctgaaaatgtctaaaaagtgttgtggagatagattacaagagattgttgatggggtttattttcatatattctattgtgcactcaaaccttcgattgatggtttcacgaatggatgtcgaccatacttgagtatacactccacagcccttaatgggagttggaatggtcaactagcttctgctacatctatagatggacataattggatgtttctagttgcatttgtattctttcaaagcgagaccacttacaattggacttggtttatgcaacagcttcattaggcaattagggaacaatcacacttagcaatctgctcagacacttgtaaggggctggataaagctgtgaaaaatgtatttagtacaacagagtatagagaatgcttttggcacttgatatagaatttcacctagaaattttatggtctagtgtttgggaacatataccctacagctacgtcttacataacagacaaatatgagcattacatgaataattcactagacaaatccagatgtgaggctatatctagaaacttaccacaactactttggatgaggagtaagttcttagaaaagataaaatgtgactttatcaccaacaatctggtagagtcatggaacaaatggatcaaggatttgaaggatcatcctattgtagatcttgtagatggcatcagagcaaaaacaattaacctattggcaaggcggaggaagataggtgagaaattggatggcgctagatta

SEQ ID NO: 41330 - DNA, 235 bp, Oryza sativa
  unsure (1)..(235): unsure at all n locations
  Clone ID: PAT_MRT4530_44686C.1
ccacgccccttttaagnggcgcaacttttacccaccacagagatctctggcaccttcaagcctcatgctcgaccgatttaggagtggaacccgncctttcttgtacacggctgtttggcgcgccatgatgcatctgaggaagaggaggatagagacttatagaggatatatatggaaattcatgttggtgcccactgtgatggtatgctcactgtggtttttaagatccttttct

SEQ ID NO: 41331 - DNA, 3706 bp, Oryza sativa
  Clone ID: PAT_MRT4530_44687C.1
ttttttttttttcgtttcgatttttttctctttttttttttttttttttttttacatcacaatatttaaattaaaatattcacattatttcagttccaagagcaaatagattacatcagatttaacttacacccaggtgcaattcagcacatctaaccactggctaaattctggggtgagggtcatccatattagccctgcacccagaattaatttttgacactgaaatcagcctaccaattaacacctatataaatttatgtacaatgcccaatatttcctacctcaccccggtaggacaagaatttacagtccgtaatccgtaatgtatattcacaaaacaacacaaaccctattctgctcttcacaaggcaagcgccttgtaccattgtccatggaccttctctgatatgactgccatctttatcagcacctccccggccttgacaaccctgtcggcgagcttcgccgcgccgaggcgtcgcagcggcgcttcggctagcttcttgcccttggcgccgccaccgaggacgacgccgcggaaggcaaagtagaccgcccgggacaccttaccgaagacgatgtcgccggcctggaggctcttgagaagcatcttggttgctagctctgtcgtgtcctgaatctgttcctccggcagagagccgaccgaggccagagagcgcgtcatcgcctccacgatctccttcgttgatgcgtcagcgttgttgtcgaggagcttcacgagagcgtcgtagagctctgagatggtattctgtagctccggaggagcgatcttcaacatcagaacttgatgcaggacaagcatgctcgtcgcgatcactatcaccttctgaaactgatcttgcacagccctcaacctcagcagattaatttggaaggtctcaggggttgactgcatgttcaggccctccacattgctgataagttgcaacaagccaacccttgtcagcttgtcgatcttctcacccttgcattctgggagaccagaactgctagctgcagacgaagaagcctgcggcgctggagcaccgtgaccagctcgaagtaccggaacaacgtgctgagcatgatctgctggcaaagcttggagagactccaaatgtgagctccactcttgttccacgatgctcttcgttgccgaaacccactgcttagttatagggagagacactgatgcattagcaggaggtccatagcgatccgtgaaagccttctgcaggtattccactccggcagagcctttaataattggttgcatgagctggatgcgagccttgctaacttcagtttgcagttgctttatttcttcgagagtgaaacgcaggcccttgatgacagcaatgacaaaggagctgataccattgtcattaacttcggaacttgcagccaactcgtttaacaatttctcatgactcctcttcatgtcatcttcctttgcaggggcagatagtttcctgaccatatccagggagtactgcaaaatctgccccagatatcgcgtgtcctgggagcctgactgaagcacctgagacaaaatttcgaggtcaatgttctcaagaatttcctccttcaactcatttgaggccaactcatgtaacgaattcctgacttcctttacgaggttaattaattggctataatctggtttgtcccctctcatcgaatcagtaacaagatcccaaaaggctttctccatcgttgctttcactttggcctgaaagtccttctccgcggaactgacgttatcagagttgcgagcaaaagaaacatcgtcctcatgaagcatctcattgaccatttgctcattgtccgtcggcggtttcattggagatgtactgcttgacgatgaagcagctccaggcaaagattgggcagtgaaacttgatccttccacagtaggcttggaagtagggtttggaacctgtccagatgaattaatgctcaaaggagtagatacatttgcaacagatgttgctaatggatttccgttttccttcgcctcaaagaactttgaccttgtatccgaaagagcagagttcatccgctcgatgcctgcatcgccactcaggtgctgaatcttctctcttaacagcttctggtcatcagtaacctgtttctgaattgccttcatatcatgagaaaggtcatgtgactgcccatctgaacttaacttgcatgtttgcatcattgacagctcaagcttgcatgcagccctgacaagatcttgttccaatgatttggcatccttcagtttccacacaacaaagtggtaaaggtaagcgcaccatgctttatcaaaagcagccaactgagtcctgaactttttctgactggcagcatcagtcgattgcatcgaggcacctcctggtctatcaagtactgtcttaaccaatagctcaaactccttaacaaagttttctgctgactccataagtagattctccttctccccttgtccacttaatacagcacctggatgagccagtatcatataagagcagaggactacccgcagtgagtatctagaaagcttgcttgtctcggaacccttcgctggctttttcgcagctaccctagatctgctagcaggtgccttcctctttggagatccaaggcgtttcagaaggtgatcaatgttctcggctgatgatgaaccagttggctgagaaagaagcaaacgtttctcgaaccggtcaagcactgccttggtggtctggagagtcgttggagattccatcaacatagctaaattttcaaatggcatagatttgacagacatctcattaattcccaaggcgtcataagcttgaaccagtgcatatgttgtcttgttagatttcaaaaatcttttccagcatcttgccagctttgttgaaagaaattctgcatgcttgatgtaatcagcatgggcagaactacggggacttacccgctgcttcaagtactcagctctctgcctttttgccttctgaagcttgctttctagctgttcttgcaactgtctcctctctgattctctcttgctgcatacagtcttggcagctcgttggatgtgcaaaatcctagcctgggctttcctcttctcagcttccagcaatgccagtcgcttcttttcagcagcattgcgcttttgtaagatcaaagacttgactcgctccgtgtatttcctctcagatgtctgtttccgcacaagggaccgcgccgttctctccttcattgccgcccgcttctgcatatgtgcatgcaaaagacgcatgcgatttgcctctgcttgacgaacacgagactcgactcgagtcccgagttcttccctttctttctcgatccgcatttccacgatgttcttcgccgcttgtcggagttcatccaacttggctagcctgttctgtgcctttgccaagaggctcaaccttttctgctcggcggcctgaagcttcgcttcgaggcgctgaccttgatcttcctcttgtgatgaccatgatgggctccgcggcttcttcctcgctttgcaggacacccattcatggaattgctgcctccggagctccgcctccttcagcttcgcctcgatctcctccgcgctcgtcggcgccccgcctccgacgcggctcccctccagcaaccgccgcctgatcctcggcggcatcctccccgccgccgacgactccaccgccggtatctccat

SEQ ID NO: 41332 - DNA, 525 bp, Oryza sativa
  Clone ID: PAT_MRT4530_44688C.1
tcgctcgactcaagtgaagagtccgccgcctttccctcctcgccgccgctcggatggggatggcccccgccggtcgcctcctcctcatctcctgcctcctctgtgtgcccaattcatttggatttgcatttgctgtggaggaggaggaggacggcagcgggctgatgccacagctctcacccaccggctctcccaaccccttggttcccttcctcgcgcccgcccctctcgcgccattcttcaacaccacccctcctaacttgtcaggcaagtgctcattgaattttactgctgtcggtgacctcatcaccaccactgctgtcgactgctttgcgtccttcgccccgttcctcgccaatgtcatctgctgcccccagctccaggccatgctcaccatcctcattgggcagtccagcaagcagactggctcccttgctttggatcccaccgtcgctacctactgcctctccgatgttcagcagctattgttgagccagggcgctagtgatgagctccacaacattt

SEQ ID NO: 41333 - DNA, 461 bp, Oryza sativa
  Clone ID: PAT_MRT4530_44689C.1
cccagccaaaaaaaaagggggggccccggtaaaaggggcccccaaccgggcaaaaggcccatgaaaaaaaggggcccccggggggggaggaaaatttaaaaaaaaaaaaaggccccccccaaaggcggaaaaacggggggggggccccccccccggttaaaattttccccaccaaaaggaaaaaatggggaaggtaaatcggaaaaccccccccaggggcccaattccagtttttgggggggggggccccagggcccaaaccaaacccccaggcagggcggcaagggaaacccggggcaaaaaggcgggggccctaaggataaaatcccgggcttccagggggggggggcttccccattaaaaaatatgggagggggttttaataaccttctttgagcccaggggggaaacccccccccgggggccccccgaggccctggacaaatctccgggggcccccc

SEQ ID NO: 41334 - DNA, 784 bp, Oryza sativa
  Clone ID: PAT_MRT4530_4468C.1
ctgagagtgaactccagtgaagcagtaacatttcaacaagaggggctggcggtgtgtatactttgatgtacacattttaaattgatgacagccatgcacgacttgcttccgccctgtctttgtgccattactacaaagtcacaagttactaactatcagctaccatacctgtatggaagccaataacaacctgtatggaagccaataacaaccaaactggcatgattttggcaacctgtttccctacccttgtcggtgctgaagcaatctcattgtcaatgagggaggtgaaaattcggaaatggaagccgtccatcctggaaatgaagctggaatgagacggtcaactgtaacaacgacacagtctcaaccaggatatttttccctgtgccgagctgcttgattgatactctttagtccagtatttctctctgtagaaaatgcttaaaattgttgctcttcctgcgacctgctctccatcaccaagtcaaattgtccagccatgcagcactgggagcattgaaatccatggcgggcaggcagagatcgagttgtacaagtcacaataatctctccccttgtctaactaaagtataaaccctgaagtggtcgtaggtttgctttatggcttcaacgtgtcacaaggggctaatggtaggtcaaatatcatccacgtacacagtaattgcagtaattttctcatgtataattatagttttaaaaccagtactactgataattaactggtacctatatatgcattgtcagatatcgtgcttctatc

SEQ ID NO: 41335 - DNA, 390 bp, Oryza sativa
  Clone ID: PAT_MRT4530_44690C.1
ttttcggggggagccacacgcgcgtctacccccacagggaaggatcgacggaggtgctgtttaattgataacgggtgttaaactatacttcgcactggcaaccttgcgaagtaattggcgatcaaagaaaaggggcaagactgaagaatcttggttgctgaatcagtgcataggaggaacattgggactgattcttgcaaaggcaagaacctgggccaagtcacgacgagcgataggtgatgcatactcgaaagtacccacagtatagcaggtactcatgtgacagatcaatgctaattgccagttcattcatcgctgcacgcgtgcttcgaccaagggaccgctctatcaggaaaggctcagctgctctatgggaacatgtgaacactt

SEQ ID NO: 41336 - DNA, 1197 bp, Oryza sativa
  Clone ID: PAT_MRT4530_44691C.1
atgcgggccctcctgcgcgccgcgtcggtgctccgccgcgcggcggctccggccctcggcggcggccgcgccgcgccgcttccccccaagaacttgcctgctgtctgtttgaatgggtattctactcttttggctccagcaaatgaagtgctgattccacaagaacttctatccagcaagactgtttggactccagatcggcagtatgaagacctagtagcccgagtaacaaacttccacaatgaggataagggcttcatggttttagatggtgatgtttttgatgttccaatcaggaaggatattgttcatagagtaggaacacactcaactaaaactatcagtgaagtgagcggcacaggaagaaaaccttacaatcaaaaaggaactggcagagcacgacatggtacactgcgcggccctcagtttcgcggtggtgcaaccatgcatgggcctaaaccacgaagtcatgcgattaagttgcagaagaaagtacggcgtctgggacttaagatagcattatctgctcgaaccgctgagggaaagctcttggtctttgatgacctcgaagttcctagccacaagacaaaaaacattgtgcagtacattggccagatggaaggcacaaagaaggttttgttggtagatggaggtgacattgataagaagttaaagctggctacccagaatcttcactatgtgaatgttcttccatccattcagttgaggctgctccactccaacatggacgtgacagcaggagtgagtgagcaagaacagctttgtacggtagcctttcccatcacaggttggtcaaatggtacgagcgtgcttgctttgggggacaagaacatccttcgtgtactcagaaggcacaagacaaagaaaggggtttttgtacgaaaaggtgaagcttttgtgcctgcttaatgtacttcgaccccctaaagcttcatgcatgccaggtttcactttgctggtgtaaggcattagcaacaacacaattttcctgttcctttttgaaaatgatctatttgcttctgctagtgatttcagtgaaccatgttgcgtcagatccaatacatcaaagtaggaagtgaattggtcatcatggtgtgcgctcatgactccagatttctaataaagacagttctgataaacttgacatgttattcctaagatttgctattcattccg

SEQ ID NO: 41337 - DNA, 1021 bp, Oryza sativa
  Clone ID: PAT_MRT4530_44692C.1
atgcgcaacgagaaaaaggaggcggcggaggaggaggaggaggaggagaagaaattccggtggctggacgtggtgcgatacgcggcggccggggttgtggcgttgctcgccgtgggggtgctggtcggggccatcgtggtggtgctccggccggacgcgctggtcatgaaggtcatccacggctccatgttggtaaacctgccgccgccgagcttgacgttcacgttccagctggaggtcgacaacccaagcgggcgcgacaccatgagcttcaccgacatgtccgtcgccgtcttggccgtctccgtctccggcggcggcgtgatcagcatggctaacctcttctacttgcccaacatcacggacttgcagccggggaagatgatgcaggtggtgacgacgcagtggacgaccaacccggaggcggaggtcggcgactacttcgtgaggaggctatcccgtggggaaaccatggccgtcaccctgcgagtccagggcatcctcatcaccaggttggacaccctcaacggcgacgggccggtccacaccagcaaggccaacgtcacctacacttgcttcaacgttaaactcggcgtcgacaagtccttgaactccaccgacgacgtttcttgcaatagcaagcagtggcggatctagaaaaaaatagtagtgggggctgaataaactacatcagcataaatcgaaccttcagtccccacatcctatagatctatggaaaaaaaatttagtgggggcttaggggggtctccactatcccgggggcggtagtggggtctcgagacccctccgcccccattgtgaatccgcccctgccagcaagtagctacgtacctatcacttactgtacttacctacgtacgctatatacatatacttatatatctgcatatagatacatacatatgtatgtatgtatgtatgcgtgccgcgcgtgtgtagatatatatatacatacacacgtaaaataaacaaaaaataattaatgaaaaaaaaaaaaaaa

SEQ ID NO: 41338 - DNA, 265 bp, Oryza sativa
  Clone ID: PAT_MRT4530_44693C.1
ggagggaaatttatgggcatgtacaatttggccgtaaaagaaagaatacaacggttttaagcaggggttttttaagtccacggggaaaaatcataggccggcaaattactttgttttatacgggttttaaagaaaaaaccaccaccttttcattttttcacacaaagtttgttcaagcagtttaattaatttcttccacatgtacgaaatgcattctttttttatttcgggatcaaattaaaataattttttggagtttcagttt

SEQ ID NO: 41339 - DNA, 699 bp, Oryza sativa
  Clone ID: PAT_MRT4530_44694C.1
ttttttttttttttttttttagcaacaagaataacacacaattcattcatgcagctttaatcgtttgttacaacaaaagaatcactcactggttcagtttcacacaaaactgtactgagggcagcttcaaagggtaaaaagaaaaaaaaaatcctgcttacaaaatcaccgtgttacaatcaacacatcaaacaaatcatatacctctgccacgctcatgtaaatgggtgtgtacccgtatttacagtgtttctgattccatttacaactgcttcaagaactatacataccattggatctatgcacacctttttttttttggctgtgagaaagagaagtaacactggcatacaacaaaaaactctgcacaccaagagacgcaaacctggcattcggcaaactctgacatcagtggctaggcttctttttaggcatcctgaatcctgcgtaacagaagccaacttttagcgtcggacctagtcttcaaaggggaaaaaaagggtaggactgatccattatgcatttctgtttcttcagtgtaccacctcatgatttttccaaacattgtaagctcctgtcattgtttcgattgctctgaccacttctgtaatattcatgtgcgctgtttgcactactacatcaaagattctgtatacatccccgcagaaaaataaagattgtgcatctatcatttgcttt

SEQ ID NO: 41340 - DNA, 180 bp, Oryza sativa
  Clone ID: PAT_MRT4530_44695C.1
atgccaattttgcttacacgcatctggtggactggatccacactgttgatcgatataggcgagagcaggcagaaacaggcgggcgtcgctgtcttcggcgggcagcaggcggcgacgcggcggcgaggcatcgccgtcttcagcggcgacctagtgacgtggcggagggagggatcctag

SEQ ID NO: 41341 - DNA, 495 bp, Oryza sativa
  Clone ID: PAT_MRT4530_44696C.1
gctgatgactcggagctatttccagacgtgctagaaggtgaggtgtcgtccaacgacaccaccacgcaacaatgctcgtcagaaatatatcgtgcgatttctgctgctgctgctgtgtgcgatgcgaacatttcgctggagaaaaagaccagcgcactcgactcgaccaccatgcatgcgctgcgctgcgctgcgctgccatgtgtgcgcctcggctcggcgacagcgcacggcgcgtatgcgattcttgccttggactccatgccattgcagcgccgtgccatgtcgcgccgtggccaggccgccgcgccgcgccgcgcccaagtctttgactcgcgggacgcgccgcgcgcgcgcttttctgcgccggaatgcttgaaattttcgaccgatcggggccctcgttctcccgacatctccgcgccgacactgcccggtgttgcttttgctttctctgcagatcttcttcaatccatcgcgagatctttgccgtga

SEQ ID NO: 41342 - DNA, 452 bp, Oryza sativa
  Clone ID: PAT_MRT4530_44697C.1
tcatggacgaaagcgtgggcggtggaagtgtcctccagcgacgggcggcggacgatgggcgaaatcggttaacgacgggtgaaatcggtcggaggcggcgatggtcgcgggtcgccgacgtcctttgcgccgagccatggagaggtgaggtgctcccttccccaccccgcccatgaatcggcgtcgacatcgacaggtgagttgaggtcctcgctcgatctggtgctcccttccccaccccgcccatgaatcggcgtcgacatcgacaggatctcttgaggaggagggggcggttgacggcgggatgcggggaggagcttccggctgcgttgaccacaccctgattcctccctcgaaggatctggcacggatcaggcctcccatattctgcagtctgcactcgcgccggtcggcagcaggcgctggagaccctggccacgcaaagcaggcat

SEQ ID NO: 41343 - DNA, 207 bp, Oryza sativa
  Clone ID: PAT_MRT4530_44698C.1
ctattttcctcgctcgatctggtgctcccttccccaccccgcccatgaatcggcgtcgacatcgacaggatctcttgaggaggagggggcggttgacggcgggatgcggggaggagcttccggctgcgttgaccacaccattctgcagtctgcactcgcgccggtcggcagcaggcgctggagaccctggccacgcaaagcaggcat

SEQ ID NO: 41344 - DNA, 845 bp, Oryza sativa
  Clone ID: PAT_MRT4530_44699C.1
gcacgagggagagagagaactagtctcgagtttttttttttttttttttttttttttttttttttttttttttttttggatctagagtccatccactcccatgccggttttcccggatcgaccaagagctcgagggagagggcacgggagaaggctggcggtggaagtgtcctccagcggcgggcggtggacgatgggcgaaattggtcaacgacggctgaaatcggtcggaggcggcgatggtcgcgggtcgccaacgtcctttgcgtccggccatggagaggatctcttgaggaggagggggcggttgacggcgggatgcggggaggagcttccggctgcgttgaccacaccctgattcctccctcgaaggatctggcacggatcaggcctcccatcgctgcctccctcccacagcggtggcgtcatgatctgtgatgcacgatgataatgaggtctgcactcgcgccggtcggcagcaggcgctggagaccctggccacgcaaagcaggcatggggatggcggtcaggatcgatggatggatggatgttcaattcgtatgtgttccaatgaaagtcaggatgttttatttgttttattttctctccatgatctatctactcaatcaatctctataggcaatagctgcttgtttttctttgaggaagcatagctgccatgtttgatcagttaattgcagcttatttgccggcgccagatatgtggtgattgcttgtgttcgttgatgcgctgtataacatacatgcatgttccatcgatccattgtagatcaatttgtagtgaatgctagatcattctgaatttatgattattcttttcatta

SEQ ID NO: 41345 - DNA, 805 bp, Oryza sativa
  Clone ID: PAT_MRT4530_4469C.1
atgtatggcatatcaactgctatgcttctgtccacacacgagaagcgggtgaggagaggatcaaggtgtacctggtgccgtggatctgggcttgaagaagactgtttcgactctgtgcagcactgtacagcggggatgaagggaggaggcgcctgcaccgaggatggaagggaggcggcgccggcactgggaaggaaggggatgcggtgccttaggggaagcaggcggatgcggtgggaggcgctggcgccgccgccggtgcgcgacgagaggaggcgccggcgcgcgacgagacaacaaggagaggcggcgcgggagccgctcgagaagagaagacgggaggcggcccggagtggtggatttccaccgggaggagggggatccctcacggcgacgttggaccggcgagctgatgggggcgtcgcgcgaggagggacagaggagctgacggacgcgaggagggacagaggagctgacgacgagccgaaacggaggggaggaagggccgtccgccgggctccggcaaggaaggaccgcaggagggcgttggtgcggacctctcacatctggcgcggcgtcggcgtcggcgccgccccccacgtgcgcgcggcgacctggggctcggcctgggcgcgacgaaggacagctcggcggcgactccggcgagcgcgcgggggctggttccggcggggaggcgctgcgccgcgccgctcgcccctgcctcgtctctctctctcgcgcggctcggtgtgttcgacagggaagcgttggatgagggggagaggggtgtacctcagtggcaaag

SEQ ID NO: 41346 - DNA, 345 bp, Oryza sativa
  Clone ID: PAT_MRT4530_446C.1
atgcaacatcaaggaattacagtactacacggtggagggtggaacgcctttgtgaacgtgacagataatggaagctttggaactcagggtctgtttggtacagctctagctccagctccacctctcttggagttggagctcagccaattactccacctaaaatgggagccgagttgggtggagctctttcacaaaatgaactacggaggtggacttgggtttaagcagctgcacaactccacttcagacccaactactgaagctaaatttagaaattggagctctaacaaacatacccttactaaattacgtcaaggatctattactaatttaaaagttgagtga

SEQ ID NO: 41347 - DNA, 261 bp, Oryza sativa
  unsure (1)..(261): unsure at all n locations
  Clone ID: PAT_MRT4530_44700C.1
gcatccttgggcacaggcatccacgagggtcataaacacttaacagcataactggctcattcacacaacgcacacttgcagtatcaccccatacacattaacacaggcagggtgtnagtgtcacattgacaatgctcagcgcttacagggatagcgtgtgactttgatactcgttatggtagcgggagacagcgaagcaccgccgttgggtgatagagacctcgatacaccttacattgtacgtgcctctcccaaggataa

SEQ ID NO: 41348 - DNA, 131 bp, Oryza sativa
  Clone ID: PAT_MRT4530_44701C.1
gggcgagaagtccattgcctctggttttgagggggagattatgatgcaggaacgtggtacacctctgatcagagttaaaactattcgaatagctgtacccgcggttatggaagaggagtatctcagcgaag

SEQ ID NO: 41349 - DNA, 495 bp, Oryza sativa
  Clone ID: PAT_MRT4530_44702C.1
atgctgccggcggcgacggcggcggtgaccgtctctgctatcgatgtcggcgacggcgaggagaggccgttgtgcaggaacggcagcagttgtgacggaccgacggcaactcatcgcccatggtggccgtggtgtcagtggccatcagagagtctaagtattggcagtggtttagcatttgatgtttcaaccggcacagtttgttcaaatgcctatagcaacaaaggacaatttttagaccaagccttgtttcatttgtttggatgggctgaaatcccagccctgtgctgggagaagaagcatcaagttccaggtaacgatcgaaaagaatacgtactattccgaggcgcgagacaatggtggtatcgtggagaagtgaagaaaggtggcgttttagtggcagcagccagcaggtcgcgttttagcgtgtactattattttagcgtacagagaactacaggggggaagcggtggagggcgatgagtggaattacg

SEQ ID NO: 41350 - DNA, 1745 bp, Oryza sativa
  Clone ID: PAT_MRT4530_44703C.1
aggaacaatcaccaaatttgttacactactcaatatgttttgcatccaaaatggttaagcatcgatcatcacactcgagaagaaagtggaaaagaatgggaaggagacctatgcaaggcgttactatgccgcctgtagctcaatattttctggaccgtgtactctctcctgacaaaaatgaattgagactacctacaagcaaactaaactactactagtacgtttcattccagcctgctattttccagcttattcagcaaccagtggaaagcggctcaagttggatggcaattttcatgtccaattcacatctattgtcttgtcttctatgggtttaacggctcatcttccccagtcatctctacagcttctgaaggaaatttacccataattagcactttcaaaacagaatctgcatttgttgatctgtggagatcagagacaaccatcagccgcctctgcaagattgctgccatgaaaaggaaaatagcacacatgccaaacatgacagtgatggggaatgcattcacattgtaaagaaccacacaaacaaacaggttgagtggtatgcggaagaagttcatgatcgtgcttcttgcctcctcaggaatatactgggacctcatcttcatgattgatggccagaaaatgccaacacaggattcaaatatacagaaaccgagcagctgtagacagcctccaaatgagatgccaccacctttgaccgaggagggaggtactaggaagttagtgacaacagggaggaaaagagtaaaagctgatatcgaaaacacaatctgcatataaccttcaaccttcagcttccgagctaacaaacgagaggcaattgagctacccaacatagaggagagcatgaatgtggcaaatatgaagccatgaggaatttcttcatcatttgggctcaaagcaggagtccacaggaaaacaaaagtgtacattgaaccctcaaacagtgactgtatagctccaagcaatgcaatcttttcatctgaagcaatggctttggctgcaaccttgaattgggctatcagatccttgttatcagatgtatctccatagttctcactccatgatgataagatgattgccatgcctattgctaaaaagcaagcagcagcatcaaatggagcaacaggcccaaaacccaagttatctgcaagcagatttgcaaatagcccagcgatgatcgcaactaggccatttccaagaaatatagccttggagaatgttatcgacaaccactgtgggtcaaatcctctcttgttgtgctccgcgacgagccacgactcgaacgccgagaagagcagcgatgtggcgatgcctccgagcacgcgcccaatcatcaggatcttgtactcaggcgagtgcttcgtgatgcagctcaggatgtagctgatgcagtaggtaatgcacgccctcttcctcccctgcttatcggcgagggatccgacgatggtgccgaagagcatcgaggagccgaagccggcgatgaagaggcggccaatgtcacccttgtcgaagccgtactggctgtagaggtagtacacgtacggcccctgcagccaatccccagacatcatgagcgagtagacgaggatgtagttgttcttgaacgcgttgaaggccggggtggtggcgacgcggtccttgccggacttgccgagctccagccccgccacgacggcggcgagcccgccgaagacgaggtagtagaacacctccat

SEQ ID NO: 41351 - DNA, 426 bp, Oryza sativa
  Clone ID: PAT_MRT4530_44704C.1
atggatcgaaagcgccgccgccgcgcgcttcctccaacaacccgagggatcgagagcatgcttcctcgggccggcggaggaggcgcacctcacgctcgcgctccggccggattctctcccgacggcgaagcggacaaccccgagagagaggggatcgaaaccgccgcgtcctcggggaggaccaggacgcgcgccccggccggcttctgctccggcctccctcgcgctcgctcgccggagacgccgcagatggctgaaaccctaaccctcgactccgagagagagagagagagagagagagagagaggtggaacgcggcggcgaggagaggcggaggaggggggcgagctcgcaacggcgaagaggataaaaagagagggaaccgagagggcttcgcgaaactttgaaaaccccaggagtcactga

SEQ ID NO: 41352 - DNA, 2103 bp, Oryza sativa
  Clone ID: PAT_MRT4530_44705C.1
tttttgttttttttttcaacaagctttgcaccagtcaattacagggtgcatatgcagctcattctcctgtacagcagcaatcagtacatggaacaaagcaaacaaacagtccatggaagatggaacaaagcgctgtacaacaaaatggcattcctattcctattgaaaagaagtgccaacgcttcagatcccagatttcaaacaacataacccaggaaaacaaaaattgctgggtggttgattccaaacagcaaagaaacaaccggaataacaaaaaggaaatactaaaaatgaatgaatgggttaagcaaaagaaataattgcatagcccagccagaatgacatatcaggaacaccagagacggtggtagtttcaaagtttacccactcgatcaactagtttggacctgactgactgactgactgaatgcaacctcaagaaggactcaatgatagttcgacggacggacacaaaagggagcctgctactgctaacatttacaaggcagacgcaaaacctaacaagaacagatacttagtgttcttttccggtgcggggcacctgcgcttgggctcctcttcgctgttgttgtcccgttgccgctctcctctggggccccctttccctttcctttttatgctggacaaatcaatctgaaagctagcctcgtttattcctggtcatcgtcaacgaatcttcctgtctgcctgctagcctttggtacagattagttgaagcttcagtgaacttgcgcagcaggtgcggcgaggttgttgagcgtggtcgcatctgctgctccaagattgggcgtgttggcatcagcagcactagcagagcactttgaacttatttgatcgctggagatttcggcgattgaggcaacgtaggggatgaaacctctcgagtagtcctcgcctgtgagcgggccgatgttgcgggtggtgcggccttcgaggtccatggcgacgacgcgctcctccgaggggtcccacatgacgacctccgccatgccctgcgagcggagcagctcgacgccctcgcggttcctgaggctgctgccctcgaactggccggcccacgaccacgacccgaccccatcggcggcgaggacgtccatgtcgaggttgagcaccgccacctcggtgacgcgctggtccatgcaggtgacgcagaggttgccctccatctcgccgatctcccagaacggccgggcctccacctcgggcggcgcggcgaactcgtgggggtagcccttctccgggtcgtagtagacgaagccgatggaggtgcgccagaaggcgcggccgtgggcgccgacacctgagaaggactcgacctgctcgacgatggagatcccgggggagacacgccacttccatgtcctggaggagaaggactcgaaggaccagacgccgcccccgaggttgaaggcgacgacgacgtggtagtgctcgacgccgatgccgccgaagcaggaggcggaggcggtgggctcctcgaaggtgatgacgacggcggggtcgacgtggtcgcgggtgtggcgagggaggcgcacccgcctgaaggtggccgggttggcgacgtagtaggagccggtggtctcgccgcggaggcagacgaggccgcgggtggaggcgaggacggcgacgtgctccggtaaggcggagaagcgcgggtcggggatgaggtgcttggcgctgcggatggcgtcgaaggcgaggtacccgggctggttgtcggaggcggtgtggtagaagaggcccgagagcggcctcggcggcggcgggcgcggcgagtcctcctcctcgagttctccgccgtagaggtcgtcgccgtcagcgtcgctccccacctcgtcgtcctcctcctcttcgtcggagcaggcgggggtgttgcaggaggaagagagcgcgaggacgtagtcgtcgtcggaggaggagtcggcggggttgtcggagtcgagcatgacccagtcgtcggaggaggagcactccgccatggcaaccacctctcgatctctctccgatggggagtgggggttaggatttctggaggaggggaggagagctgcggggggggggggaattcggattggattcgat

SEQ ID NO: 41353 - DNA, 4319 bp, Oryza sativa
  Clone ID: PAT_MRT4530_44706C.1
tgagcgagggttggtgagccatctttgtaggtgtgctcctgtaaaatctccggagctccaattctgggtcgggcggcggtagatctgactgcaagtggtgaacagggaagggggaaactcctaaactgaacttgcaagggaggttgatggtaaccaagactcggtcgaacgagacaattattgatatggaggagatgaacgaatttcgggtggacatggctgctctgaagaaggaggtggcagatctcaaagggttgaagaatgaggtaaaagaaatcaaggggcttttgttggatctctgtaagcggaaggaggttgaagaggctgaggttactgctgctgcggctgctgcaactacggttactgctactgcagctgctgctatggggactggagcacaatcttctgctatgggtgcggatgtggcacagaccagcacacaagctagaggtaatcaacaggttcatacttctgcagacacggctgggacatccatgcacacgacccaagggggaaatgttccacctaacaccacaattccattcgctgattttactttccagcatttccagccacgggtagaaagagctggggggtcagtgaatgtgtttcaagggaatcccaaagtccatgtgattgatcagcaaaggaatgggcatcatggtcactttgtggagggaaatcattatgcagaagctgtgatcaagggaccacgactggagatatctttgtttactggtgaggacccggtagattggttaaagcaatgtgagaattttttgaaattactggaactcctgtagaccagtgggttaacttggcagtggcacatctatatggaagagcagctaagtggttcagaggtgttggattgccttggcaggtcatcacctggccccagtggtgtgctatggtgtgcacaaggttttctgcagccaatgtacacgaggaagtggaactatttcaaaatgtaaaacaatatgggctgtcagtggagcaatatatagataaatttgaggagtatatggcttaagaggagaaatcaaacatgatgtgtgtgggcagaaacctcagggattgttggagtcctattggtatgctaagaactatgagaaggctgcaaatgcaagaaaaactgctgctaattttaataggaataggaatttaaacctgaatgctggcccaccaggtagaaatgcaggaaacagagcccagcagaggggtgaggtggagaagaaagaagaaaggaagtgctggttttgcaaggagccctggtttcctaggcatcagaagagggacaacaagcagaagggatggctgcacagcaaaccgaggaaaccaaagaggagttactgagtatctctttaaatgctattgaagggaccagtagacctgacactttttctgtcatactgaagttcaatgggaagaaggcagtggggctgattgatagtggtagcaccagtacttttatggacaatgagtttgcaattagaaaccaatgtcctttgattcacaccaaaaccaaaagggtggtagtagctggaggtggagaattgagatatgagatacaaatactgcaggtgtgtgctatttctgatgaagaaaacttttctggaagcatacctgaggaaattcaggaggtactcatgcagttccctgcagtgttacaagagccaaaggactaccccctagaaggaattgtgatcacattatcaatttaaaaaaaaggggcagaaccacctaatctcaggccatatagagtgccacattaccagaaggaggccagggaagatattatatctgagttgatccagtctaaagaaatcaaggtgagtgacagcccatattcatcatctgcattaatggtaagaaaaagggatggttcgtggagaatgtgcgttgattatcaccagttaaatgctcagactattaagaacaagttccctatgcctataattgaagacctgctagatgagctgaatggggctaaaatattctctaagctagatctcaggtcaggataccatcaaattaggatggctgagaaagacatcccaaagacagctttcagaactcatttggggcattatgagtataatgtaatgccatttgggttaacgaatgcgccggcaacatttcagtcattgatgagccaggtcctagctccttacatcaggaaatttgtattggtgtttttcgatgatattttgatatacagtaacaacaaagaggaacatctgggacatattaggttggtgatgcaagctttaatggagaatcagctagtgtgagtctggccttagcaaggtgtcatacttgggccatgttatttctgaagaaggggtttctactgatccaaaaaaaatcagtgacatcaaacatcgaaacgcacctaccagtgtaactgtattgagggcatttctgggattgactggttattatagaagattcattaaaggatatcgtgaaatatgcagaccattacacaatatgttaaagaaggatgggttcagttgggggcagtctcaacaggaagcttttgagctgttaaaggagaaaatgtgtagtagtacagtcctagctctgccaaactttgatcagccatttgtaattgaagctgatgcttgtggatatgggattggggcagttttaatgcagggaggaagaccaatctcttattatagcaaagctttgggaccaaaggcagcagcccaatcaatttatgaaaaggaagccatggcaatactagaggcattcaaaaagtggagacactatgtgctagggggaaagttggtgattaaaactgatcagcagagtctcaaatacatgatggggcaaaggttggttgaaggaatacaacacaagctgttattgaaactactggagtacgattacactattgagtacaaggcaggaaaggataatttagtggcagatggcctatctcggagtcctaatctcaaagtaggtgaggatgaacaatgttcaactgtggctgtagtaattcctgaatgggtacaggatatcaaaatgagttatgaaggagatattcaggcacataagttcttgagcataataggaactgaggtagatcctactggcaattacagaatggaggcagggttattaaaatatcaaggaagaatttatgtgggagggctacttatcacagaattaaaaagttgttttactggcctggtctcaagaaagcaacagagaattttatcagatcttgtcccatatgtcaagtaacaaaagcagaacatgtacacattcctgggttgctgaatccattggaagtacctgatatggcctagacacatatcagcatggatttcatagagggcttgcctaaatctaaagggaaggatgttatactagttgtggtggataggttgacgaagtatgcccatttcttagctctatctcatccatttacagttgaagatgtgattcaagtgttcatggataacattcacaaactccatggaatgcctgtggccattgtgaccgatagagacagaatcttcactagcaaattctttcaagagatttttaaggcaaagagagtacaactcagattcagtacggcttaccatcctcaaacagatggccaaaccgaaagagtcaatcagtgcttggactgatatttgagaagtatgacctttcaagaaccccaacagtggtttacctggttagctctagctgagtggtggtacaatactacctttcgtacatcgattcagatgactccttcccaagctttgtatgggtatccacccccacaagtgaatgaattttcaattccatgcaatgtatctgaagaagcaagggttaccctgaaagaaagagcagccattttgcagaaattgagggatagcatgggtgaagctcagagaagaatgaaacattatgccgatttgaataggactgaaagagtgttggaggttggagacatggtgtacttaaagttgcagccctatagacaagctgcgtttggcattaggggatcactgaaactcaggtctaaattctatgggctattcaaggttattgaaaaggtggggaaggttgcttacaggctgcaattacttgaaggagtaggaatccatccagtgtttcatgtgagtcaattgaagaaacatttaggacagcatgttgttcctatgcctaatctgccagcagtaggtcctgagggacagattaagactgaaccagtcgctgtgttgcaaaggcgcatgattccaagaaacaatgaaccagtaattcagtgccttattctttggcagaacttgacgccggctgatgcgacctag

SEQ ID NO: 41354 - DNA, 634 bp, Oryza sativa
  Clone ID: PAT_MRT4530_44707C.1
atgacggtggcatatctgaaggagatgccgtccacaccatcaataccaagctgtacgagtgggatgcgatccgtagccgctcggttgctcggtgctgggactggaacccgtccactcagctttgtggggagcaatggtgtcggtggccggtctgcctcggggagctgccatgccggtcaatcgcgagctttggtgaactatgatgatgacaggggcacctacatcatcttcaacattgccgactcactgttcatcagagatctcaactatgtatgttctcggtatccccttgcttccttatacaagtattatattccgaggtttagtttgtctgatcgaattgttaatccaatcagcgtcgtccgccggtgtactggtgttgcatgggtacctgggcatgaaggattttttgttgtcagcaatgctgatggaaatttgtttgtgtatgacaaatccaaggatgtaaatactgattggacatttccaactgtagaggatcaaagtgagatgaagatttcatatgcaaagtctagtaagagcaatccagttgcaagatggcacatctgtcaaggtgcaatcaatgccatttccttttcgccagatggaacttacttggcaaccattggacgagacg

SEQ ID NO: 41355 - DNA, 1885 bp, Oryza sativa
  Clone ID: PAT_MRT4530_44708C.1
gatccccgggctgcaggcccctcccctttttttttttttttttttttttttttttttttttgctttatttttttttttttcggcaataataaaaagaagcaattcctgataagaaaagagtccatagaagggtaggggaggcaaaaaccggtgaacacaatggcatctgctgtatcacggccaccagcggaatacaagactttcacttctgtgaatgcaatcaacgatactaaactaccaacttgctttcctcttggtttattttggcactgtagatagatactaccctgacactgtctatttggtgagggccccatacagaaatccaccgttttggtcacggaggacaagatctctccccccttgcgtcgggaaccaagggcatcaacaaagcaagggagaaacgggaaggagaggagcatcgacaagcaatcatctcccagtaagcaccaagcactgccatgtttgccaaccttgtagtcctacccctcagcctgctgctgctgctgctcctcctccttgggaatgtggaagccttcgatcttgcgtgcaacctcatttaccccaactgttggtttgccatttgaattgaccgcctcattgtcatcagcgttaggtgggctcagctgccagatccggatggtgccatcttctgatcctgatgcataagattcaccgccaggtgcaaagcggacacagtggacaggaccatgatgccccttgttacaggttatttcttcaccagtgaagaaatcaaatacatgaacccacatatcttctcccccaacaataaatttgctcccagattttggttccagggaagctgactccacagtgcaaggcatatcatagcttttaacaagcccaaagtgattagcatcccaaaatttaacactcgagccatcagctgtagtgatgaacctgctgtcttgacttacttctgcgctagtcacaggcgccttggtttcaagagtttggacaatttttccagtcctcacatcccacaatcttactcctcccatatcagagcacgagcttagtattgtttgatcactatgaagccaagcaacagttcgcacgttaccaggtgctttgtcaagttctcttggtgctgcatctggacgattcatatcatagacacgcaaaatcttttctacgcctccagtgagcaacaggtgggtatcctcagaaaacgcgcatgcacggacaatgtgcttgtgttcaaatgaatgtagctcatcacctgttagtgcatcccaaactttggctgaaaagtcagcagaaccagatgcagcacgcagagcatttgtgtctaggcagcagctccagacagcccctttatgaccttggaaagtcccaatccaatctccagtctcaccattacgaagcattggattcccatccttactggcgctgatgaggaagtacccgtcgggcgtgacggggctgtagaacaggtcgacgaccgggcgcgagtggccgtggcacaccagcggcaccgccaccttcttcttctccatcaatctcaaccccccacctcttcccccccgaccgacgaaaaccctagctcctcgactccggcggcggcggcggaccgaaatgcggcggcgctccccctaaccctagggtgaagagagagagagagagagagccctccccaccgatcgggagaaaaaaaaatccggcgaagaaaaaaaaaatcgcgatcgacgagcggcggagagggggtgggcgaggcgatccggatccgagggggggatcgattcgtgcggggaattttattggggagaggagcagaagaggtgggggggatgaggccgcggcctaggtggcgggcgctaggcgagtagccttgggggacgcgtgacccgacccgggaattccg

SEQ ID NO: 41356 - DNA, 383 bp, Oryza sativa
  Clone ID: PAT_MRT4530_44709C.1
cgacgcgcacgcgccacttgctctttttttctgtgcccctggacacatctattcattcttccattgccggcgaggtgagacacacaccacatcgtcgcggcggcgagtaaacttccagtcccggttattgattagacgctatgaggtctcgtgcatgaactgcgagacctgtcagctgatcgagctgcaactggagcctctggagatcatggatgagctactatgcatttatgcacaccatattctttcacggagccttgagccttgttcggcccaaagatgttgattgagatttctttgagattacctatgtacaatgtgtacttcctgaattagaagaggaagttgatgaaaagattaaccagctttgtgcgtgtgtagag

SEQ ID NO: 41357 - DNA, 203 bp, Oryza sativa
  Clone ID: PAT_MRT4530_4470C.1
actgctttcgagctctggagtaattatgggtggacacccactggctgcctggttaaaagggaaaggttaaaactgggcgcaaatgctgtgctgccacctctgggggagaggatatcgccagttgggagggagatatggatgggagtggttgtggatggagtgaaagcaccggggactgtgcctggggtgggaccaggattgtc

SEQ ID NO: 41358 - DNA, 438 bp, Oryza sativa
  Clone ID: PAT_MRT4530_44710C.1
atggcgacgtcgtcgacggtggaggcgctcggcctgctcgaaccagccgtgtggacgccgctgtacccgggatccctgtacgagccagccaggttctggtccatgactccggagggattcgcgtacgaccccgtcttccccttcgcgtcgacggaggaggccgggttcctgatctgcgatgagcacggcttccgcgtcgagacggaggaggacgtcgtcgttgccgacgacattgccagcttctgcgccagagtcaaggtcctccaggatgaggcggcggcccggctcggcagcaaagccgtcattgacgtcgaagaggtggcctgcgatgatgatgatgattatgacgtgctagaggaggccggctttgccgcttgcttcggcctcatcatcgagtcagtcgaagagctcctcgaggacgacggcgagcatccctga

SEQ ID NO: 41359 - DNA, 320 bp, Oryza sativa
  Clone ID: PAT_MRT4530_44711C.1
cttatactgcaatgctgcatccactgagacattgagcggcgggtttaattaaaaaaaggcgttggtcaaccacaataaaaaaaaaaactaacaacagcttaattttactatctacttacatctaatattattgatactcaaaaaaattaacggccgtccccttaaggggatccaattttacttcccctgctctccatcgtaaaccttcttttatagcgtcaccaaaataaaactcacttgccctccgttcacaacttatctacctggaaaacccttggcgtaccccaactaaatcctcttttcttaaactccccttttcc

SEQ ID NO: 41360 - DNA, 528 bp, Oryza sativa
  Clone ID: PAT_MRT4530_44712C.1
atggcggcggcgactccggtgacctctagggcaggcgcctaccctcatgaaccgccggcgacgagggcggtatctgaaagctcctcgtcgtccgccactaccgtcttcccgccgacgggctggcaagctcgagctcgtggcaaggaagacgtggctgcaatccctcggttgtgtgcctccgtttccgacgccgtcctcctcaccatccttcgccggccgccgctcctcaccatccaccgcgcgaacgccggcggagcgagcggcgacgggcggaacggaggggagaggagcgatgcagagcacgccgacgccgacggctgctcatcggtggtagcggcgtcccgcgacgcgagctccaacaacaaggagccccagatggcagatgcggcaaaggccgatgcagcggcaaaggcgaccaagatggacatgctcgaggatgatgacgagagccccgcctcctcaggttcggcgcgcgtcgcttggtggtgtgtgaccgctggagcctgcctcggcatcgataccccatag

SEQ ID NO: 41361 - DNA, 1830 bp, Oryza sativa
  Clone ID: PAT_MRT4530_44713C.1
atggtgcaagcgcaagcagcggcgaaagaggcggcggcggcagcgatcccgcttatggcgccgtacaagatggggcggttcgagctctcccaccgcgtggtgctcgcgccgctgactcggtgccgctcctacgaccacgtgccacagccgcacgcggcgctgtactactcgcagcgcgccaccaatggcggcctcctcatctcggaggccaccggggtgtccgccaccggggagggctacccggagatccccggcgtctggacgcggcagcaggtcaaggcgtggaaacccatcgtcgacgccgtccaccgcaagggcgcgctcttcttctgccagctagcgcacgtcggcagggcctccaccaacgcggcttatgtcgttattcacctccttggagatttcatcttacggtcttgctcatccctcggcctccgacagttcgtagttgtcttgtctcaggctttttgtgtcttctgtgtaagctgcactcaccctcagtcgccatgcgccaccgtgctcgccctcagccctcttgagttggagggcacctgcaaggcgggagaagaggctgcggagacagggggccggacggaggaggcggactactcacagaatggggtggcgccgaggagattggcttccggcggcgcgcgtgaaggcgatcaacagccgaatgggcaggcgccgatctcaagcacagacaagcagatcacaccggacgattcacacacggtgtactccaagccccggcggctgcggacggatgagatccctcacgtcgtcgacgatttcagggtggctgcgcggaacgccatcgaggcggggttcgacggcgtggagatccacggcgcgcatggctacctcatcgatcagttcatgaaggacagcgccaacggccggaccgaccagtacggtggcagcctcgagaaccgttgccgcttcgccgtcgaggtgatcgacgccgtcgtcgccgaggtgggagctgaccgtgttgggatcagattgtcgccatatatagattttatggactgcttcgactcgaaccccgaagctctcggctcatacatggtgcggcaactcaacaagcacccagagctcctctactgccacatggtggagccgaggatggccaccgtcgaaggacggaggaagatcaaccatggcctcctgccatttcggaagcaattcaatggcactttcattgcctccggagggtatgaccgggaggaagggaacaaggtggtggatgatggctatgccgacctcgtcgcctatgggaggctcttcttggccaaccccgacttgccaaggaggttcgagcttaatgcaccgttaaacaagtatgatggatctacattttacacacatgatcccgtcgttggctacacggattaccctttccttgaggagaagaaagaggactcagctacagagagcctctcctggctcaccggcgaggttgatgacaccgtggttgatgagggagtcaccgtgtcgttgcctacggcgattctggcgtgggccgccaccgttagatcctggcgtggggagggcggcgacactcccggctgccagatcccagccatctcctcctcatcgtcatcgtcggcggcggccgccgcgctgcctccgccagcagccgcgatgggcgcctactcgttggcgcgcagctgcggcgccgctcctggccgccgcttcctccacctcatcgtcatcggtggcggcctccgcgccaccctcctcccgctagactccgcgccgccgcccaccggatccgccctcccctctggccgcaccgccgcggacgcccctcccctccgccggatctag

SEQ ID NO: 41362 - DNA, 315 bp, Oryza sativa
  Clone ID: PAT_MRT4530_44714C.1
atgtcaccaccacatgaccagcgttgcaacactcctcacgccacagctcatgaaatcgcactacccaagccatcatgcacgagccttgctgctgcctggatccagggcgttgccgatggatccggccttttggccatgaatcgaagcatcgccaggctcaaacaatcgatgccatcagaccaccacatgaggctatcgctgaggagggcgtcgcctaacatagatgccgtcacatccgtcgtcttgaagggggtgaagatggccctgtggggcggtgagttggagaagagggggaagatagggtggcaacactag

SEQ ID NO: 41363 - DNA, 246 bp, Oryza sativa
  Clone ID: PAT_MRT4530_44715C.1
atggcggcgggcggcgtcgacgtacgtgtcagctgcgagacgctcatcaacgtggtgaagcactctgatcctgagggcctcaagaaggctaaggcctcaagaacgggcggcacgacaatgtcttcaagaggggtaaaaacgttcgagaatgccgtcattgccggcccggccaaggccgggctagattttcacctgccgctcaccgcctgcaagtctatagatgatgtcccgatgctccacaagtga

SEQ ID NO: 41364 - DNA, 535 bp, Oryza sativa
  Clone ID: PAT_MRT4530_44716C.1
tcatatcgacaaatatgaagtgtctaacaccacggtaagttacaatgaaactattcttccacattaacaggcagttagggttatttcttctttgatatactgcatttgtctccatgggtacagccttgtacatacacaactgttaattggaaagtcgcccacttttctcttatgcatgtgccagataaactagagtaatggtgtgcacttgcgctgtacattaagcatataaggctggtcaacttgggccaagagtagcttctgcattatttcctagttacttaataaagatataccaggtgctttggtttatatactacaatggggtggttgtggacctgttttgctattgagaactgggcgtagggtctcacaaactagacacgtgatttagtttccatcctaccaaaccaacattgcacgtgtaataaatcaaataggctgaatctatttttaatcattttattagcagctattcttttgagacacctttataggatatcagaaactagaacaacccaaatggtcaaaatat

SEQ ID NO: 41365 - DNA, 249 bp, Oryza sativa
  Clone ID: PAT_MRT4530_44717C.1
atgagtataagcacagaccaggacgaagacgcagtatgtgattatgtaggggcgtctactcttactagggagtcatggacagatactggaggcttcacctgttccaggcatggagctatcgtgctgcatgcgtgctgtcgatcgacgactccaacgttggagaggattaacgatgttactgttgctgctgatcatggaatagaagaaaatatgacatacgaagcaacagctccagttaccagcgtgtga

SEQ ID NO: 41366 - DNA, 1011 bp, Oryza sativa
  Clone ID: PAT_MRT4530_44718C.1
atggcggagccggctgcgggggacgcggcggccaggagcaggacggcgtcgcaggtggcggcggggatagcgcagggggagaggaaaaagtataaattaccccccaccccctcccacgaactatctcggtcgaccgaatactcccctggacccgaaaaccagacattgctcactctgaattgggctccggtcgatggcgagcagtggcaggcatggctaggtggacgaggcgagtgtggcgagtggccgggaggctatggcaaggcacggcgctgcggcgggaggccgcagggacagaatctgggggcggaggaaatggcgagcggcgaatgcgagaacggcctcctcctctgctaccgcctcctccggctttcgcctatcttccgcctcctccccgtcctcctcccgccgccgcgctagcgcggccgggtcggtgtcggcatctgcatccgtagtcacactggtcaacggcctcgcctccacggtcgtcgactgtgccacaccctctcccccaccatcgtattccccaccattgccaccttctcgcgcaaatccgacgccggccgccacgcgaggaggctcgtagctgccggtgcgccgctcgtcctcgagggagctcaagactgcgacaggctcgtcgcttccttctcgcgagctccgtctccgccgccactgcagctgcctccacgcaacctcttgctccgccgacctccctaagcaacattgagctccactgctggtcgttgcctccaacgccctcaccaagctcgagacggcggtgggctcatcgctgccttcacgcgagcttcgatcgcgacctctagggccctcgccgtcgaggtcgttccagccccacgctagcactctttctgccccactggctgagatccggcctcgacgaccgcactggcgccgtccactctccctgggcaaagagtacggcgatggaacccaggggacgcatgcagcagtgtcgccgcccgccaccccgacctgacggccttcactcat

SEQ ID NO: 41367 - DNA, 765 bp, Oryza sativa
  Clone ID: PAT_MRT4530_44719C.1
atggcgacggagacaaccagctcgaaggcgctgagcatgaagctgctggtggacagcaaggcgcagcgcgtgctgtacgcggaggccggcaaggacgtcgtcgacttcctcttctccctcctcaccctccccgtcggcaccgtcgtcaaggttctctccaaggactccatggtcggctccatcggcgagctgtacgccagcgtcgaggacctcgacgccacctacgtccgctccgccgacgccaggaacgtgctgctcgcgccggccggtggcttcgacaccggcaagctcctccagctgccggagacggcggcgccgctggccacgaaactttaccgctgcagctcgtgcgactacaacgagtgctatgactatgtttccacggtgagtggcttgcgttgtcagatcgctcgatgccctggcaagatgacggtggcaatgaagcttgtggtgtcgagcacgagcactacagctaccggatcggccagcggcggcgaggcggcgcaaccagcatatgctgttgccggcacgggatttgtgcagggggtggtgacgtacacgatcatggatgacctcagggtcgcgcccatgtccaccatctccggcatcacgctgctcaccaccttcggtgttactgacatcacctcgctccaggagaagaccgtgcagattggctacactgagggcttggcgatgctgaaggcgtcgctgcagtcgaagacggtgctcacagatgtcttccttggcaagaagaggaaggcctga

SEQ ID NO: 41368 - DNA, 993 bp, Oryza sativa
  Clone ID: PAT_MRT4530_4471C.1
atgctgacgatctcatcagtgacgcgagcaacgcacccacacccggtgagctgccatgacgcagccaccgcctgctccccgccggcggaggcggcggcggcgccgccatcaaccgcccgcctcgccttcttccacgccgcgctctacctccttgcgctggcgcagggcttccacaacccgtgctcggaggccttcggcgccgaccagttcgcgccgccgagcgaccccggcgcgcgcgcgtcgcggagctcctacttcaactggtaccacttcttcaattcctgcggctacgccatctccaacagcgcgctcagctacgtcgaggacagccagagcacgctgttcacaaagcagggcagcacgatggacaggcgcgtcgggggcatcgtcgtgccggccgcggcgctgaattgcgtcgtcagcttcacgatgatcacgctggtgccggtgtacgaccgcgccgtcgtgccactcgcgaggcgcttcacgggccaccccgcgggcgtcaccacgctccagcgcgtcggcgccggcatggccacatcctgcctcgccatggtcgtggcggcgctcgtcgaggccaggcggctccgcgccgcgagcgacgccagcctggtcgaccggccgggcgcgacggtgccgatgggcgtctggtggctggtgccgcagtacctcctcgtcggcctcgcgaaggtgttcggagacatcgggctcgacgagttcttctacgaccaggcgcccgacggcctgcgcagcgtcgggctcgccatgtccctgagcgtgctcggcgtcgggaactacgtcagcggcgtgctcgtgtcggtgatcgacacggcgacgaggagcggaggagagagctggttctccgacgacctcaaccgtgctcacctcgactacttctactggatccttgccgcattcgccgctttggaggtcgtcgtgtttgtctacattgcaaagcgatatatctacaagaacaaaggagagccctga

SEQ ID NO: 41369 - DNA, 1872 bp, Oryza sativa
  Clone ID: PAT_MRT4530_44720C.1
ctactcaaaggaaaagctccagatgattgccacctcatcgatccgaaccctcacatggtcttcttgctgatgaatccgcgtgctctccgtcttgacgaatccaaacttgccacgttgcccagccgcgtcgtgcgcgttccgtctccttttcctcagcgcgcgctcgccagcgcccaaccagcccgaagccgccacgcgtcccgctgagccgctcccgcgcgcgcttgcaaaatcgcgtgtgggtcccgcgctcctgcacccgcctgcgatcgagtcacgcgaaacgggggttgccgcgtacggtttttccgcgcgcgtccttgcgcatgcaagctgcctgcacctcctgagcccatgcgccatgggccgccgtcttgggccgtcgctgcttggacgatgcaggcctgccgagccgagccattcaccatcttgggccacgtggaacggctggattggcttggcctccccggcatccttgatcgctttggacctcaactcctccctgagtctagtcccgatccgccgttgaccaagatcgaccccgatcacctgatgtcctacagctatggcctgatacccatcaacagcaaggttatccattatcatactaattctctctttgactgctttgctacagccgcactgatgagcaacacgcttctctgttgtgtgaatattgtataagtgacttgcatttgcaggatcacctttgaatacacagcacttagaaccattttcatcaatatatgtagccaggaacatcaactttagtgaaacaaagaaatgggcatggtgctctatgacctgaacaccagcccttgcctgttctggatcatccaagaggctcagaatagctggatcaattggttcaatgtacaattcatgttgggatcttgatgcccgtgaagctaacacaatagcctgatcttcattaacacctttcgcaaacaactcaatcttgtccctggcaaaagagggtttattacattttatggtgcccgtcatgttaaaaagcatgacatccatgcttgccagatcttcaagggcaactgtccctctactagcaacccccagcaaacaaagccttagagatccaaatgccaatgcaaggtagaggacaacaggcattgccattggaaccaccccaattaatgccataaaacagccaccctgcagcatagctccagagctgtgtttctggaacaacaatcttaagattacctccgcaatggtaccaaatagcacaagagaaaagcagaagcagccaacaagcatgattccctctttaagttgcccaggccgagtgtaacgttgcgggtagagccgaagtgtgcttcgaggaatatcacgaccagtcgcaataacaacagcagtcccttggccacaggacacggtccaagcatagtatatgaggaagccgtgtacacaatcaacagaccttttggcccagcaagtcattgtgttgattttttcaaaccggaggacacgggcattggcagggacaatgtccccaactttgagaaatatgatatccccaggtaccagattcactgcatgcacatttatccacatcccatccctcagaaccttcgcccttggtgcatatgcttttgcctccaatggagccttagcatactccacaacaagtttcacagtcaagcatgctgtcaagcttgtagctagtaaatatatagcgatggacatcatggaagatctctggccagctgaagcaatggtgagggacacaactgtagatgatactgtaacccatgacatggagttaagtatgacacagatcatgttcctgtacttggggaagatattgttccattcccagagtgagaagagcttcatcaggaattttcgaagcat

SEQ ID NO: 41370 - DNA, 309 bp, Oryza sativa
  Clone ID: PAT_MRT4530_44721C.1
atggtggagcatggatccaacagcctcgacatgtcagcaaatagttttggcatgaagcacatgctcaagcttagtgagtttgacatgcaccaagacttctacatggtggggggtggcctagtcacccgcctgcgaaaatcctctggacaaacaatgccgccaccgccgccctcccctggccggatccgggaggggaggggagccgcgccgccgccgcccaacgtcgtggaggggagggggaaggggagggtgcgtgtaatgtcccgcctctcccaggctggggccgcttacatctggcagccttcatag

SEQ ID NO: 41371 - DNA, 222 bp, Oryza sativa
  Clone ID: PAT_MRT4530_44722C.1
atggagaccacacggcgtcgcgagtcgatatggaggcgggaatcgaaggcgtcgtcaatggctggcctggtcctggctggtgccgtggacgatgccggggtagtgcatgttgacggcgacgtagagggcgtccaccgcgacgtgctgcatgaggctgagctcctagttgagattgttgacccacacgaggcggacctcaacgctagcgacggcaatgactag

SEQ ID NO: 41372 - DNA, 310 bp, Oryza sativa
  Clone ID: PAT_MRT4530_44723C.1
ctgtcgacggggaatacccgtagaccggatatagagggtattggggtacgctggtatgaggatttacgtagtacgacatcaagcaaacaaaagacagggattataccggttcaggcctcttaataggtaatagccctaatccagttgatatgggattatatgacggaaatcacagattacaaagggaatagtggaactcgataataccgacgagatcgtagttgagttggctgtgatggatgtgttggcggtaagattcgatgccttaagtcctcccggggggttgttaacaaccaatttggtaacatca

SEQ ID NO: 41373 - DNA, 596 bp, Oryza sativa
  Clone ID: PAT_MRT4530_44724C.1
ttagcaatagcgatagaaaaaattgcaaaaaaaaaacggccgccaccaccgacggattcacccttggacgaagccgacgccgtcgtcgccgtcgacaccgacggggagagggagaggaagagggggagggacggacgtcgccgccgtctccgccgtaccccgccgtcgctgcgctgtgccggcgagacgggaaggagagctgccgccgccaccgccgctagcgtggggaagggcgccgccgccgctagcgtgggggaagggcggcactgccgccaccgccgccgcagcccgccgtcgccgcgccgtgccgacgagaagggagggagaagggaagtgaagcggcgccggtggtgggagaggcggccggctggggggagggggagaggcgagagatgaggagagagagcagcgccgccggagggaggggaggggaagcggcgccggtggggagagggggagggggagaggcggcgtctgtagtgggggaggcggccaaccggcttggggggtgaaggcgtggggtgggggggatggtaacgtattatctttaccctttccgtgattatggtgaaaatgcttgcgaagttaccctcatt

SEQ ID NO: 41374 - DNA, 1702 bp, Oryza sativa
  Clone ID: PAT_MRT4530_44725C.1
atggtgttggtggcgattggggtggttgtggcggcggcggtggtggtgagcagcctgctgctgcggtggaacgaggtgcggtacagccggaagcgcggcctgccgccggggacaatggggtggccgctcttcggcgagaccaccgagttcctcaagcagggacccagtttcatgaaggcccggaggctcaggtacgggagcgtgttcaggacgcacatcctggggtgcccgacggtggtgtgtatggaggcggagctgaaccggcgggcgctggccagcgaagggcgcgggttcgtcccgggctacccgcagtcgatgctggacatcctggggcggaacaacatcgccgccgtgcagggccccctccaccgcgccatgcgcggcgccatgctctccctcgtccgccccgccatgatccgctcctccctcctccccaagatcgacgccttcatgcgctcccacctcgccgcctggtcctcctcctcctcctccgccgtcgtcgacatccaggccaagaccaaggagatggccttgctatctgcactcaggcagattgccggcgtctccgctggcccactctctgacgctctcaaggcagagctctacacccttgtgcttggcaccatctccctgcccatcaaccttcctggaaccaactactaccaaggcttcaaggcaaggaagaagcttgttgcaatgctagagcagatgatcgcggaacggcgatcctccggtcaggtacacgacgacatgctggatgcgctcttgaccggtgtcgagggcaccagggagaagctcacagatgagcagatcattgacctgatcatcacccttatatactctggatatgaaaccatgtcgacgacctcgatgatggctgtcaagtacctgtcagaccatcccaaagctcttgagcaactcaggaaagaacattttgatatcaggaaaggtaaagcgcccgaagatgccatcgactggaatgatttcaagtccatgaccttcactcgagctgttatcttcgagacattaagattagctacagttgtgaatgggctgctgaggaaaactacccaagatgttgaaatgaatgggtatgttatcccaaaaggttggagaatatatgtttacacaagggaaataaattatgatccattcctgtaccctgatcccatgacattcaatccatggaggtggctggagaagaacatggaatcacatccacacttcatgctgtttggaggaggtagtcgaatgtgcccggggaaggaagtaggcaccgtagaaattgcaacattccttcactatttcgtgactcaatacagatgggaggaagaaggtaacaacacaatattgaagttcccccgagttgaagctcccaacgggttacatatccgcgttcaagattactgatcctggaacattttgcgaagttagataggaattcaaatcagatagaaaataagagtgcaattctgatgctgctgccctgatgacaggattagaacagccgtttggctcttgtaacatatgtccatgaaaataggaatattatagagataatataggcattataggaccattaggaagctaatgtagattgccatcagatgctcctgtattcttttggtccatcaattgttgaactaaaacagaagtgtcatttggcttctatgcttctgaacatgatagagagttaatagac

SEQ ID NO: 41375 - DNA, 2189 bp, Oryza sativa
  Clone ID: PAT_MRT4530_44726C.1
agggagcttagcagcagtcgttgtgcagaggagagtctcctttgcttcccaagttgccatccatggccgccaaggtgtacaagccggccgccgaggtcaatctcggcccggacagcgacgagttctacatcagccctaacgtcaaagctcctcgggtagcagggctgctggtgaagatcttcgtgtggattcttgagatgccgatcatcggctcaatggtgctttacatcctcaagaaggataatctcatcaacaagcttgtccaagatgctgaaatcccagagcctccactgttcacttccacacacagctgggaagacattccagagcagaatgtgtgcctgacgaagccggacctgtcgccgccggagcgtgtccaggaagccgtcagctgcctccctgcgagcctcgaatcgaccctcgccggctcgccgccgtcgagcccgaaacgctggacgatcagggatttcaacagggcgtacagctcaggggaggtcactcctgttcaggttgcaaagaggttcttggctgcagtgaaggagtgctcaggcccaggcctcaacatggccttcttcatcagctacagccctgaagacatcatcaggcaggctgaagaatccaccctgagataccagagagggacacctctgtctgccatggacgggatactggtcgctgtcaaggacgagatcgactgtttgccctacccaaccacaggcgggacgcggtggctggggcgggcgcgggcgtgcgcggcggacgcggcggtggtggcgcagctgcgcgcgtgcggcgcggtgctcgccggcaagaccaacatgcacgagctcggcgcggggaccagcggcatcaacccgcaccacggctccaccaggaacccccacaaccccggccgcgtctccggcggctcgtccagcggctccgccgccgccgtctgcgccggcctctgccccgtcgccctcggcgtcgacggcggagggtccgtgcgaatgccggcggcgctgtgcggcgtggtcgggttcaagccgacggcggggcggctgtcgaacgccggagttctgccgctgaactggacggtcgggatgcccgggatcctcgctgggacggtcgaggacgccgccgtcgcatactcagcaattgttgatcagtctcagccatcctacttgcggcctgagttgaatctgcccttgctgaagtcttcactctccatcaagaacatcaagcttgcaaaatatgcaaagtggttcaatgacagttcagaggacatcagaagctgctgcgacaaatctcttcagatgctgcatgcgcactatggttgggagactctggatgtaaccataccggagatcgaagagatgcgccttgcgcactatgtgacaattggttcagaatgcactgcatcacttgctaaatatcttgacaagctgaagagatctgaaatcggttgggatgtaagggtcgcacttggcgtgtatggttccttcagcagtagagcctacctgaattcgcaacggctccggaatcgtcagatgtacttccacaaggagatattcaagacggcagacgtgatcgtctcaccaatgaccggtgtgactgcctacaagctgcaagacgacgcgctaaaaagcggagaactggactacataaatggaggttgggaggcgtgcaagaagcactacaagaagcctgaagtgttctacgatctcaccgtcatggttggatatgacaaagccgggctgcccatcggcctccagttcatcggcaggccgtggtccgaggcgactctgctccacatagcatttgcaatgcaggaggcgtgcaagaagcactacaagaagcctgaagtgttctacgatctcctcaagaaagattaaatccgtaggctgtatgtatgtcagaattcagaaaattcagatcattgcttcgatcaagtctccaacattgaagagaatccattttaagttagcacggaagctgttcttccatttgtgtcagggagaacaatgtagctacatgaccagaaggacgagagcaaaattagatcaattgcagaaactgtttgattagcggaacaaaaattaagtgaaaatgtatgcattatatgacaaatagtttctgtatgatggtgccaaaaaaaagggcaaaaatatatatgtgtgaaattttagtagcaaaaaaaaaaaaaaaaa

SEQ ID NO: 41376 - DNA, 4402 bp, Oryza sativa
  Clone ID: PAT_MRT4530_44727C.1
gtggatgaatagatggtatgaggtgaatttatgattttaggatttggtttttggtatttctttatgcattacgaaccaaacctagattcgtgacgaaacagaccgcgaagatcatggagaacaaggcgaaacttgacttgctcctgaagaagatggaggaaacagagcggaagagagaggagggggagaagaggcagtccctggagatgcgctcgtttaaggaggcggtagaatcctggataccggtagtggagaagaagatggacgtactccagtccgccatggatctgctgcaaacgcaagtggagaagctggcgagcgctccggcaaatctggagccatccattccagtcgagtacctggactcaccaggtgttcgaccaaatggctcaaccggtccaaatggccaccgcattcaaaatcttacacgggaggaggttacggggtttaccccaaggccaaccccagtcaatggtacgtacgtgtcccacaatgtctccctgattcctttcaattttgatgcctctgccatgaattctttccaaactgcggtgtctgttggtctgagtggtggagtagtgcccatgacatgccctaagtttgatggagataaccccattatgtggaaggctaactgtgaggcttattttgatctatatggcacacatccttgtaattgggttaaggtagcaaccttaaatttcacgggaaatgctgctttctgactgcaagctgttaggtctcagttggaagggataacttggggtgaactttgtgataaggtttgcagtaggtttaacagagataggcaacaagctcttattaggcaatggattaaaatcagtcaatcaggattagtagcagattatgtagagcagtttgattgcattatgcatcaaatgatggcctatgacccttctcttaaaccagtttactttgtcactaagttcgtagaaggattgaaacatgaaattaaatcagctatgttactccaaaggcctggcgacttggatgctgcttgtactcttgcctttttacaggaagaagctttggaaggtgataaaccaaaagaatccaagagggttgataccactagctatcagaagggctctcataaaggggctatgccacttcctttacctccaactacaaggggtggacctccatttttatcacaagacaggagaagcgctgatcaagtcgctcagtcaaaggaagctgaaaggctggcagctctcaagtcttatagaagatcgaaggtactttgttttgtctgcggagaaaaatggagcaaggatcataaatgtgcatcttcaattcagctgcatgttgtacaggaattgatggatgtcttgcatgtcactttgttgtctgatcatgaagcatatgaattccaggaaaacgatacacttatggctatttcacctcaggctgttaatggcactgaatcaagtcactctatcagattgagagggtgggttcagggtattgaagtgttgatgctgatcgactctggaagcactcattcatttgttgatcatcagcttggattaaggttgtctggagttaaagcaatgacagaaccagtcagagttaagattgcatatggggggcatctctcttgttcattgcatatacttggctgtgattggttgacccaaggcatcaatttcaaaagtgatttcagactgttagcattgggagcctatgatgtaatattgggaatggactggctagagcagttcagcccaatgaaagtggattggttgcaaaagtggctggaatttaagttgggaaattctgtaatcagattacaaggcaccttgcttccaaattctggaccagtgtttgttagaccctacagacatactcctaggcagaaggatgaaattgaaaggcaagttcaagaaatgttacacaacggggtgatccaacatagtaccagtgcattttcttctcctgcattgttggtgaaaaagaaggatggatcttggagggtttacattgattataggcagttgaactctattactcaaaagggcacttatcctatgccagtcatagatgagctcttggatgaatcagctggtgctaaattcttttctaaactggatcttagagctggttatcatcagattagaatggctgcaggagatgaacataaaacagccttccaaactcatagtgggcattatgagtataaggtgatgtcctttggacttacaggagctcctgcaacctttcaaagtgcaatgaatgataccctttggtcagtcttaagaaaatgtgctttggtattctttgatgatatccttatttacagccctgacatgccatcacatctttgccatctcaaacaagtgttgcagctacttgttgaccaccaatggaaagtcaaacttagtaaatgtgcatttgctcaggaacaaatttcttacttgggtcatataatcagtggctccggagtagcaacagatccatcaaagatccagagcattgttgattgggcaagaccaactaccatcaagaaactaagaggatttttgggtctggcaggatactatcggaaatttgttaaaaattttggtaccattagcaagccacttacccaactcttaaagaaggatgttccctttcagtggactgctgaggtagatgaggcttttgtggctctcaaacaagccttagtttctgctccagtgttggcacttcctgattttaaccaaacttccacagtagaaaccgatgctagtgactttggtattggggctgtactttctcagaatcagcatccagttgcttttattagtaaggcattggagccaagaactcagggactttccacttatgaaaaagagtgtctagcaattatgatggcagtagaccactggcgcccttatttacactttcaggaatttcagaccttgacagaccaccatagcttgatgcatcttactgaacagaggcttaatactccatggcagcacaaggcttttactaagctcatgggattgcaattcaagattgtgtataggaaggggaagtataatgttgctgctgatgctctatccaggaatgtgccaacagaattgtctgaatttctagccatttctgtatgttctcctagttggctgcaggaggtggtgaagggatatgaacaggaccctgtctcaactaaacttttgatagaattggctattaatcctgatgctcatactcattataagctgtctcaaggacttttgaaacacaaaggaagagtttgggtgggcgataatccatctcttcaataccaaattatctctgctttacatgatagcccaatgggtggtcattcaggattccctgtaacttacaaaagaatcaaggctctgttctcttggcgacacatgaaagctgccattcagcatcagctctcttcttgctctgtttgtctgctatccaagccagacagggctaagtatcctggccttttgcaaccgttaccagtaccagaaggagcttggcaaatcatatctatggacttcattgaagcccttgatgttgctaaggtttttatgctgaatgtttacaaattgcatggacttccaaaggccattgtttctgatagagatagaattttcaccggtacattatgggaacaactctttatcaggttaggcactaaactacacctcagttctgcttaccaccctcaaactgatgggcaaactgagagagtgaatcaatgtttagaaatttttttaaggtgctttgtccgtgctactccttctaaatggtctgaatggctccatttggctgaattctggtacaattgttcctatcactcttccattgataagtcaccttttgaggttctctatcgttaccccctgcacattttggcattagagaggatgcttgcaatattccagatttggatatgtggttatctgaaaggaaactgatgacccaacttctcaagcaacagttgaaccgagcccagcaggttatgaaacaccaagcagataaaaagaggagtttcaggcaattccaagaaggtgaatgggtttttctcaagctacagccctatatacagtcttttgttgccaaaagagcaaaccataaactctccttcaagtattttggtccttacaagatcatttctcgagtgggtcaggtggcttacaagttacagcttccatctggcagtgccatacaccgtgtttttcatgtgtcccaactgaagagttctaaagggttcaagcagtcagttcagcaacaactgccttccccaactgcaaatatccagttcccagctgaagtcctggataccagagttacccgaaaagctgatgcaacatgggaacgtgaagctgcactcaagcaaagatctccaaatgctctgacttggggacaagtc

SEQ ID NO: 41377 - DNA, 210 bp, Oryza sativa
  Clone ID: PAT_MRT4530_44728C.1
cgatgaccctgatcagatggtgaagccggcggtgcggccgacacagtacgtgataaaggctgcagttgatgcctgcacggtgcgcccattggcgttcacgtcgtccatcgggggcgtgaccatggaccctagccgagccacctacgtggttgcaggcgagccctgatcgagcgatcgttcgttctggaagaaaaccaacaactggtactg

SEQ ID NO: 41378 - DNA, 5373 bp, Oryza sativa
  Clone ID: PAT_MRT4530_44729C.1
atggtgggcacgctcacctacaggctcgacctcagtgacttctcgggcaccgggtggaccgcgaagatcatggagaacaaggcgaaacttgacttgctcctgaagaagatggaggaaacagagcggaagagagaggagggggagaagaggcagtccctggagatgcgctcgtttaaggaggcggtagaatcctggataccggtagtggagaagaaggtggacgtactccagtccgccatggatctgctgcaaacgcaagtggagaagctggcgagcgctccggcaaatctggagccatccattccagtcgagtacctggactcaccaggtgttcgaccaaatggctcaaccggtccaaatggccaccgcattcaaaatcttacacgggaggaggttacggggtttaccccaaggccaaccccggtcaatggtacgtacgcgtcccacaatgtctccccgattcctttcaattttgatgcctctgccatgaattctttccaaactgcggtgtctgttggtctgagcggtggagtagtgcccatgacatgccctaagtttgatggagataaccccattatgtggaaggctaactgtgaggcttattttgatctatatggcacacatccttgtaattgggttaaggtttgcagtaggtttaacagagataggcaacaagctcttattaggcaatggattaaaatcagtcaatcaggattagtagcagattatgtagagcagtttgattgcattatgcatcaaatgatggcctatgacccttctcttaaaccagtttactttgtcactaagttcgtagaaggattgaaacatgaaattaaatcagctatgttactccaaaggcctggcgacttggatgctgcttgtactcttgcctttttacaagaagaagctttggaaggtgataaaccaaaagaatccaagagggctgataccactagctatcagaagggctctcataaaggggctatgccacttcctttacctccaactacaaggggtggacctccagttttatcacaagacaggagaagagctgatcaagtcgctcagtcaaaggaagctgaaaggctggcagctctcaagtcttatagaagatcgaaggaattgatggatgtcttgcaagtcactttgttgtctgatcatgaagcatctgaattccaggaaaacgatacacttatggctatttcacctcaggctgttaatggcactgaatcaagtcactctatcagattgagagggtgggttcagggtattgaagtgttgatgctgatcgactctggaagcactcattcatttgttgatcatcagcttggattaaggttgtctggagttaaggcaatgacagaaccagtcagagttaagattgcatatggggggcatctctcttgttcattgcatatacttggctgtgattggttgacccaaggcatcaatttcaaaagtgatttcagactgttagcattgggagcctatgatgtaatattgggaatggactggctagagcagttcagcccaatgaaagtggattggttgcaaaagtggctggaatttaagttgggaaattctgtaatcagattacaaggcattcattctaacacagagagttgtttgcctattgctcctgatcaattgaatggattggctaaatctggtggaatcatgtatctagttcaactggataagaacactgagcaatcttttcaagaaattcctgctgcgaaggatgaaattgaaaggcaagttcaagaaatgttacacaacggggtgatccaacatagtaccagtgcattttcttctcctgcattgttggtgaaaaagaaggatggatcttggagggtttacattgattataggcagttgaactctattactcaaaagggcacttatcctatgccagtcatagatgagctcttggatgaatcagctggtgctaaattcttttctaaactggatcttagagctggttatcatcagattagaatggctgcaggagatgaacataaaacagccttccaaactcatagtgggcattatgagtataagtggactgctgaggtagatgaggcttttgtggctctcaaacaagccttagtttctgctccggtgttggcacttcctgattttaaccaaacttccatagtagaaaccgatgctagtgactttggtattggggctgtactttctcagaatcagcatccagttgcttttattagtaaggcattggagccaagaactcagggactttccacttatgaaaaagagtgtctagcaattatgatggcagtagaccactggcgcccttatttacagtttcaggaatttcagaccttgacagaccaccatagcttgatgcatcttactgaacagaggcttaatactccatggcagcacaaggcttttactaagcccatgggattgcaattcaagattgtgtataggaaggggaagtataatgttgctgctgatgctctatccaggaatgtgccaacagaattgtctgaatttctagccatttctgtatgttctcctagttggctgcaggaggtggtgaagggatatgaacaggaccctgtctcaactaaacttttgatagaattggctattaatcctgatgctcatactcattataagctgtctcaaggacttttgaaacacaaaggaagagtttgggtgggtgataatccatctcttcaataccaaattatctctgctttacatgatagcccaatgggtggtcattcaggattccctgtaacttacaaaagaatcaaggctctgttctcttggcgacacatgaaagctgccattcagcatcagctctcttcttgctctgtttgtctgctatccaagccagacagggctaagtatcctggccttttgcaaccattaccagtaccagaaggagcttggcaaatcatatctatggacttcattgaaggtttgcccagatctcatcagcaagattgcatactagtggtggttgatcgtttctcaaaatatgctcattttatgaccctttcccatccattttctgcccttgatgttgctaaggtttttatgctgaatgtttacaaattgcatggacttccaaaggccattgtttctgatagagatagaattttcaccggtacattatgggaacaactctttatcagagaggatgcttgcaatattccagatttggatatgtggttatctgaaaggaaactgatgacccaacttctcaagcaacagttgaaccgagcccagcaggttatgaaacaccaagcagataaaaagaggagtttcaggcaattccaagaaggtgaatgggtttttctcaagctacagccctatatacagtcttttgttgccaaaagagcaaaccataaactctccttcaagtattttggtccttacaagatcatttctcgagtgggtcaggtggcttacaagttacagcttccatctggcagtgccatacaccgtgtttttcatgtgtcccaactgaagagttctaaagggttcaagcagtcagttcagcaacaactgccttccccaactgccaatatccagttcccagctgaagtcctggataccagagttacccgaaaagctgatgcaacatgggaatatgaagcagcactcaagcaaagatctccaaatgctctgacttggggacaagtcaaattccaaggggaggggcttgtcaacagcccagctactgccagcagcccaactactgtcgtgcctgaagagctacagaacccacaagtccaacgggccgcacgaatcaaatatactggcagcgaaggcgatgcgatctcgttgatccatcgaagatatcttgttcttgtgatcttgagtggagagtgctcacaacctgccgcagatcgaggaggtgggcgagaagggactcgatcactcgaaggtcgcgagagtctcgccggcggcggcgtgcacgcaggcggcctcgatctcctctcgcgcctccgcgaacttgaggtttacctcgtcgacatccttgccgtagcccgccgtcgagaaggcgcgcctgtgggggcaccccggggaggggcggccgccgctgaagaggagggagcaccggcgtctcagtcgccggagactcccaacaacaaccacgggcaccatacgcttgaaaggagttgttcgtcgctgggtgggcggatgctgttcgtcgcgcgaggctgctctagatcgtacgaggcgaacaagtatccaggctgccgccgccgacgccgaggagcggcggtgccactgctggccctgcagagacagcggcaagtggctggcagctgccgaggacgtggacaagttcttgccggagcaaggcctgttgaaatactcaccgttggcttggtttctctaaattcttttgaatcggagagggacatcgagatggggtatcaaaattcaaagaataaatcggattatgggcttgaggatttcttccaggaggttcaggagattgagacgttgttggacaagatgtccaatataaaccacaaacttcaggaagccaatgaggaatcaaaatccgtcactaaggcttccgaaatgaaagcaatcaacaagcgcatggagaaagatatcaatgaagttgggaaaattacacgcaccataaaagtgaagttggaggagatggataggaataatcttgaaaacagaaaaaagcaagggtgtgaaaagggcacaggcgtagaccgatcaaggatgtcaatgaccattgcgctgaaaaataaactcaaagaaagaatgaaaaatttccagaatctaagacaaattattcaagatgagtaccgacaaggcgttgcgaggatggttttcacagtcactggagagcagccttctgatcaggtgattgaccacctgattgagaccggcagcagtgagcagatatttgagaaagcgattcagggaattgggagagggcaggttgaatatcgtgttcagcttcaccagtacattatatgttccttccatgtcattaaggctggcaattcttacaatagtgctcaaatgtttcataattgcacatacttacagataatagccacggttaaagaaatccatgaaaggcatgatgtagtcatggaaattgaaaaaaaacttcttgaattgcaacagatttttgcggatatggcaacactcgtcgacgcacaaggagagacattgaacgacatagagaaccaggttcaaaatgctgtggaccatatacaacgtggtacaggagagctgcgcacagctaagagactgcagaagaagtcaaggaagtgcatgttcatcgcaatcatcatactcctggtcattgcagctattgtcgttctttcaatcttaaagccctgggctaagtag

SEQ ID NO: 41379 - DNA, 112 bp, Oryza sativa
  Clone ID: PAT_MRT4530_4472C.1
atgacgcacgacctctcggccaaaatcccacgggaaatcacatgaagtatgtatgcttacataaatagaacaccctatgtacattctcgcatatctccccacttcttagttc

SEQ ID NO: 41380 - DNA, 450 bp, Oryza sativa
  Clone ID: PAT_MRT4530_44730C.1
tcactcgaaggtcgcgagagtctcgccggcggcggcgtgcacgcaggcggcctcgatctcctctcgcgcctccgcgaacttgaggtttacctcgtcgacatccttgccgtagcccgccgtcgagaaggcgcgcctgtgggggcaccccggggaggggcggccgccgctgaagaggagggagcaccggcgtctcagtcgccggagactcccaacgacaaccacgggcaccatacgcttgaaaggagttgttcgtcgctgggtgggcggatgctgttcgtcgcgcgaggctgctctagatcgtacgaggcgaacaagtatccaggctgccgccgccgacgccgaggagcggcggtgccactgctggccctgcagagacagcggcaagtggctggcagctgccgaggacgtggacaagttcttgccggagcaaggcatcgaggtgtcccccat

SEQ ID NO: 41381 - DNA, 342 bp, Oryza sativa
  unsure (1)..(342): unsure at all n locations
  Clone ID: PAT_MRT4530_44731C.1
acgtattctctttggtgtgtgtgcaagcttaggtcactggacacggcggcggtggacgacggggaccggcggcgataggctgtgtgcacggtgacncacgtggaggaggcgatcatcatcctccgtatgctccccgtcttcctcaccttcgtcctcggntacgaccccatcccttgcctgctcacctagaccgtgcagcagggctgcgccatggacacccgcctcgccggcaccagcgtcccgtcggcgagcctcttcgnctgccttatcgtttaccagatgctcatccttgtcgtctactgaccgcgcctgctagtttnnattcccccacgccacgggcta

SEQ ID NO: 41382 - DNA, 298 bp, Oryza sativa
  Clone ID: PAT_MRT4530_44732C.1
gcgtgtaggcaccctctaggcgcgcccgccctttttttttttttttttgggttttttgacaaaacaaaattttactattttattatctagttgtaaaaagagtttgtttttagtatttcaacgcaagcccatttgcccggggtggctaagggacacaagatccatgggggatgaaccatagcgatttgcaccggaccgacactggaaatcccagcaagccataacaaccaagaaaaaaattggtggggcctaccacaatataaaaaggttttaaaaaacttatcttggcaaattttgg

SEQ ID NO: 41383 - DNA, 687 bp, Oryza sativa
  Clone ID: PAT_MRT4530_44733C.1
gatctttttcagggacgtcggagtaaaaaaccccgacccccactgctcggaaaattcgactccgaccccctgttatttttcaaaggggttcggagaattaaactccgacccctcttggccgagctcaaactcctccggcgtggcggggctgagattctcctaccaccattacacaaggcaagtgaccctctccaatctcctctcctcatggagtggctgcacctgcactgcagcagccagcagggtttatgcctttctctgcttctttcagagtcccagagaaatgcaacatgaacaatccaaacttgtgcagcaaaatgaacaaaaactagttgcaactgatctgaactgacaaaggacaagtttttgccaaaactagcaaactataggaacaccagcatgcactcgccattgcattttctacaaagaataaaccgcggcaaaaccacacccgagctcagaaatggaagggaaaggaacagcattggtacaagttacctcctgctgatggggttgcagacgcgcggcgaggcggcgagcttggcggcggagaaggggaacgacgcagggctgtcgctggccagccccattgctcagcctcagataccaaaccctcctgcttcttctttcccttccctttgtgtagaaaagaaaagctctgggcaatggcggagcggcgatgagtga

SEQ ID NO: 41384 - DNA, 1405 bp, Oryza sativa
  Clone ID: PAT_MRT4530_44734C.1
ttttttttttttttttttttgaagcaaatttttacatcattacaacgcacaactgcatttagttagactgttatatgtacatacagcaccctcaagtccactgtcaaagtaccatacattcagatccaaaactaattccacaaagctgaacagaatacgatggtaattattgcggcaatagtatgtacagctgatgctaccataagatcatcaccatgggggaggagacctactcaaattgatcatcctcaaagcggataagtataatgacaagcttgattaacaagtactcaagggtcgttggagctgcagcaagatcagaccagagctactactgtggcgatttggtgctgcttgagttgaggtagcccatcttttgagacagcaagttcatatcatctatagcggggttcctggtatcctcatcgagcccaccctcgtgcagcaggtcctcccagaaatcctcatttaactctccgttagatggcttgattttcccgtgttcagagctactggaagcaacatcttgttgcgccttgcctccattggcctcaacagatgaactttcaagatctgatggaacaccattgaaaagtgaatccactggatcatgtggttcaaacattacctgtgacacttgctcggggctagaaccggtacccatgctatcaagttcaggtccctggtcaatgcggcgccttcttttctttgagacgaactcttcaagctccttcctcatctcactctgggagaacagctggcgtatgaactcaggattatgcataactcgtgacaagaatgccatcatgtgctgttgcttttgctcagtaccttgtagcttctgttccatagcttgcaggtctgactttgtgttttgctgctcctgcctcagcttcaccacttcagccatcaacagatgtttgtccctcttcaactgatcaatctctccctcatatccgaagtgccctacctcaaggaatgagccaagagattgctgacttggagatgaattcggaggtttccgacgctttatgcttttaaggagatgcttctgtcctctcagaaaaccctcatttgcaaattcccacttgtcaggatccaccttcctgaagccataggtattgagctgccggacgaagctggagaagttgttgtgcttgaagtacctcggcagcagcacgttcccaaagaggtgaggatcccacaccacgaagctgttgttggtggcgctccacgacacgacggcgtccgtggtcgggtcatccaccatgtcgtacgtcttggtgaggaacggcggtgggccgccgtcggcgagcccgtccatcggcctcggcggctggccattcgccacgcccgtcgacggcccgctctccaccttcaccgggttcaccactcggtagttcat

SEQ ID NO: 41385 - DNA, 249 bp, Oryza sativa
  unsure (1)..(249): unsure at all n locations
  Clone ID: PAT_MRT4530_44735C.1
ccggccgggattccccacagccgccgcctccttcctctcctcgatctccctattcgtcgtagcctcctccctcgttcgctccgcccgcaaccatgtcggcctactgcggcaaggacaaggaccgagctatcaagaacgctgnctacattgngactcctggnaagggtatncttgctgcgnatgagtccactggcaccattggnaagcgctncgcagcatnaacgnnnagaacgtnnaggagaaccgccg

SEQ ID NO: 41386 - DNA, 672 bp, Oryza sativa
  Clone ID: PAT_MRT4530_44736C.1
atggtggacatctcgtcggcggtgtaccgtaccgatgccggctacgcggcgggagacgaagccaccggtgccggtggccgcgatgtgtttgcgtccacggcgaggcacgccgtgggcgggtcctccatgttctcgacggcgaagcgtttgacgacgaccaagaaccccgccatccaagcgtcacatagtttcaggaacatgggcgagaagacattgcgcgagttcgctgcaccgtttgctgacaacgaatacgtggccgctgtcctcatcatgggatggacgactggctcatcctacagagtttctacaatggactccctcatccagggatcacctcgatgctatgctggtggtgcattcttctcaaagacggtccgagcggccattgatctttttgagaagatggtaccgactatgggctggagcgaagaacgactccagacccgtcaacgtggcatgcataccgtcaaggagacggaaatgctgaccacaaagttggacctcctagtgaagaagctagacaatcaggagaaaggcaaaccacaggctgccgtcaaagcattggattcacatatcacttgcgaggtctgcggaaacaccggacacatggggaatgactaccccgagactcgtgaagaagccatgttcatggggaacaatggctatcgttaa

SEQ ID NO: 41387 - DNA, 371 bp, Oryza sativa
  Clone ID: PAT_MRT4530_44737C.1
aaaaaaaaaaaaacacttttttttttttttttttcccccaaagtttcaaatttcaaatttgataatttttggcctttttttttttttccaaccccttttttttttaaaactttttacaaaacccccccaaggggggaaatggtcctggggcccccattatcccttggggaaaacccatttttaatggccccataaaaagacaaaagagcttggccttgacccaatttcccctcaaaggtgaaacccccaaactcttggagttttaatttttgccttttggcctaaaaaattttaatgtcctaaaaaaaaaatttttgcccccccaccccgagttttttccaaattttttcgcccccttggttccccccgga

SEQ ID NO: 41388 - DNA, 218 bp, Oryza sativa
  Clone ID: PAT_MRT4530_44738C.1
tgcagtgcccccccttttttttttttttttttttttttttttttttttttgaatggaacactacacagattgcattattgacatctgaagaaaagaacgaatacctgcgtgagagttacaacgataacaacctgtgccagcaaaatgatagatgccaattgcccaattgcgtaatcaacatttctacttgcaataaaaaaaatagacctacaaaaatt

SEQ ID NO: 41389 - DNA, 688 bp, Oryza sativa
  Clone ID: PAT_MRT4530_44739C.1
atgtcaggggtttgggtgttcaagaacggggtggtgagattggtggagaagcagcaggcgacggcggggacggcggtggcgggagggaggaggaaggcgctggtgcacacgccgagcgggcaggtggtgtcgtcgtacgcggcgctggaggcgcggctgacggcgctcgggtgggagcgctactacgaggacccctccctcttccagttccacaagcgtggctccctcgacctcatctccctccccgccgacttctccgccttctcctccgtccacatgtacgacatcgtcgtcaagaaccgcgactccttccgcgtcgtcgacgcctaaattgacctatgtataggctcgcatgcatgcaaggtagacgaccatccaccttgcatgcatgcaggctatcattctctcttcgtctccgtcttcgtctttcatctttgttgtggtgtgtgtgaatttattatacttcttatgattgtgtgtgtgactgtgtgagagttcatggagagtgatgagtagtggtatacatatgtgtcgtcgctgatcgatttggtttattaccttgtgggtgggtattaattatcagcagtgtgttatatcaattgcttacttgtatgtgtatcatgtacatgagtgagtgtggctgatgcatatatatagaggtaaaaaaaaaaaaaaaaaaaaaaaaaaa

SEQ ID NO: 41390 - DNA, 432 bp, Oryza sativa
  Clone ID: PAT_MRT4530_4473C.1
aagggaaaaaccggcaggaaatttttattaaaattgggatccccccggggtttaaactgggcccccccaaggaggcaggactttttttttctccccgggccaactatccgggcccaattaaaacccaaaaccccccgccggggggaaggctccagggagcagggtggaacctggggaaaaacccccatatggccggcaggtttagggccaacaaagctggggctggggcttgcctttgaccgaagaaaaccctagcaaacgggggaacccggagctggtgcacaaaagccggaacactgttaagggccgggcagggaaacgggggggcaaacatcctgagcggggggaaacactgggggggcaagactgggcagtttctcagtgaaaacacgggtaattggaaaaagggggttgccactgggctgcacgggg

SEQ ID NO: 41391 - DNA, 261 bp, Oryza sativa
  Clone ID: PAT_MRT4530_44740C.1
atgggcagcgaagtagtagcgacggcgtggtcgatgactggcgacaatcatcggccagggcggcgatggattgaagccgcgcaatggttgtatcgatggagctatgagcccgacgtggcgtcattgatgcgtgcaacgaggcaacgctgtacggaggatgaggtcggggaaggagttgtggagaaacacccagaggtctaccagctagctccacaaggtggtgggctggacgaactgggttcgaagccttaccccttctaa

SEQ ID NO: 41392 - DNA, 1902 bp, Oryza sativa
  Clone ID: PAT_MRT4530_44741C.1
atggatgatcataacttagactacaagggaagtggtgctcttgaagagcttgagatgttaacagtgaatgccaaagaagcccaagagctcatattgacgaaaatccttgagaggaatcaggctaccgagtacctgagcaaattcatgaatgggtcaacaaatatttctgccttcaagagacatgttcctgtagtaacatatgataaggtacatccatacattctcaggattgcaactggtgaggaatcttcaattttatgtggagaatatatcttggagctgcttagaaggctgctgttaatgactgtcataaatccagaggcacagaccgagcttcgcttaggaaaaattgtttatatttattttttggaatgtgctaggctagaaatgactggtcatactaagctacttgccttctcggggacttctcgaggtgagccaagattgatgccgtccatcttaaaggatcttgaccgtcgaacctacctctatagtctgatcatgcctatcatgaacaagtatatatcaggccttggtgaggggaaagctatgtaccttctctttgtgaaagctgaaacactgacagattctggaattccagttcgatcagtcctcactagctactataagagccctcatttccttcaccgcaaacacgatttatacaacaactataccagtcctgatgaggtcattctttgccctgatagccagcagagcatgtactgccagctgctctgtggcctggtagaacgccagcatgttcttcgtatcggggcagtctttgcctcagcattccttcgatctatcagcttccttgagcagcattggcgtgaccttgtcaatgacatacgaattggtcagctcaactccagtatcaccagtccagcatgccgtttggccatgctgaacttccttgcattgcccaacccagagctagctgatcaggttgaggcaatatgcagctgcggttcatggaaggggattctgggaaggctatggcctaatgttaaatatatcgaagctgttcttacgggcacaatggcacaatatatccccatgctggaattctatggtggtggtgcgattcctttcgtctgcacgatgtatgcttcctcagaaagctatttcggtgtcaatctgagtccactatgtagcccagctgatgtgtcttacaccatcctcccaaacatggcttactttgagttcataccattagaggacggcctcaggttgactgatcacgaggaggtgatagagaatgacaagcttgtcagcctggtagatgtcaaggttggatgttactatgagcttgtagttaccacattttcaggtctttacaggtacagggttggtgatgtgcttcaagtgacaggcttctacaaccgagctccgcagttcaaattcatttgccggagaaatgttatcctcagcatcgattctgacaagaccaacgaggaggatctccacaacagtgtcaccactgctaagaaaatcctggagaaccaaaattacctcctcctggagtacactagctacactgatatttccactgtccctggccactacgtgctgttctgggagatcaagtccacccacgatgaaaggccggcccctcttgacgctcagctcctcgagagctgctgtgctgctgtcgaggagtcactggactacgtctaccgtcgttgcagagcccatgacaggtccatagggcctctggagatacggcttgttgaagctggtgcatttgatgctctgatggatctattggttagccatggcagctccattaaccagtacaagacacccagatgcatcgaatctagccttgcactgaagctgctgaactccaaggtcattgcctgctttttcagtccacaggatcctgaatgcggcatgtaa

SEQ ID NO: 41393 - DNA, 202 bp, Oryza sativa
  Clone ID: PAT_MRT4530_44742C.1
tgaattcgagagaagagaactcggtgcaatgcgtagagattgttagacactggatgcaggcaaccctgacagagaacgtaggcacggtaagtgccctctcacaccagaagagggtgggctcatgctccgagcattgggatttgggaagggtgtgcacatatatgttgcatcatgggaggggtatggtggacagtcgattttt

SEQ ID NO: 41394 - DNA, 2460 bp, Oryza sativa
  Clone ID: PAT_MRT4530_44743C.1
tcggtggagttctgcgtcacacagcaaagcaaggcaatggataatggaggacagcgtcttgatataatttttaagttttcaacatattatcacatcacattacacttttcaatagaacactactagagggagttccataaattgagacactgtcgtgtccagaaagatagcaagtggatcatcttgcacaggctgcaccgtcgtattggttcagaatctttcaaataaagtcgaaatattaagaagatatgcttctcagaccatgcatcaccacactatataaggggcaaacaagctcccagtatcgttactttgagcccccgcctccccttttgaaataaggttgactgtaattctgcttttgttcgtaatatggatgatcataacttagactacaagggaagtggtgctcttgaagagcttgagatgttaacagtgaatgccaaagaagcccaagagctcatattgacgaaaatccttgagaggaatcaggctaccgagtacctgagcaaattcatgaatgggtcaacaaatatttctgccttcaagagacatgttcctgtagtaacatatgataaggtacatccatacattctcaggattgcaactggtgaggaatcttcaattttatgtggagaatatatcttggagctgcttagaagctcggggacttctcgaggtgagccaagattgatgccgtccatcttaaaggatcttgaccgtcgaacctacctctatagtctgatcatgcctatcatgaacaagtatatatcaggccttggtgaggggaaagctatgtaccttctctttgtgaaagctgaaacactgacagattctggaattccagttcgatcagtcctcactagctactataagagccctcatttccttcaccgcaaacacgatttatacaacaactataccagtcctgatgaggtcattctttgccctgatagccagcagagcatgtactgccagctgctctgtggcctggtagaacgccagcatgttcttcgtatcggggcagtctttgcctcagcattccttcgatctatcagcttccttgagcagcattggcgtgaccttgtcaatgacatacgaattggtcagctcaactccagtatcaccagtccagcatgccgtttggccatgctgaacttccttgcattgcccaacccagagctagctgatcaggttgaggcaatatgcagctgcggttcatggaaggggattctgggaaggctatggcctaatgttaaatatatcgaagctgttcttacgggcacaatggcacaatatatccccatgctggaattctatggtggtggtgcgattcctttcgtctgcacgatgtatgcttcctcagaaagctatttcggtgtcaatctgagtccactatgtagcccagctgatgtgtcttacaccatcctcccaaacatggcttactttgagttcataccattagaggacggcctcaggttgactgatcacgaggaggtgatagagaatgacaagcttgtcagcctggtagatgtcaaggttggatgttactatgagcttgtagttaccacattttcaggtctttacaggtacagggttggtgatgtgcttcaagtgacaggcttctacaaccgagctccgcagttcaaattcatttgccggagaaatgttatcctcagcatcgattctgacaagaccaacgaggaggatctccacaacagtgtcaccactgctaagaaaatcctggagaaccaaaattacctcctcctggagtacactagctacactgatatttccactgtccctggccactacgtgctgttctgggagatcaagtccacccacgatgaaaggccggcccctcttgacgctcagctcctcgagagctgctgtgctgctgtcgaggagtcactggactacgtctaccgtcgttgcagagcccatgacaggtccatagggcctctggagatacggcttgttgaagctggtgcatttgatgctctgatggatctattggttagccatggcagctccattaaccagtacaagacacccagatgcatcgaatctagccttgcactgaagctgctgaactccaaggtcattgcctgctttttcagtccacaggatcctgaatgcggcatgtaaaactttggtaaataagcaagtatgcttctgtgcttgcttgatatgcaatcttactacaattaaccgaaattaatagtctgagatatagtggaaataataataataataatgtactactagcttaaataatgaagttcttattttagatggctgcaggctttaggagcttcatttccaatctagtcagatcagcctgctgcctagataagtgggtataaatgttgccaacttttagattttcatttgggttttaattactgaatattcaggggccaacatacccaaatgagaatgatatgtgctgttgctgct

SEQ ID NO: 41395 - DNA, 1014 bp, Oryza sativa
  Clone ID: PAT_MRT4530_44744C.1
atggacctcgtcgctgaccacgacgaccactccgtagtgctcctcgagatgcgttacgacaaggaaggctacgacgaattcgggatcgattacttcgtctacaattacgccgccgccgacgacgacggcgacgacgatgacccaccacggccgccgtcgttgtcgctgctcccgtcctactgggatccattggacgaggacgaaagaaggcggcgtcaggatccgaaggtgcaccagctggacgcagatagcaccggsctcctccgccgccgccgccgccgccacggcgaggacgacctcgtggtggcggagctcatcaccaccagggagagcgagagcagcaagctggaggaggtcaagctcctcgtgctccgctccggcgagtggagcgtcacgcgggcggagatcatccacgacggcagcaagggcgaggagctctcctactgggagaccgacatggccgtccccgtcggcgaccggcggctctgctgggtcgacctgtaccgcggcgtcatcctctgcggcgacgacctgttcgacgaaattcccccgcggctgcagtacgtgccgctccccgtggaggcccccgccggcgaattcgaggaggacagcgacgacgagagcacgcggagatgcctgatggcgagctcaagttcatcgacgatcgacggcgacggcgaccacaccatgttgtcatggaccatggacgccatgatcgacgccaccgagctctggtccctcgacgcctacgccggcatcccacgtgtcatcccggagtaccctgtcatcagcacagacgacgctgacgtcatctgcttcctcccgcatgctaccaccctgtgcaaccattctagcaacgccttcgtcatcaacacatggacgctaaggatgaacgacgacgacgacggcatggagtggaccatggacgccattgtcgacgccaccaagctctggtccctcgacgcctacgccagcatcccacgtatcaccccagagcacctatcgtcggcatag

SEQ ID NO: 41396 - DNA, 738 bp, Oryza sativa
  unsure (1)..(738): unsure at all n locations
  Clone ID: PAT_MRT4530_44745C.1
tacccacatnctttgtcgcgcgccgccgcagnaatcgggaagccatgccgcggtgcgagtcgcgaaaccattttcttgcgagtagtnnagtagaaggggnnagagtgagtgnnaggggcgtgcctgnncaatggcgactggggaggaggttgtcccttgagnngttccggtgaccccgaggtggatgggctgccttctttttggtaggagggccccgtcgaggtagtacgagcgggcgggcgggatggagtaaaggcccgccccaagccccggcgaagggatgaagaaagaagggccgggcgagtgcccgctccgaagggaagaaagaaagggatggccccaagcccgtngtaaaannnaaaaannaaaaaaaannnaggggcgggcccccttcgagccctccanngcttttnngttcccttttanngtgagggtnnntaattgcngcngcctnntggcgtnnaatcatggntnncatagcnntgtttcccttgtnngtgaannattgttannntccgcttcaccaatnnntccacacannnacatacnngagcnncggannagcatannaagtgnntaaagcctnnnggggttgcctttaatgagntnngagctnnnactcacatnntaattgnncgttgcngcttcacctttgcccgcnntttnnncagttcgggaaaaccttggntcgtgcccagctttgcatttaatgnnaatcggccccaaccgcgcccgggg

SEQ ID NO: 41397 - DNA, 349 bp, Oryza sativa
  unsure (1)..(349): unsure at all n locations
  Clone ID: PAT_MRT4530_44746C.1
cccacgcgtccgcccacgcgtgcgcggaggcgggggaggacacatangcggacgcgtgggcagacgcgtagcacagacgcgtgagattgagccgagaatacttggaccggttccggcgggcataccaattttatttatattgagactgattaaccgagagctttttttttatgagggggggggggggaaaacaaaaaatcaaggggggggaaataaaaacatactaggggggggggggggtgaagcatttaagggggcttnnngatgcacatcttngaagttgacatgtatngaacacaaaatagatcgggctttaacatcaaatggtaaaagcgaaatttgnttattg

SEQ ID NO: 41398 - DNA, 106 bp, Oryza sativa
  unsure (1)..(106): unsure at all n locations
  Clone ID: PAT_MRT4530_44747C.1
acaactgacacagctgggccctgaagttacatttcccgctctgaacagcataggtatacagatcatacacacacnccaaacacttgaaaagtgctaaaccatgcct

SEQ ID NO: 41399 - DNA, 1059 bp, Oryza sativa
  Clone ID: PAT_MRT4530_44748C.1
atgggtcttgtgggtgtagggccacgcacccgtactagggtcaccttcgctcccttggagcagcagccccacgttgcgagcactagagacctctacgccaggcaccgcgaccaggacttcgctcgtgctgtcgacgacatcaaccgggtcgtcattgacggttcaacgacgatccaacgtttaggcgcggggattccgacaacgttactcgggcagacgcagctgtacagcggccacccgtaccgactggtccccgtccaactgcgcacgttcctaggccgactccccctccgcacggaggtgtcaggggagacgttgggagaggcgaaagtggtcagggacatgcatgagcgcaagtcagaaatggcgaaacacgccgacgctttcatcgccctgccaggtggttacgggacaatcgaagaactgttggagatcatagcgtgggcgcagctggggatccacaacaaaccggtggggctgctcaatgtggacggctactacaacaacttactctcgctgttcgacaagggcgtcgaggaagggttcatcgacgccgcggcgcggaacatcttcgtcctcgccgacaacgccggcgaactactgaccaagctgacggaggcggcggcagcggcagcggcggcggttgagggcggcgacggggatcaggtatccatcacattcacagctggcttggcagtagctagcagtggaagcatatcactgcacgcaggtaagaaaaacattgagaggggggtgttggtcaaggtagaacatatcatcaaaaactttctggatcacaaggtgggaaggtttgagcaggatggagatgatagaagagagtgtaaaattgattttgaatgtttatatggaagtggcgtcgtaaatatagtccgtctcttttttaaggggtggggtgaattgagggaagagatggcattgacgcacccaaatttagtggagcaatgtgatccttcggaatatccaaatgcaagcctccatatcttcatttcatatggagggtcatccaaagattccccgctatatttcttgacactgtag

SEQ ID NO: 41400 - DNA, 773 bp, Oryza sativa
  unsure (1)..(773): unsure at all n locations
  Clone ID: PAT_MRT4530_44749C.1
gattttggcagcttgcaaagcccaaacagaacttgtactcttctagctgctctatctgaacttctcatcaaacacactgcaaacattacggtatctcttgcgttgatgtcttggtgatcgacaggatgcaaggggaacaccatgaccatgtccctgtctacgagtcaggcaccgaggtgttccaaaagcttcaggagaaatggaattccaccaagcacaagcgataccgcgcgatgtactccagcgtcgtcggcggaatcatcctcgatccatcgatgatggtcatccccatcgacgatcacatggtccacagaggccatggcgtcttcgacaccgccatgctttccgacgggtacctgtatgagctggattcgcactgggatcggctgctgctatctgcatccaaagcaaagatcagctccccattctcccgcgaaacacttcgcgccattttggtgcagatgacggctgcgtccaagtgcaggaatggctcgatcaagtactggctcagcgccggccccggcgacttcctcctctcgccaaagggctgcactgcgccggcgttctacgccgtcgtcatcgcgtccgccgccgccgacgccgccggcgggcacccgcggctcaaggagggcgtgagggcgatcacgtcgacggtgccgatgaaggacccgttcttcgcggcgatgaagagcgtcaactacctggcgaacgcgctggccattgccgangcagaagaacgcggcgcgtacgcgtcggtgtgggtggacggcgac

SEQ ID NO: 41401 - DNA, 732 bp, Oryza sativa
  Clone ID: PAT_MRT4530_4474C.1
atggccgcggcggaggagcagctcgccacgacgccggagatggagatggagatggagtatatcccactcgatggttacaacagccactacgtgcgcgacgacgatccttaccggcgttaccgcgagctccggatgctcgcgccgccggcgaacgagatctccggccgcctcctcgaggcggcggacgaggacgccgccatgtcgtcgtcgctctgggacgatgagttcgagctcaccggcggcgccgacgccgaccgcttcaccccgcccggcccgcgcctcccgcgcccgcccacccaccacctcaacatcttctcttcccggctgcagcgcctcgcgtccacccgcgcgccgccgccgatgccgccgccgatcgacgatggcgacttcggcgtcgtcttcttgacaggcggcgcccggcgccatgtcgccgtggccgccgccagggtggcgccggcggataccagctgcctcgggaagagcaagtacgaggaaccgcgcggcggcggcgagacggcgatgggcggcgcggattcgacggggtgcgtgatctgcatcgcggagttcgaggtgggcgacgagctgagcacgatcccgtgcgcgcacaggcatcggttccacgacaagtgcctcgccgagtggttgaagcgaagccgctcctgcccgctttgccgccatctccttcccgccgtcgttcccgccaatacccgccccaacatccattttctttaa

SEQ ID NO: 41402 - DNA, 929 bp, Oryza sativa
  Clone ID: PAT_MRT4530_44750C.1
cgggctgcaggaattcggcacgaggctttttgaaaaattgtttatttgagggcaattctatcatcatgatgtcacaaatagtattggcaaaaagtttctcataacaaacaaatcaactacattcaatcacatacacgaagattgaagagaagggatgtcagttgacaacatataagcttcactgtgccagcttgtaagacaattacaagataactcctattgatttcaggtaacagaaccaaacttggaaattaattaacagtagccaagtagcagctcattattctttactagaaggtgtccaacaaagtagagcaacaaaaaggtgaaacgtcaaaccaacagagaatagaagtgccataagattttaaaccctgtggtcaatgtaatctcagccgatgagcaatttgttctcttccagaaatgagtaggtcgggacttcgaggttgtatggtgcagggcccttacggattctacctgatatatcataatgtgatccatggcatggacagaaccagccaccaaagtcaccagcgttgggaagtggaatgcagcccagatgagtacacaccccaatcacaaccagccactcagggttcttgactcgttccgcatcctgctgtgggtcacgaagagatccaatgtcaacgctgttcgccaagttgatgtcttcctctgtcctgcgcctgataaaaactggcttgccccgccacttcacggtcacagtggtgccaggctcaatactagagagatccacctcaagggaagcaagagcaagaacatccttgctagcagacatgcttagaacaaacttcaaaacgagcaagcgcagaagcgaagcataaataaaccttccaccactcaacacaaagtatgcaaacgctcttttacttgggtcacctggctggtatctttcatcggacgattcg

SEQ ID NO: 41403 - DNA, 894 bp, Oryza sativa
  Clone ID: PAT_MRT4530_44751C.1
atggagccactcctgcaggtgctcgccgcctccgactccaccgtctgggaggggctcaacgcccaagttcaagctctggcggatgagcgggcgaccctggaggcggagtgggcgcagctcgtggcggactgcgcgcgggttgacgaggggcgccgcgccgtggacgacatggtggaggtggggcgcaaaatgcgccaagcccaactggcggagatccaggcgcgcgaaaagacgctggactcggtcatgcgggagatggaggaggagctgcaggcggcgctcatcgcttcgagcgtcctggatgaggcgctgggcgacatccacttgtacactctcgctgacctggggcgcctggtgcaagaccaagccggggagattgcagctctctgccttactaacaagattggacctggccaactctccgacgccgtcgaacggttggagcgcgcgggccgccgggtaggcatttccgtgcgccgggataggaagctcccgcccacacagccggcactcgcgctccggctagatggtctggcggcagatctggagaggctggaggaggaggtcggcgaggccgtgaagtcgttgtcggcttctttggcgcgggctgcggtggagctggtcctcgcgagtcatcaagctcgcgaccccgacttcctcctgtggcgtgcgcttgaggacttccccccgggaaccgaacagagggctcgggagcaagttcgggaggcggctgacgcgatcgtctccagtttcgaggggtcagcccctcagttcaatctcacgcttgcctcagacgaggagagcgggagcaaagacggtggtggtgatgatggcggcgaggactgggacgatgtggtcagtggcgccggactcgggggcccgggcactccgtga

SEQ ID NO: 41404 - DNA, 782 bp, Oryza sativa
  Clone ID: PAT_MRT4530_44752C.1
ccacgcgtccgcgaatttgagcaagaagtccatccgatagtgggggagatcaaaaagtacttttttatgggcagaggtatagctatcaagtagaagtctttcgctgtgactagggatagacaggagatgatccctcggttcgtctgagccggaccggagtcgaatacttcggatcctgcatctgcttcagttggtgaggtgcaaatgtgccttttggaccgatcctacgaataagaggcattaacaaagcatttatgagacaccatactttcaataggcaagggccagcccgaagatcagcgggatctttctccaagctaagtttcgacccccgagggaaccggccacgatgcgtgggggtatcggtgctgataaacttgtctccgctcgctcccctgctcgttcaaagtattccactcgctaggatcttagtaaataagcttgctctgaccttcctagctttgagagcaatactacctgtaataacacaatgaacttatcctacttagggaacagactggcatcaaggagtccaaagcatcggtatggctcgagtgaaaaaagagaaagactattgtcgtccgtcatttcacgccctattgacattatgactaagaatagggttgcccattcctgccatggtccatgggatcttcgagttgcgagttagcttagagttagtttaagaatcacaggggaaggcaaaggtagataatctggttccacctctttactagagagccataagcaagatttctataactgaccgttaagataacagg

SEQ ID NO: 41405 - DNA, 426 bp, Oryza sativa
  Clone ID: PAT_MRT4530_44753C.1
atggccagtgaaaatagagttgtcgctgcactctgcaacggccaccgcacccgtcgccgctgctaccacaactgcaacccgctgctgccgccgccgaggtcatcgctgcactccgtcgcggttgccgaaccccgccgcaaccgcaacccaccaccactgtcaaggtcgtcgtccccatccagattcggcgagaacaaggctagatccgagccgacagcggtggcggcagctcgatctcaccgcggtcatgtcgtcgtcgcggcggcggatccgaccttccccgtcatggtggcggtggctctagcctccctcgtcgacgtggcggtggatctggccacccccgtcatcacgactgccggattcggcctcgagctcatagcggagaggcggtggcggctatggcagccggcggtggtggaggagtga

SEQ ID NO: 41406 - DNA, 1527 bp, Oryza sativa
  Clone ID: PAT_MRT4530_44754C.1
ccggccgggttctgaattccggggcttccggcgccacataataaataaacaaagccagccagcagcatcgccagtgagccacagcaccgccggcagtgaccaacagcaaccaatcagcaaatcagcaatggagagggctctgatgagcctcatgaggcggcgctccctcctccagagcggcggacgagcaccgccggcgatggccgccgccgccggtggctcaccattcttctccaccctgcagcaagcagccgccgcagacccggtccagtcgcctggcatcttgccagggctcaagatcagggactctgcgtcacagctgattgggaggacacccatggtttacctgaacaaggtcactgaaggatgtggggcccggattgctgctaagctcgagttcttgcagccgtccttcagcgtcaaggacagaccagcaatttcaatgttggaagatgctgaaaagaaggggttgatcaccccaggtaagaccacactgatcgagccgacatcagggaacatgggtattggcctggcattcatggctgctcttaaagggtatgaactcatactcacaatgccttcatacaccagccttgagaggagggtgaccatgagggccttcggcgcaaaactcgtccttaccgacccaacaaaaggtatgggaggcacggtgaggaaggccgccgagctgtatgagaaccatcctagcgcgttcatgctgcagcagtttgagaatcctgcaaatgtcaaggtacactatgagacaactggtccagaaatctgggaggatacacttgggcaggttgatatttttgtcatgggaatcgggagcggcggcaccgtcactggtgttggcaagtatcttaaggagaagaaccccaatgcaaagatctatggagttgaacctgctgaagcaaatgttttgaatggtggcaaaccaggtcctcacctcatcactggaaatggagtgggatttaagccggaaattttgaatatggatataatggaaaaggttattgaggtgaaaggtgaggatgctgttaagatggctcgagaattggcactgaaggagggtcttctggttggaatatcatcaggagctaacacagttgctgctcttgaactagcaaagaagccagaaaacaaagggaagctcattgtgactgttcttccgagtttaggggagagatacctgtcatctgcattgtttgaggaattgagagcggaggctgaggccatgcagccagtgccagtggactaacttggataatcaacctaggcattgagtatttgatgaacgaaattgctatactctaaataaattttcaatttgtactttaattccccattacaaattatgtatcttcagattgtgctgtcactgaactatatagatggactctctctatgtaattccacatttatcagaataacctatgatctccctctcatttcttttaaaaaacgagtttctattttccattttaatggaacaggttaaaaatgtaaaaaaaaaaaaaaaaaaaa

SEQ ID NO: 41407 - DNA, 253 bp, Oryza sativa
  Clone ID: PAT_MRT4530_44755C.1
aggttagtcgggaacccgaacctagaaaactggtgttctacaagtgccagcccgccctcggaaaaagtcgttgttctcccacgtcgaaggaggagggagtacaccgcggagggcgccgccggggtccgccgaccgccgtcgctgcggcggcacaggcgccgcctcgaacgggtgatcgccttgccgatatccgagttctcgcccctcttcctcctcctcctcgatgaattcgaactcttagcacttttcggcg

SEQ ID NO: 41408 - DNA, 315 bp, Oryza sativa
  Clone ID: PAT_MRT4530_44756C.1
atggttcaatatgttcagaggaatttacatggatacccttatgataggacattaaaaggggcatacagtgtccattctaactatgggccccttgacgggaccctggcccgacccataaaaggcgaatggccttcatgggccgtgctgctaggtgggctccttggagaagccggtcttccatggggagaacccttcctgcttcgaccagaggggagacttggcggtgagcccttcgggcttggcggcaaacccttcatgcttcgacttgaggcttcgcctagaggggaaacttggtggtgtaatgatatcacttga

SEQ ID NO: 41409 - DNA, 408 bp, Oryza sativa
  Clone ID: PAT_MRT4530_44757C.1
atggcggtgagctcgcggcgcgcggcgagatgcatgtgcggcggtgcagcacggctcggcaggcagcgctgcgaggtgcggcgacgcggcggagacccggcgcaggcgcaacggccatgcgggcagcacggcgagggggcggcggccgtgctggcggcgcggctggcaggcacagacgtcgcgctagtgcggggcacaattggcggtggttggttcttcggagcgacgcaggttaaggcgtgcgaaactctgcgtgggatggcgtcgctgtcgtgcagggtagcatggtggccggtcgatgcggtcgccgactcgccatgcgtaggcgacgcggtggctcgggataggggcgacgtcgtgcgcgaggctatgcggcggccgttcagcggcatcagccaggcgtcgtag

SEQ ID NO: 41410 - DNA, 522 bp, Oryza sativa
  Clone ID: PAT_MRT4530_44758C.1
atgccgctgccgccgctcgccacgaccgccgggcgcggcaccccgtccgccgccggccgcggctgcagctgcccgccgcccgccaccacgcgcggcccagccggccttcgccccgccacccgccgccggccgccggccgcggccccgccgccctccgccgagcgccgccccgccagccgccggccgctgcggccccgctggatgggaaggggaggagggggaggagaggaggaaggggaggagttggaggagaggggacgaggaagagaggtttgccacctcctctatactgcgccgtcgctcgtagtctactccatcccactcgtcgatgtgcaccggcgatcgggtgagcagatctccagaaccttcgtcttcgacgtcctgcaccgggagaaggcggcaataaggattttgggaagcgcttcgcgcgattgccccctatttgaccacaacagctcatcttcctcctcgctcgcgtgctacgtgccatcgtcaacgcccgcaaccgcgagtacttcctgc

SEQ ID NO: 41411 - DNA, 199 bp, Oryza sativa
  Clone ID: PAT_MRT4530_44759C.1
cagcattggtggctttgttcacaacgtcttctctggcaagtccaagcagcacggcgaggagccgtctcatgtcgagagtgacaaggagttcagtaacatgttgatccgtggtgtcaactgtcaactgctcagcaggaagttggaaggaagcctatctactaaagcaagaaggttaacttgcataagcctgaaggtttag

SEQ ID NO: 41412 - DNA, 216 bp, Oryza sativa
  Clone ID: PAT_MRT4530_4475C.1
atgacgtcagagagggacgattgcaatgagcaccgatcgggctctccccgtggcgccatctcatgctcccacgcacgccgccgcgacatgctcgatgaagaggctctcctgggcgtcgtcatcatccaggatttggctcccagggcgttcagggtggctccaggtctcgactcaccgccaccgcctagagctatgcatgggtcggccactgcctag

SEQ ID NO: 41413 - DNA, 1018 bp, Oryza sativa
  Clone ID: PAT_MRT4530_44760C.1
tgattttgtagtaagcaacagagtaaattaagaaagctgtgactgcaatagtggatggctcgaccggcagctcgccgcggcgcaaggcgcagccgcgcccgcggcctcctgctcctcgccgccgccgcccccgtggcggtggtggtggtggggcggcggcggcggcgggtgaggaggagcgccaccagcagcagcagcagcagccgggagggacgttcgagttcaacctgcctggccatggcaacgtcaaggcctcgtggagcgtggccgacgacgaggagagccggtggctcgaccgcttggccgccgacgccgagtcgtcgtcgtcctcagcctcggcggcgggcggcggcggcggccaccgtatccccttcggcgacgacagcgtcaagttcggcagcgacgcgtacgagttcatcgccgacctgctcaggcaaggcaccgacgacggcgagggtgagaagccgacgggttactgggagaaggttgacgaggaggggagccggatgctggaccgcatcgccgcgaacgcgagacaccgggcagaggccaacggcgacgacgacagcattggtggctttgttcacaacgtcttctctggcaagtccaagcagcacggcgaggagccgtctcatgtcgagagtgacaaggagttcagtaacagtaagctccctcctcatgacgacatgtaggagaatggtactgcaacaagtacttggggtgtgttgatccgtggtgtcaactgtcaactgctcagcaggaagttggaaggaagcctatctactaaagcaagaaggttaacttgcataagcctgaaggtttaggaggatcatgctgtcaagctgaataattgtagcagtctagttcatgtcttagcttcctctaattatcacaatctggaacgagtgaaacttgcacaatcatatcactgtgatatttcaatttgcttgctactaaacttgatgtgggtttttattcaaaaaaaaaaaaaaaaaaaaaaaaaaaaaaaaaaaaaaaa

SEQ ID NO: 41414 - DNA, 1230 bp, Oryza sativa
  Clone ID: PAT_MRT4530_44761C.1
atggcttgtccgtctcgccgcgcgtggtcggatggcctcccgcccgagctactcgccataatcgtcctgcagctcaactgccttgccgaccgcgcctgcttctcggccgtctgccgcgcgtggcgtgacgcggcgccctacgccgacgccccgcagcgcggtgtcccgtggctcctcctcccggcccgcgacgcgccgtccttcttcagcctccactctggcgccacgcgccgcatgcgcctccccgatggcgtccgcggcacgcgcttctgcggcgtccacgacggtggctgggccgcggtcgccgccgatacgtggcgaggcttcgcggtcgtcaacctcttcaccggcgtgaggctccccctcccggagaagctgagggtcgaggtcccccccggcggcaaccacgaccagttcgcgttggccgccggcttcacccgccaccacatgctcatccgcaccgtcgtcttctcctgccctcccacctcgccgtactgcatcgccgccgcgcacgtgtccagcgcctccaacatcgccttctgccagccggcgtcgctgtccaccagctggaccgcgtaccggcgcgacatggacatcatccaggacctcatcttccacaggggagcgctgctgcagggcttccacgtcctcaccaacaaggaggaggtcctggtgtacgcgcccacggcgccccaccgccccggcgcgccgctgaagctcgcctgcacccgctactcgctgcggccccgcgacgactaccagcccgacgacgccctgccgccgacgttcatcgcgacccgctacctcgccgagtcccgcgggaagctgctcatggtgctgcgccactacaccggcaaccccgtcgtgcggcgccgcacccgcatgttccggatcttcgagctgacgttcggcgagccggcggagcccaggcgcgccgccaccccgtgctggtgggtggagatccccgagctgaccggccgcgcgctcttcctcggccgcagctgctccaggtccgtcgatgtggcgcagttccccatgctccaggaggacaccatctacttcctcgacgacgcgaacctcgacctgtccatggtgctcaacaacgggagcacgtactgcaacgtcgacatgggcatgtacaggaagggcgagaagatcaggcctggcgctcgccaattcccccgtgaattcactgcagactgctcgcctccgatctggctcgtcccctga

SEQ ID NO: 41415 - DNA, 1543 bp, Oryza sativa
  Clone ID: PAT_MRT4530_44762C.1
ttttgaatagatcaaatcgaatagatagaaatagtaaatttgaatggagacacctattctatgatggattttaacttaccctctattttcgtgcctttagtaggcttagtatttccggcaattgcaatggcttctttatttctttatgtgcagaaaaataagattgtctagaaccgacgggaccgaattttctcaatgtatttccacacaggatcataatacggatcttttgtagtgtaagtaatataatatggtatgttatgtggctctttctacacacaaatgcaaacccgctatggatggggattatggatgcggatataggctacgagcataaatgcatgcatatgcggaaccgggtatagcgagtttttttaagtggatcaacaaatactttttgaatagaaagtcaatgtatctaaccaattattttacaggagtatctagttggcgaaggcgatttcagaatcaaaaaaaaaaagtaaagtcaaaatcatttagcttattctctcaatttcaatcgaccgctgttagtatatctaatatgaattggcgatcagaacacatatggatagaacttctaaaaggttctcgaaaaagaggtaattttttctgggcctgtattctttttctaggttcactaggattcttagcggttggggcttccagttatcttggtaagaatattatatctgtacttccatctcaacaaattcttttttttccacagggggtcgtgatgtctttctacggaatcgcaggcctattcattagcgcttacttgtggtgcactattttgtggaatgtaggcagtggttatgaccgattcgatagaaaagagggagtagtgtgcatttttcgttggggattccctggaataaaacgtcgcgtcttccttcgattccttatgcgggatatccaatcaattagaattcaggttaaagaaggtctttttcctcgtcgtatcctttatatggaaatccggggccagggggccattcccttgactcgtactgatgagaagttttttactccacgagaaattgaacaaaaagctgccgaattggcttatttcttgcgcataccaatggaagtattttgagtaccaattgaattttttgaaatgaattgaatgaagaagaattggaagaagaaaagttttctcaacacgagggaaaaggtcccttcgaaattgcattattgtaaggggattttgagtatttatctaaaggaaggaacaaatgaggataagagaaaattgcttctaatttgtccaagtgggatatatggcgtaatattcttccattttcatccgaaaggacttttttctatttctctattccactccatctagatctaagaaagaactcaatgcaatgaaattctactagtatagaaaaaagaggaatagatacaaggtctcaaaccttgttatagaatttttccttcaaagaaaaagaaatatcatatagagtcagcgaataaagcggattcattaacaactcaatttacagatcaaaaaaaaaaaaaaaaaaaaaacaag

SEQ ID NO: 41416 - DNA, 474 bp, Oryza sativa
  Clone ID: PAT_MRT4530_44763C.1
atggcgagcacatggcgggggatggcgagcacatggcggggagaggattccgatagtggctgccctgggagggggaggggacgacaacgacgctccacgttggggatttcaatagtagtgtccctcgggaagggctacgcagcggggctgttgtgctgctgtgcatcgctaaagagggtcaaagggaagcaggcggggccccctctcgcaaccccgctctaccgccaccttgttccgatgttgctggagaaaggagatatggggaggagacgagctaggctcaaccagtgcgtcgcccgggtctttggcaccaagacgaaccgcacaacctgccgctacacagtcgaggtggcattgtgtgccgccgcatgcaaggattaccagcaggtggagttgtcggatccgcctcgctacgtctgcaaggaccggttcactgggttcgatgtctccgagtcctacttagagaccgcctga

SEQ ID NO: 41417 - DNA, 421 bp, Oryza sativa
  unsure (1)..(421): unsure at all n locations
  Clone ID: PAT_MRT4530_44764C.1
aaaagagatcaggtccttttttgcgaaattgcggatacacccttcccgaagagccccagaacggccggtcaacggcaccgttgacctagtgagggggggggggcagtttcgtaaattccacgaaacactgtcccactcctcgtcttcttcggattgcctatatataaaggccacacctcgtcttctccattctccgtctccaagttttttttttctctctctctttgtcgccgttagcttgaggcggcgaggagctcgacgacgtggaggacatggtggcgaaggcgggcgccggcgcttgtgccctctcctgggatganggagggcgaggtgtcccgcggcgagaagaggaggaggncggatggggatggctcgtcgacgtttgcggcggcggcggcataggggcgttcacgggttcacg

SEQ ID NO: 41418 - DNA, 353 bp, Oryza sativa
  Clone ID: PAT_MRT4530_44765C.1
ccaatatctactttccagtgataaagtgatttctgcaattactttgaattatatcaatcttttgttgagttgattttgaacttcgcacaatttaattactaattttagtcatttcaattcatctatcacggttagcattattttaacctggagaaaataaaacatgacaaaactaatatggttttgtgtttcagatgttattgaggaattcataaagtcaggaaatgagatagaagctattcatatcgcccatgaggctggtttgcttgagcgatttccacctgtaccgcttcttaagtcttatataaagagaataactaacaagactcaggttgcactgagaggtggaagac

SEQ ID NO: 41419 - DNA, 396 bp, Oryza sativa
  Clone ID: PAT_MRT4530_44766C.1
tggatgatctagtccagaagcgtggcatcgatggccacttgacttatcctttttgtgctcaggagcttgagacgacgaaccacatccttctcgactgcgtgttcgctcggcaggtctggttacaggtgttgtcccctcctggctaggctgccctctccccccatggcaactggctccagaactggtggccatcttctagggtctgtttacttgaacgcctccgtgccggcttcgactccctgatccttctagtctcttggcaactgtggaaggaacggaactctagggtttttgactctgctctcttcgttctcagtggttttagagtccattctttcggaaggccagctgtggtcgttagcgggtgttgcttcctttggggatttgttgggagtg

SEQ ID NO: 41420 - DNA, 615 bp, Oryza sativa
  unsure (1)..(615): unsure at all n locations
  Clone ID: PAT_MRT4530_44767C.1
atgtgggtagaaataaatatccgacgcaaaatggcttggcctgtacctccgcacgcaccgcagtcgcagccctcgtgttcaccgtctacgaccccgtcatcatcggccatgcacgtccgccgcgccgcgccacgctcgccggcttcgcccttccatcactagcctccctgccgccgcggatccgcgatcgccgcgtgcgtcgggcgcgccgtccatggcgctacccctccgatctctccgaacgccttcggccacgcccggcctcgtcttccagtcacgctccgccatcgtcggtctgatcgcgagtgaggtcgtcgcctccgcaacgtcctcgttgtcgccatcgatctcatcgccatgactgacgatctcctgtcgatgcacgatcctcacctcgtgtttcctcctccacatgtcttctcgatccaatactgaaaccttctgctcgatggggtggcancaccccgcaccgcgagcgctgagtgcgcgggggctgcgtgcgaggncggagacgccggagggcggctgcggcgccgtgcggggggcgcgcgctggcgtgtggctatgacgtctgcggggtgggcggatgttggtcgtccgtgcttgttgttctct

SEQ ID NO: 41421 - DNA, 564 bp, Oryza sativa
  Clone ID: PAT_MRT4530_44768C.1
ggacaaataaaaatggtttgatttattacttgtttaccgggcgcgggacaggacaatttacatacataacgcgaaaaaaaatacatgtacatgtacaaaaactaagactggtcctccatgcatccatcgataaatttgaatggtttgggggggtggttttgagggatattatattattaggcgacggggggggaacaaggggagccggcctgattttggggctggaggaccccaacaatcgccctcggaaaaggggtcggggttggttgcatttccaaaacggggatgcaatcaacggggagcgcggggggtccgggaacccacgccgccacctttcaggggaggtgcccctccacgcgcagcctaaaaagggcccgccctccccccaaaaaaaccgttgccgggggggacttgagccacccggaaaacatggggtccccctggccctggtggggaaaaaagggcggaatcaccggcaagggggcggtaaaaagaaaccccgcgtaagaggccctaacctggaggcggccgtaaaaaacagcggtgtggaaatttggggttgcg

SEQ ID NO: 41422 - DNA, 442 bp, Oryza sativa
  Clone ID: PAT_MRT4530_44769C.1
ctactcctccacgatggagcccactgccacctctccctccatacacgacgtccgtgcccctgcacgcaccgcagtcgcagccctcgtgttcaccgtccacgaccccgtcgtcatcggccctgcacgtccgccgcgccgcgccatgctcgccagcttcgcccttccgtcagtggcctccctgccgccgcggatccgcgttcgccacgtgcgtcgggcgcgccgtccatggcgctacccctccgatctctccgaacgccttcggccacgcccggcctcgtcttccggtcacgctccgccatcgtcagtctgatcgcgagtgaggtcgtcgcctccgcaacgtcctcgttgtcgccatcgatctcatcgccacgactgacgatctcctatcgatgcgcgatcccacctcgtgtttccttctccacatgtcttcttgatccaatgc

SEQ ID NO: 41423 - DNA, 333 bp, Oryza sativa
  Clone ID: PAT_MRT4530_4476C.1
gtccccgacattctttttttcgaccgctccgggaaccggcgagactggtgcctatccttcgccgtttacaagctaacggttcttggcggcaagtcgacgttccaggcctacgaggccttcttccgcagcttcgccgccgccttacatgactaagttgtctcgactgttacgcctccccccccccagcttgggtccccactggctctcctcaatgtacctctgtaaatcacggctgggcagcgataggccgcgcggcggatataggtgacgcgggcgaatatccagtgattacatacaggcgacatggaccatgcggatgaagcgggactcaca

SEQ ID NO: 41424 - DNA, 636 bp, Oryza sativa
  Clone ID: PAT_MRT4530_44770C.1
atgtaggcttcggctgaacctcagctgaaggtttcaacattggatcaagaagacatgtggaggaggaaacacgaggtggggatcgcgcatcgacaggagatcgtcagtcgtggcgatgagatcgatggcgacaacgaggacgttgcggaggcgacgacctcgctcgcgatcagaccggcgatggcggaacgtgaccggaagacggggccgggcgtggctgaaggcgaccggagagatcggaggggtagcgccatggacggcgcgcctgacgcatgcggcgaacacggatccgcggtggcagggaggccagtgacagaagggtgaagccggcgagcttggcgcggcgcggcagacgtgtagggccgagatgacgaggtcgtggacggtgaacacgagggctgcgactgcggggttcccggcggctgggggcagcggcaactaggaagggcgcgcgcgtcggcgaccttcaagcagggagaggcagcggggcttctgttgggagcggcggctatggattccagcagaaggcaggccgacggcgctgaccaggtcggcggcggcgtgaaggaagcaggaggcatcggcggattcgtcgggctggtggcgctgggcgacggcagtttatcgagaaactag

SEQ ID NO: 41425 - DNA, 714 bp, Oryza sativa
  Clone ID: PAT_MRT4530_44771C.1
ggcctaggttatgtagaatctgaattttcttgtgcctgctaaagaaagaacgactgtccatgtttcttcatatttgaagattcaaataattcgaggctttcaattttgaaataaatcactggatcttgttaaaagaaaaatcagagagaaactaaaattagtgaaagagcatatcacaatggctagaatgcttgatctgcaccgatgacgcctgaaggtgacacagggagttgaaactaaaatatcagttctgaatgcacagtgcaaaataaaaaatatcaggaggtggtaaaacagcatcatcatgttgcccatttttcagtatgtattaggatgctaagcataatttagcaacacgcaaatgcatgttttattagggatttctaaatgcaggtaaggttttctaaactaaattcaggtaatgttttcttagcaacacgcaactgcatgttttctaagttggttttcttctgaattcaggtcaggttcatctctccaaacctataaactaaaaagttaatttctaaaaactaaattcttctgaattcaagtaaggtttatctctgaacaatccaaaatagaaacggcattatgaaaaaaactaaaaacttcagatcccatagcgaagcttaaaaaagggagcagtgaagaatttggttgtgccttgaattcagtgaatgagattgtgccgcgtgccggattcctgcagcccgg

SEQ ID NO: 41426 - DNA, 503 bp, Oryza sativa
  Clone ID: PAT_MRT4530_44772C.1
aactcttgcaacacacacaagcttctccttccaaaatactcctcaactagctaagtctaagcttcatcgatccaagcaagctaagccatggtgctccaacacagtgatcgcatggacagcctcttctccccacagacgagctgggtgagcggcccgatcatcgtgggcgccgggccgtcggggctcgccgtggcggttagcttgctggagcagggcgtgccgttcaccatgctggagcgcgccgactgcatcgcgtcgctgtggcagaagcgcacctacgaccgcctcaagctccacctccccaagcagttctgcgagctcccgcgcatggcgttcccggcgcactacccggagtacccgacgcgccgccagttcatcgactacctcgaggactacgccgccgcgttcgacatcaacccgctcttcggacacaccgtgctctccgcgcgctacgacgagacgtccgacctgtggcgcgggcgcgcctcctcgtccgccggggc

SEQ ID NO: 41427 - DNA, 228 bp, Oryza sativa
  Clone ID: PAT_MRT4530_44773C.1
atgggcacgtacctctgcacactcggccgatggcgtggcagaggggctggcggaagtcgacatcgtcgcgggtggaagcttggccggaggagaaatcgccttgagatcgccttgcgcaccgagtggatcgccggagaacgagaagacgaagtttgcttaagcggtgaaaacggagagatgaagataaaaccgaagcgaaatccaagatggagattgttacggaaatag

SEQ ID NO: 41428 - DNA, 2329 bp, Oryza sativa
  Clone ID: PAT_MRT4530_44774C.1
atggagtgtgagaccggtctggtcgaccgtcccctcaacggcgaccccttgtactggggcaaggcggcggagggtcttgcggggagccacctcgacgaggtgaagaggatggtggtggagtaccgcgcgccgctggtgaagatcgacggcgccatgctcagcgtcgccaaggtggcagccgtcgctggcgaggccgcccgggtgcaggtggtgctggacgaatccgcacgaccccgcctggaggctagtcgcgagtgggtcttcgacagcaccatgaacggcaccgacacgtacggcgtcaccaccggcttcggaggtgccgcccaccgccgcaccaaggagttcgccgcgctccagaaagagctgatccgatacctcaacgccggcgtctttggagccagccgcagcgacggctacacgctgccgacggaggtcactcgcgcagccatgctggtgcgcatcaacaccctcacccagggctactcgggcatccgcttcgagatcctcgaggccatcgccaagctgctcaacgccaacgtgacgccgtgcctgccgctccggggcaccatcaccgcgtccggcgacctggtcccgctgtcctacatcgccggcctcatcaccggccgccagaactccgcggcggtggccccggacggcagcaaggtggacgccgctgaggcgttcaggatcgccggcatcgagcacgggttcttcgcgttgcagcccaaggaagggctcgccatcgtcaacggcacggccgtgggctccggcctcgcggcgatcgtgctcttcgaggccaacgtcctggccgtccttgccgaggtcctctcggcggtgtactgcgaggtgatggccggcaatccggagtacaccgaccacctcatccacgcgctgaagcaccaccctggacagatcgaagctgcggccatcatggagcacatactggaaggcagctcctacatgaggcttgccaaggacaaggagcagggccagggcgagcttgaccggttgacgaagctgaggcaggacaggtacgccatccgcacggcgccgcagtggctcggcccgcaggtcgaggtcatccgcttcgccaccaagtcgatcgagcgggagatcaactccgtcaacgacaacccggtcatcgacgtcgcccgccgcaaggcgctccacggcggcaacttccagggcactcccatcggggtgtccatggacaacactcgtctcgccatcgctgccatcggcaggctcatgttctcgcagttctccgagcttgccagtagcttctacagcaacggccttccctccaatctgtccggcgggcgcaacccgagcttggactacggtttcaatggcgccgaggtcgccatggcgtcctactgctctgagctgcagttcctcgccaacccggtgaccaaccatgtgcagaccgcggagcagcacaaccagagcgtcaactctctcggcctcatctcctccaggatgacagcagaggccgtcaccatcctgaagctcatgtcctctactttcctcatcgcactgtgccaggccgtcgacctgcgccaactcgaggagagcatcaaggccgctgttaacaagtgcgtgacaaatgtcgccaagaaatccctgaccctggccatggacgatgacgatctgctagcgctgctcggcgctgctatcgaccgcgtggcggtgttcacgtacgcagaagacccatgcagatccagcttgccactcatacagaagctccgcgcggtgctcatggaccatgcgctggccaacggtgacaaccagctggccaaggtggctgagttcgagcagcagctccgcgcggtgctccacgacgaggtggaggccgcacgcgcggctgtggagagcggcacggccccgaacaggatcacccagtgtcgctcgtacccgctgtacaggttcgtgcgcaaggagctcggcgccgagtacctgaccggcgagaagacgcggtcgcccggggaggaggtggacaaggtggtgatcgccatgaaccagcacaagcacatcaacccactgctggagtgcctcagcgagtggaaaggcgcgcccctgccacttaattagctcaactacgtacgtacaaataagagaagacgaggtgtacgtctgacggatgaaaaattatttaaagcaaaagtactatcctactatatatacccaataattcacgcggcgggccggggcgtaagtgaataaagaataatggactatatataaatgtttgaccacttattataatcatggtgtacttgtgtcttacgttaagaaagctgcttatatataaataaaagtcattttaatt

SEQ ID NO: 41429 - DNA, 538 bp, Oryza sativa
  unsure (1)..(538): unsure at all n locations
  Clone ID: PAT_MRT4530_44775C.1
cattnccnacatctggccattacaagcacctgctctagagnaaggagagtgatggctgccagaggggccgttgcgacgacatgccnaaatgcatgcaagaatggatccttaccaagatgcttacttngcattggcgatcatggcattgtatgacaacaaatggggatgactttattgaccctttggacacaaaccgcagtgcttttcccgagaactttattggagggatgaacctgcnatgagtaccctggaggtgtgtgcaaatgcttggccacgttgcattcctgggtggctgatggctggctggatgtccaaggggtgttgaataccctgcctgnggtgatgttgctgttgtgctctccctgccctcttgttggtggggctgttgcttgggtggctgaagatggggtagttagatactacataagaattatagtagactgctgtccatatgatgattgatgtggcatgtttatgtaactataatggctatgaaaatgatcctcgtgnggttatttaaaaaaaaaaaaaaaaaaaa

SEQ ID NO: 41430 - DNA, 381 bp, Oryza sativa
  Clone ID: PAT_MRT4530_44776C.1
atggaaggcatttttataggcccttgtcagatggcttttggctttaagatgctctatgaggaaggtcaaggggattttgttattttatttttcattgattggcctttggttgatatatatgaattaatatactccataggcacaacaaaaagctcaagtactggaagtttagaaattcaccagtcgatatcagatggctcaaagagcaaggaagatcagaagttgaagaggcatgagaacaaaagtttcccattgtttgagtgcttggatcaattgtatgaaggctttacctctagtacatccaaccatgtcaacctcaagggcaaagacatggcaacaacaaataacatagctgaggagcgccttgttgacggtccttaa

SEQ ID NO: 41431 - DNA, 364 bp, Oryza sativa
  unsure (1)..(364): unsure at all n locations
  Clone ID: PAT_MRT4530_44777C.1
cgtcncattgcccctttggaccacttgtcgtcgccgaaccctttataactactgccatccccccggctccacccaatacggcaccacgcatatggcggcgccggatctctactacccctgctccgtccgctgcctctcctgtgcttatctaccactgctccctccatgccgccttctccacctactgctatatcctctactcccactatcatctactatttgttacaccgggacgtctctttctgttacggtcttcatcaccttctcctctcaggcaccccatcctttctactctcatcccatggctattcatctgctttagcatactccattgccttcacacttcttccttcttatcttatgt

SEQ ID NO: 41432 - DNA, 363 bp, Oryza sativa
  Clone ID: PAT_MRT4530_44778C.1
atggttaccacagatgcaaccattgctcacatcatggatgaacaagatgacatcaaggtcaaggcctccaagtgctggaatccgatccggccacctgctgcattgctgatttcaaacagccgccaaatctccatacgagctctgttttcggcccgtgagtacttgatggaaagctctcggagtcctctttccaacggatacagcctcattgcgaaattccatcttattgagccgcaattgaagcaacaaggaataaggttgatctgcaccggcaagatcaacaacccacggagaggttcgatctccgtcggtggcgttggccgtctccctcgatctctcaaccacgaccggccggtggcgtaa

SEQ ID NO: 41433 - DNA, 331 bp, Oryza sativa
  unsure (1)..(331): unsure at all n locations
  Clone ID: PAT_MRT4530_44779C.1
ccactttcccaccctctccattttttacggatctggcggcgcgacggaggcgaggaggagaggcgatggttgcggtcgatgcagcagttcaacagcggcggcggccgtaccctatggtcaaggagtggcggcgtccaggcgacgggcggcgtggaggaggcggtgacgacggcatcagggtgcggtggggcagcggcgggtgacngcgacagcctcggcagcggcgggcggacgacgacggcctgctacnggctcgtcaggccatcccccgcccggatccggcggcaacacccgtccctcgcggcagcttcgggtgacngcaacggcctgc

SEQ ID NO: 41434 - DNA, 135 bp, Oryza sativa
  Clone ID: PAT_MRT4530_4477C.1
atggcgcacggcggcggttacgtgtgtgaggagtgcgagccagttgaggttgagaccttaattgatcaaggcaagttcctgcgccgcattcttgaacatattgagcctatttacatatgtgttgtttgcaaataa

SEQ ID NO: 41435 - DNA, 171 bp, Oryza sativa
  Clone ID: PAT_MRT4530_44780C.1
atgtcctacggcacgaaaatatgggtgacccaagatcaaatagcggcagcacaacgatctaacataatatctggactggacctcccttctgcagttccttccaagctacagctcttggaccaccagagaagccctcctagcgaaccaaatgcatccccagatttattgtag

SEQ ID NO: 41436 - DNA, 592 bp, Oryza sativa
  Clone ID: PAT_MRT4530_44781C.1
ctctcccacctacagcgccggcgcatcccctgccaccacaagcgccgccgcactccccccggcaaaccctaaacgcctcctcctctctcccctgctgccacccttccgtttcgccaccagcgcgacggctcccctccccaccgaccgcgtcgcgaactcgcgatatgcctccgacgctcgcgcccccctccagcgacggcggctgccgcccctcgccgctgaccgcgcagccggcgcccagtccctcctgccgaccgcgtagcgagacgcctccctcatgattgacgcgctttgttctgggttgggcacagtaagctgaagtacctcgtcgccagctccgtctccgaggcctgcaacaactccgtcctgctcctcggcccctgcggctgtgaggggtcgacatggttctagacgatctgaagaaggagcatcctaatgcaatatcctgactttacttgttgctagaaatgtatccatgtatttgcgtagtacacgaccaatgatttacctacgttggccgtgaaataaacacagggtacgagaaaatagtttgtttcagggcgctttagggcgggaggggaccagggctaat

SEQ ID NO: 41437 - DNA, 1791 bp, Oryza sativa
  Clone ID: PAT_MRT4530_44782C.1
tcacgccggcgtcgtgggcgcgggcgccgccgcgatcttgccgtgctcgaggttgtcggcagccgcgtcgtccgcgtgcgcgacgtcgtaggtggcgtgcacgccgaagagcacgtagtagacgagcatggcggccgtgcagatgccgaagcgggcgtacgccgcggtgcccagcgaccccatcaggaagaggttggtggcgatggacatggccggcagccacggcaccagcggcgcgccgtacacccgcggcgcccgctgcttctccgcgcacgccgccagccccgccgcccccgccgcccacccgcagccgaacgccgcgtaccctggccaccgccgcgcgtaccgggagttgtagtaggccgagacgccgatggaggagagcacgacgagcgcgaggaacgcgaggaaggtgcgcagctgccccggcgtcgtcgcccccgcgacgtggtagcggcggacgaggagcgccacggcgacgagcgcgaagatgaagagcgtgctgatggaggagacggaggcgagcacgtcgaggctggagaagagcgcgacgcaggcggcgccgagcgtgacggcgacggtggcgtagatgggcgtgccggtcgtcgggtggacgagcgcgaagtacggcgggatcatgtgcgtccgcgcgatctgcgtcgtgtacctcgcctgccccagcgcgccgacgaggaggccgctcgtcatccccttgagcgcgccgagagccaccacgtagcgcgcccacctcatcccggccgcggcgaacgccaccgagtaggcggcgttggcgtcgatctcggtgtaccgctgcatcccgaccagcgccagcgacatgaggcagtacacgacggtgatggaggacatggacgagatgagccccaggggcacgtcgcggccggggttcttggtctcctccgccatggtggccaccatgtcgaacccggtgtacgaccagtacaccacccccgccgcgcggaacacgcccgcggcgccgaaggggaagaaggacggcgcgaggttgccggcgtcgaagtgggagaaccccgcggccagcacgaacgcgatgatggcgatgccgaccaccgacgccagcgagttgagcgtggacgtgaggcgcgccccggacatggccaccgcggaggtgctgacgagcaccacgacggcgatggggtcgagcagattgaacccctcggcgagcgccgggacgtggatgcggagcgagtcggtgtcgcggccgaggagcgcggcgaggtacgacgtccacgacctcccaagcccggccgccccgacgacggcctccagcagtatgttcccggcggcgaggaacgccgcgatgtcgccgagctcgacgcggaggtacgagaacgagccccccgcggaggggatctccgtggcgagctcggcgtagcagaaggacgacagcagcgcggagaaccccgccgcggcgtacgcgagcgggatcgccgggccggcgtcgaagcgcgcctcctggccggtgagcacgaacaccccggagccgacgacggagccgaacccgaggaacgcgaggtccagccacgacaggcaccgccgcagcgggttctcgctcacggcgcgcagcgtgccggcctccgccgcctccgacgagcggctccccacgcggtcaaccagccgcggcacggtggccgcgagcgcgccgccgtaggaccgccagctcgcgaacgacggctccgggaagaagtccgccttactccaccgccagtaccgccgcccactccctccctctcccgccgccgccgccgtcgccat

SEQ ID NO: 41438 - DNA, 1743 bp, Oryza sativa
  Clone ID: PAT_MRT4530_44783C.1
acgatgcctcatctccggcggcgccaccgccgccgcctcctcgctgccgtcgtcttcctcctcctctctgccgtcgtcgcgcgaccagcagcaggcgccttcaccgagctcgagtccgcccagatcggccgcttccaggactacctccgcatccgcaccgcccacccgtccccggactacgccggcgccgccgccttcctcctcccctacgccgcctcgctcggcctccgcgccgccacgctccacttcaccccgtgcaagtccaagccgctcctcctcctcacgtggccgggcaccgacccctccctcccctccctcctcctcaactcccacctcgactccgtcccggcggagcccgagcagtggctccacccgcccttcgccgcccaccgcgacgccgccacgggccgcgtctacgcccgcggcgcgcaggacgacaagtgcctccccatccagtacctcgaggccatccgcggcctccgcgacgccgggttcgcccccacccgcaccctccacatctcgctcgtccccgacgaggagatcggcggcgccgacgggttcgagaagttcgcccagtcggaggagttccgggacctcaatgtcgggttcatgctcgacgaagggcaggcgtcgctgacggatgaatttagggttttctatggggacaggttggtgtggaggctgatcgtgaaggctaccggcgcacccggccatggctcgaagttgttcgacggcgccgcggtggagaatttgatggattgcgtggagaccattgccgggttcagggaggcgcaattcgggatggtgaaatccgggaagagaggtcccggggaggtggtgtccgtgaatcctgtgtacataaaggctgggacgccgagccccacgggttttgtaatgaatatgcaaccctcagaagcagaagttggttttgattttcgacttcctccaactgaagacgtggaacatatcataagaagaatcaaagaggaatgggcaccagctcataaaaacttaacctacaaggctatcatatctgcaggtggaaagctagctaagcctgagattttatcttcaaccacggattcacgcttcatcaggcagttgggcattccggcccttgggttttctccgatgacaaacactcctatattacttcatgacaataatgaggtaaaccatcttggcttgctcttgtttaatcttggatacaatgtgatgctcaagctaagagatgtcttgaattcgcagtttctggaggataaagtattcctaaggggcatcaaagtgtatgaacatattattagagcactgagctccttcaaaggttgattcataataggaaactgctattgcataaagtgtaccattgatgtactttcacctcatgttggaagactggagttgcaggaaagaagccaccctcaaagatacagttttctcagaaatggttcaggcccaaccataccataataaacatgttgggaattgggaataatgcatatctgctgaacattgtatttttaatgattgtgtaagcagatcaatctgtacacatatacgaatttatgaactgcgacagtgtggtgttcaagtccacggctggattggtctacctgtagttctgctggttttatctgttttctttgggaaaccacatccgcgttttctcttggcattttttttcccttttgccaattgaactgtcatgtatcactacgaaccagtgatgaatatacaatgaat

SEQ ID NO: 41439 - DNA, 510 bp, Oryza sativa
  Clone ID: PAT_MRT4530_44784C.1
cccacgcgtccggtgtacatgaaggctggcacgccgagccccacgggttttgtaatgaatatgcaaccctcagaagcagaagttggttttgattttcgacttcctccaactgaagacgtggaacatatcataagaagaatcaaagaggaatgggcaccagctcataaaaacttaacctacaagctgatgcagaaaggaccaacacgggatttggcaggacgccccatggtcacaccaaccaatgcatcaaatccttggtggtctgtatttgaacaggctatcatatctgcaggtggaaagctagctaagcctgagattttatcttcaaccacggattcacgcttcatcaggcagttgggcattccggcccttgggttttctccgatgacaaacactcctatattacttcatgacaataatgagtttctggaggataaagtattcctaaggggcatcaaagtgtatgaacatattattagagcactgagctccttcaaaggtgattcataa

SEQ ID NO: 41440 - DNA, 496 bp, Oryza sativa
  Clone ID: PAT_MRT4530_44785C.1
cggacgcgtgggctccaacctcacgatgcctcatctccggcggtgccaccgccgccgcctcctcgctgccgtcgtcttcctcctcctctctgccgtcgtcgcgcgaccagcagcaggcgccttcaccgagctcgagtccgcccagatcggccgcttccaggactacctccgcatccgcaccgacgggttcgagaagttcgcccagtcggaggagttccgggacctcaatgtcgggttcatgctcgacgaagggcaggcgtcgctgacggatgaatttagggttctctatggggacaggttggtgtggaggctgatcgtgaaggctaccggcgcacccggccatggctcgaagttgttcgacggcgccgcggtggagaatttgatggattgcgtggagaccattgccgggttcagggaggcgcaattcgggatggtgaaatccgggaagagaggtcccggagaggtggcgtctgtgattctgtgtacatgaaggctg

SEQ ID NO: 41441 - DNA, 303 bp, Oryza sativa
  Clone ID: PAT_MRT4530_44786C.1
atgatgtttgagcatgtactttttttgagtgtctatttattttcgattggtatctatggattgatcacaagccgaaacatggttagagctctaatatgccttgaacttatactgaattcaattaatctaaatctcgtaacattttctgatctatttgatagccgccaattaaaaggagacattttcgcaatttttgttatagcccttgcggctgctgaagcagctattggattatccattctttcttccatccatcgtaataggaaatcaactcgtatcaatcaatctaattttttgaataat

SEQ ID NO: 41442 - DNA, 2454 bp, Oryza sativa
  Clone ID: PAT_MRT4530_44787C.1
atgtcgacttccactggcccgtccgctgcgccatcaaccagcccgtctgctgcaccaccagccgagtatgcagagcatctttccaatcttgttgcggttcccagcttgtcgcacgaccatcagtactttctcggtccaatcggcaaccttgatcccactgaattcatcatagtcgaaaccaataggatcccttttaggctggccaatccaaacataagtcattggaaaaacacttttaagtcatggccttcccttgagaaaagttggcctgtatggtacaagcgtgtatcggctagcatgcaggcccactgggatgaaatcggaatcggtcaagccctatccctcacaatagcaaattcggcaaaggatgagcccctgatagccgctgcaacttatttttggtccaatactcttaatgccttcttgttcaaccaaggaccgatgacccctactttgttagatatcatcatgattactggtctggatgtgacctcatcagctaattctatgagcttgaacaccaaaaatacctttgatttcaagaccaaaagcattgggggttggtcggggtatattgcagcatacatgggcaaacggccagtcacctctcgagagcatgtagcttttctgctgatgtggttggagaaatttcttttttgtggatcaagcagtggtcctacaaccaactggcaattcttagccgaagccttagaaacaaagagacaattccctttgggcaaaattctcctcggctatctataccaaatgttgaacaatgcatcggctaagatagccgtcggctcagtggttggagcaggtgggccatggtggttgttgcagtcttggctgaacttagtagccatgaaagctgtcaatcagccatctgtgacagaagcagaattcccaagactggagccgatcacagatgaagatggggaagagcgaacccaccgtaggttgagctgcatcgatttcgatcttcaactagaggatcaaatcaactggcacgcccttgaacctaaaggcaagatattttggacctgcactggagttaagcagatctcccaagcctcgtgtttttacatcaacaacatcccaagacctcaactaggcagtattgagaacatagaattggcaaggttcaggagcaaagcatttgacaggtggtggggtgaatggaaactacatctgttccatcaatcagcctccatgtatatgatagatctctttctagaagctatccctcaaaccacagaatcttctcctccttgcaagagcaaaagcggcgaggacatagattatgctcctggtctcgttccaaatggaggtggaccatctccccctgtcatcggctaccatgcccccaagacctcaagcctactccaagggcaactaagagaaccagctgatgccagcaagaagagaaaaaccaaggcatcaactgttgatccatcggctctggctccgaagaaaagggccaaaaagaagaaatccaaaccaactgatgatttgcctgccttagatccatccatagaacaagccttagatgaagaagagatcgaggaagatgtcgaccaagcagcagctgaactgagtaatccagagaagacaccatcggcttcacccaagcagactcctccaactcccgctgctccagctcacttttctcggaaaaagaagactactgtaaagaagaaatcagcagcaatacaatctaagccagctccaccgccagaaacaagcaatcgtactccatcggctgcaggcagtcacaatgttgaagaagaagagcaaccggctgctcctgctatcccagtcttagccgatctgttctcatttgatatcaaggattatcttgatgagacagaagaagataccaccagcaaggccttggcttctttgtccgatgacgtgaaaagaacacttgaagatatctctcatcggctagaggaatcatcattagacaccctggtggtcgactatggatcaattagggctcggcttcacaaaattcaagctctgatcccaaatgagctagccaacgccctcactccagccgtctacctcgagcagcaccaattcaagctggagaaggccaagcaaagattagccgatcaccgggagcgcaaggatattgaagctacaatccagctgtctgagggtccgatcaagtccaacattgatcggctcgaagctcggaagattgagctcatagcccaacttgaagaatgcaacgccgagctggctctggagcaaaagaagctagccgatctcccgaaggcgattgaagaacagaaatcacagctgaaatcggccatcagaaatgtcgttgatatgactaagtcccttaaagtcattcctggaaccgatgctcaagacgtccaagccttagaagaagtggaacaaattaggcaacgagctatatcggctatccagcgctatttgtctcagtga

SEQ ID NO: 41443 - DNA, 540 bp, Oryza sativa
  Clone ID: PAT_MRT4530_44788C.1
atccgaggagcagatcgaccaaaagtttctgatcccctcttcttctcgcttgcttctctcctactcgatcaatctcgctagagcttcttgcttgctttgatctctcgagcctctagcctagcttagctagctaagctagctactcatcagtgtcctaagtagagttgctagctagctaagcatggcgagcaatggcgaggcgacgacggggagcgagacggcggcgccggcgccggtgccggagccgaccccgccgccgtgccaggggaggctcatcaccgtgctgagcatcgacggcggcggcatccgcggcctcatcccggccaccatcctcgcctgcctcgaggccaagctccaggagctggacgggccggaggcgaggatcgcggactacttcgacgtgatcgccgggacgagcaccggggcgctgatcacgtccatgctggcggcgccggacgacgaccggcggccgctcttcgccgccggcgacctcaccaacttctacctcgagaacgggcccaagatcttcccgcagcggag

SEQ ID NO: 41444 - DNA, 371 bp, Oryza sativa
  Clone ID: PAT_MRT4530_44789C.1
cgcgcgcgttcgcatttccatctgcccctgctactactacgaatccgccggtcctcactgcctccactcaaatggatgtattggcctatcctacgatgacacaggggcgtgcaggtcatgagcagtgcgtggcgcgaacgtcatggatcgggttaccgagaccgaaagaggattacttggcatggatgctgggctggaaccgtcaggaggcgtctgcagaagcagcaatgcacggggtggaggaagcagataggcggcataagcagtggagacgacatgcccgatcaggccttgaaggatcatcctttcacgaatagcaccctgcggcgtgcagaacacgaggacgctcctgttctggctcctaaccccct

SEQ ID NO: 41445 - DNA, 132 bp, Oryza sativa
  Clone ID: PAT_MRT4530_4478C.1
atggcgctatccagtagtcctccggtggcatgggagactgtggctattgtgggcggatctctggcggtctcctcccgtgggtgccctcctctcattcccggtggcacggcaagcaatagattgatgccttaa

SEQ ID NO: 41446 - DNA, 230 bp, Oryza sativa
  Clone ID: PAT_MRT4530_44790C.1
aataaaaatataaaaaaaaaaaatataaatataaacataataaaaaaagttaaaaaaaaaaataaagcaggtacaatatgccgcccttggtagcaccttcatatgttctcgccttttcttgagcctgaagatctggtggctttgttcttagaattcatatttggtgtcggtactatctactagattgtttctgtgaggctttccataaacctaattgcatggccctggtt

SEQ ID NO: 41447 - DNA, 545 bp, Oryza sativa
  unsure (1)..(545): unsure at all n locations
  Clone ID: PAT_MRT4530_44791C.1
cccccnaaatccattcnccaatgggccaagcgccccaacccaaggtcggtatnacnggcaagtacggtactagatatggtgcctcccctgaggaagcaggtcnagcgtatgnaaatcagccagcacgcccaggtacacatgcaccttntgcggcaagaacccccngtcaagaggcactcgggttggcatctggaactgcgagtgcttgcaagaagaccatcagcggaggagcctacagtcgtntcgacccccgccgccgctaccgccaggtcgaccctcaggcgtctgcgtgagatcgccgacgttttaatctgcgattcttccacacgagtctctttgttcctttttcccaaccatgatcgatcggccaggtcccggattgtgagcaatcgagcggggtatccgaaagggcgacgaatgcaatggttcatggggggacagcaaaaaatcatggatggtgacggaagtttctgggactgtccttcggcgttatttaatggcaaatggaatggctttttcggcattgaaaaaaaaaaaaaaaaaaa

SEQ ID NO: 41448 - DNA, 163 bp, Oryza sativa
  Clone ID: PAT_MRT4530_44792C.1
tgtcgccggtggtgaggagatcggatgggggcgggggtgactgcggtgatagccatcgcggtggtggtgctgggctggatcaccatcgagatggcccgcaagccctgcctcgacttcggtcgccgcgccatggatcgtgcccttgaccccaactaacgacccc

SEQ ID NO: 41449 - DNA, 144 bp, Oryza sativa
  Clone ID: PAT_MRT4530_44793C.1
catcgaacattgtctactcctggtgcggacatgggcatatacttctcttactataaatctcggaagaggcttacatccctgcacccagcgactgacgcgttgttatactgcaagactggcaccagccagcacaagtttatactg

SEQ ID NO: 41450 - DNA, 252 bp, Oryza sativa
  Clone ID: PAT_MRT4530_44794C.1
atgaagcacaccaccaccgacaccttcgctccctcgaccatcgctccaatcccttccactccccacctcgacgacctcctcgttccccgcttttactgcctccccgtcccttatcatgtccccgacctcccctcctgcttctgcccacgcgtgccagggaaggatggtgaggcggaggagacggcggcgtcggtgccggggaagctccatgtctgctttgaccacggcagctggcaaatgtggagggcctga

SEQ ID NO: 41451 - DNA, 327 bp, Oryza sativa
  Clone ID: PAT_MRT4530_44795C.1
atggcggaggaggtggtggtggagtggaggccgaggaggagcaaggcgagggggaggggtatttatgggcgaagcgtggtggcatcagcaagcagcagcagcagcagcagcagcagctgctactactaccattgggggcaccggatcttctgtgacgaagggtgcatagtggtgctcgtgctcgactcgccggtcagccagcagcagcagcagcagatagcagctacccccaaccgtttcaagcttcgccggttttcagactctgatagaccaagtctgggggagcttgtttcaactacagcttttctcaaaaactgcttctgctag

SEQ ID NO: 41452 - DNA, 514 bp, Oryza sativa
  Clone ID: PAT_MRT4530_44796C.1
tcgcgatctagaaccggactcttgttctttctctttttcttttttttttttttttttttttttttttttttttttttttttttttttcttttttttttaacatcctgccgcacaaccgtttttcatatccaaccctttaaattttttaaaccctttttttaccaaaaaaaatgttcccccccgagcagcttcaacataaggacgtccgccgtcaatattccgacctccgccttgtgtttgctacgcctttttcggggaaaacattcccccacccccccccggaggggtgaatttaaaaacacccattttttttttttttctaaatttttggttgggggcccttcttcaaaggggggcataaaaacctacccttttttttggccccttgggaagaataaaacctttttttcccccccttttaaaaaaaaaattaaaatttttttttttcccaattttttcctttccccttttttttagcttttttgaaaaaaaaaaaaaaggaagtttttttttt

SEQ ID NO: 41453 - DNA, 372 bp, Oryza sativa
  unsure (1)..(372): unsure at all n locations
  Clone ID: PAT_MRT4530_44797C.1
tcgtattttttcgcctgcacctctttacttcatcccgccttcgttcgctcggtcgtcttccggtaccgcgtgcgcccttgccggccgcgcccatctttgtcgcccttatctatccccccccccccagcatccatccaatggcaattaccgaccccccagcccccggcagcgccagtcggtcgtccatgggcggcggcgggggccttggagagatgcgagaggtaccgttctgccccgaggcccccgcggatgggggcgaggggggcgccggggagaacacctgcgagctcttcgacggggagggcgnaagttttnaaggccctgcacgccgcggacaacacctgtcgcgccgtgccctgggccgtcctgcga

SEQ ID NO: 41454 - DNA, 107 bp, Oryza sativa
  Clone ID: PAT_MRT4530_44798C.1
cactcactcagcacgccatatacccaagcagaatgccgactagccctgtcgacacgtggcgtgctgaaaaggtggacatgtgtccggagtggccgtcaccgagacag

SEQ ID NO: 41455 - DNA, 478 bp, Oryza sativa
  Clone ID: PAT_MRT4530_44799C.1
cccacgcgtccggattctacctcacctattgccttagcctgacagagattgcccaaaccagacagattcctccactttttattgcatgattgcatcaggaaacgtcccatctagctctctcgagctgcacagcaatttgtacaacaatattgcttaccacttcatctcccagttgcagttgccaaattcgctctgatcttgcagaatttcatagcagagatgggatgtgtagaatccaagctggttgctactatcaagtacaggagagtggagaaggatcttgacaagaaggtggctgaggcgctcaaggagaggaccaagtcgaagaagaagaccttcaggtcagtgaacagcatcaccatgggtctccctcgcttcaaggagggcctcaggaacatcagggatgtcttcgaccaatatgatgaggactcaaatgggacaattgacaatgaggagctgaggaactgcctgaacaagc

SEQ ID NO: 41456 - DNA, 450 bp, Oryza sativa
  Clone ID: PAT_MRT4530_4479C.1
aggtaagcaacagatgcaaatgctgaggcagggagcaacttttacatgacgggggttcttttctctgtttttacttgcgaagtaaaaaagggcctatgggggaagatcaaaatggaatgtagctaacaacagcaacgggttgttgtcagaggtgaaagattctagacacattaagccaccactaacaacccacaagttatgaggggagtcgatcacgctacctacacggcgcaagcacatacgaccaagcatacaaaaatacgcaaaatgaaaaattcatcaacctgggtaatatttttggaatgcaaccaaatatgaacggttatggtgcctgtctttgcttccgttgccatcatcggacgcggtcccagatcgatgctttcctggtcactcataaacattgggtgaagcttgaagtcccgatggccaatgagggctgaagccatcccc

SEQ ID NO: 41457 - DNA, 706 bp, Oryza sativa
  Clone ID: PAT_MRT4530_447C.1
ccacgcgtccgggagactggagaggcacagcaacggcagcgcgggggtcgcgcgggtccatcggatcgggagcgcgcggcgaggcaggcggggtcgccaccacctgtcgcgacgcgaccgcggggggcgcgcgtctccttccttcctcccctcacctcacgctgcctccctcccatccccttcgccctcctgtccgcctcgctccccgctccctctcgctctcgctctcgccttctcgccaccgatccatccgcccccgtggcgcgccgcccatgtcgtcgtcggtgtcctccgtgcgcctcccgctgcgggcggctcctcccctctacggccgccgcgagtggagggccgatggggcccgggcgccgtctcccgcgctcgtcgccgtgaagccgctgtcgtgcagggcgcccgcgtcgtaccgctccgcgctgctcctccaccgccgccgccggtacgcgctgcccccggttgccgccaccgccacctccaagcccgtcctcaaggacccgaagaagtatcaggaatgggactctctgacggccaagttcgccggcgccgccaatgtccccttcctcctcctgcagcttccccagatcatcctcaacgcccgtaacctcctcgccggcaacaaaaccgcgctcttcgtcgttccatggctcgggatgctcaccgggctgctcgggaacctgtcgctgctgtccta

SEQ ID NO: 41458 - DNA, 2218 bp, Oryza sativa
  Clone ID: PAT_MRT4530_44800C.1
cgggctgctgcccgcgtccgcttttggttccccagtttcagtttaagctcttaaaccctcgccgggagatttcgccgcaagattctcattctccgcgcctatttgcttgccagttgttgatcttggagatggcggcagctcagcaggcgcaagattcagctgatcacatggagcctctagagtcacgccttgtggttgagaaaagtccttctacaagtgtgagtgtgaaaaagcagattctctctagtgaagatcataatttatctagtactgctttgcacggcgcaagttccttaaaatcaaccaaaagtgctcaagagaagggaagctttttgggtaaaggtggagaacaacatttcatctaccagcccaatgtgtatacccctcagccacatacagtcttttctggaggatacttgaaccatctgggtcaatgggaagaatatccgcatgttgccagtgcagatggaactgatgctgcatctcctgtgatgtacagttcttattcccctgtgccaaccatgggagacagccaaccatattaccctttgcactgccctctgtcaagtccttactatcagccacctgcttctcctagcatgggatattcaaattctgcaactgggatgtcgcagtttgatcctatgcaagagtattaccttcctgatggacttctgtattcaccaactcctgggttccaccagcatttcggttccttcgatggaactcaaatgcaacaaagtgttactggaatttttggacaagggaacataccattggcttctggaatgcatcaggggtccatgtacagctctgggtcatacaaggcacggcagcaagtcggtaattttggaggtagcacgccaaattggagtgctgccagtcgcagatttagcccctttgacaggggcttcaagcatgataagggctctcttgagtttatgaatgagcaaaaccgtggtccacgggccaccaaacccaagaaagaagtgaataactcctcaactgaggacaaaaataggaaaagtgcattaataaatgattctaacttgtacaaccaacatgattttgttattgagtatgaggatgccaaattttttgtaataaaatcctataccgaagatcatgtacacaagagcataaagtatggtgtctgggccagcactgctagtggtaacagaaagttggatgctgcttatcgtgaagcaaaagagaaagaagccacttgtcctattttcttgtttttctcggttaatggcagcggccagttctgtggtgtggctgagatgattggacctgtggacttcgacaagagtgttgattactggcagcaagacaagtggagcggccagtttcctgtcaaatggcacattatcaaggatgtcccgaacagccttcttcggcacatcattctcgagaacaatgaaaacaagcctgtgaccaacagcagggacacacaggaggtgagactggaccacgggctccagatgctaacaatcttcaagaaccatgaggtcgagacaactatcctcgaggatttcgacttctacgagcagcgggagaaagccatgctggatatcagacagcgacagaagcagcagcatactgattccgaggtccagaagccgatggtggaggccaaggaaccagtggatcttatgaaccaaatctcagccacctttgcccgggccgtgcagcttggagaaaccaagggcagcagggaggacaaaccaaaggttgaagatgcttctgctgctgctgttgctgttcctgagaacgagcctgttgctcttgctgagactgaaggattgttagcagattcagagccaagccctttgaaggaaagtggttgatcttacccctttcatgtctgattgcgagaagcagctgggccttgtgatgttcacatggaagcaagaagatcaaaggaggttgatatgtgaaaaaaaaaatgctgcttcttttgtacttcaccataggctgcattataggctggaggagaaggatttggttcacctccagttaggttatgatgttagtcttatgtttccttcccaatttcttctttctgttctgtcatctgttccacaagcgccaccaagaatggtgctcagtggtttagccataaggaaagctgcatatataggccagagctctgtacagtttgcagttaaattatgttgttctcaatattttcctgtgatatcataaaaaaaaa

SEQ ID NO: 41459 - DNA, 1362 bp, Oryza sativa
  Clone ID: PAT_MRT4530_44801C.1
atggaggcaggtggtttcctcaggggcttcatcatgctatgcgtccaccttgtcctgtggtgcctggcgccgctgctgccggaagaggtgaaattgaaggtcatggtgatggtgtgcttctttgggttgaaggagaagaaggtggctagggttgcgagggcggcgctgccgaagcacttcctagagggtgtaggaatggaagggcttgaggctgtgagaggggtgaaaagtgtggtaggggtgagcagggtgatccctagggttatggtgaaaccattcctggaagattacctaggtgtggatgtggttgtggggagagaggtgaagatggtaagaggtttttatgttggtttattggagaacatgagtgatggaaggttagagctggcagatctggaaggagaagaaatgatagggtttggaagcagctcaggatattctggccatgatcaccaccatcttttctcttggtgcaaggaggtttacctggtgactccagaagaaaaacgaaaatggtcacccttgccaagagaccagtaccccaagcccttggtcttccatgatggaaggctggccttcaggccaacctttcaagccaccctagccatgttaacatggctcccattttccctccccctcaccatcttcagaacactcatctttgtcaccctcccctaccctgtttctgtggcgatcggatccgtattcggagtcagaacccgtgtcatcaactcccctgttggtcaggccaaagctgatcacccaagaaacccaaaggggcacctctacgtgtgcaaccaccggacgctgctcgacccggtctacattgcagcgatgctcaacaagaaggtctcggccgtcacctacagcgtcagccgcctcagcgagtggatatcgccgatcccgaccatccggctgacccgggatcgcgacgaggaccggaggaggatggaggaggcgctgcggcggggcgacctggtggtctgccccgaggggacgacctgccgcgagccctacctcctccggttcagcccgctgtcgctggagctcgtcgacgaggtctacctggtggctctggtgaactggtccgacatgttctacggcaactccaccggaagaagcaagtgcctggacagcttctactacttcatgaatccgcgcccggcttacgatgtcgagttcatggagaaggtgccaaccaggatggtcgtggatggcaagacctgtgagagcaaacatgtggccaacatggtgcagggtgagattggtagagtgcttgggtttgaatgcaccaagttcacccgtgagaataagtacctggcgctggcaggaaatagaggggttgttgatgcaaaccagtga

SEQ ID NO: 41460 - DNA, 758 bp, Oryza sativa
  Clone ID: PAT_MRT4530_44802C.1
caaacctagctagccagtaagtccacaatggcaggcactaaacttgtagctctcggatttattgttcttttgagcattgggttagccaatgccgcgagagtagctagatactcgaatgctgaaggaaatggctcgggacagggcgggggtgtcggatacgtgaatggtggtggctcggggtctggaagtggtgctggggctgcacagagcggctcaaatggtgcccacgctactgctggaggtggaggtggaggtggtggcaatagccaatacggtggatatggggcgggtggtggatccggcgttggttcaagctctagtcagtatgctaccgggtattattctggttatggtggttactctagcgctggaggtaacggtggaggtggtggtggaggacaagctgggggtaactggggatctagtggttctggtgatggcagtggtgctggctctggctctagttcggccaacacatactatggtggaccgagttacgcgaatgctgatgctaatggtaatggtaatggtaaaggcaccggtacatatggtgggagcggtggtggccaaggtaccggttctggatatggtgatgccagcccataattctcctcaccatccaaccaaaatacacttgaatagagcctaatgtgtaatattgtattttgaagttatagtatttttttctttatttgtactcttttatgtctagcaagaaataaagggctctattattttggtaaaaaaaaaaaaaaaaa

SEQ ID NO: 41461 - DNA, 280 bp, Oryza sativa
  Clone ID: PAT_MRT4530_44803C.1
ttgttttttttttgtacagccagggcaccagccaggcaaaaagttttgcatgcaaggaatccagtattacaacagtagagtactctacttcttactgtatgtgtaggagtatttacagagcgtacacggataggagcgcctgttgagaacatcttgacgagttaatcatgcaatgtaagcaagctcaaggatagaaatgtgcaaatgaacaacaggtcggtccgcgtggttgcttttgcatagcttagattgcttttgattaccccgagatacccactac

SEQ ID NO: 41462 - DNA, 471 bp, Oryza sativa
  Clone ID: PAT_MRT4530_44804C.1
aactatttggcacctcccatattcaaacagagcaactgtttgatgatgctgggatcgacagttactttgaatcgaaggaaataccttctggaaactctgatgagcagcccaagctgatgcagccagtgaccagcaatgcagtatctgctgattcagggatgtcgatcccaggagccaaagtgctggagattaccaagattgtggggtatcaccagtgctccttatgggtgagcctccttggcatcctcctggccctgaggggtcatttgctggagctaccagagacgatgctatcacacgatacaaggagaagaagaagagaagaaaatttgacaagaaaatcaggtatgcatctcgcaaggctagggcagatgtgagaaaaagagtcaaggggccggttgttaaggctggtgaagcatacgactacgatccactctgtgaaacgaggagctactgaacacaataaaacat

SEQ ID NO: 41463 - DNA, 942 bp, Oryza sativa
  unsure (1)..(942): unsure at all n locations
  Clone ID: PAT_MRT4530_44805C.1
gcacgagggctgaggtaggatctgttgtattgatggaggatgctgattggcagaagggttttcaaatcaatgatattcttacagacagtgagcctcctatctatagtgctactcctgtagaagaacccaccaaaacccatctgttatatgtaggctccagcccttctcatttggagccaccatgggaagatatgaattcttggtatcaagttcaaaggcagaccaaagtacttactctgatgaagcaaagaggcatttcaagtagatatgtcccacagatggttgcttctggacgtgtcgtccatccaggcccttgtaacaagcctaactctagtgggagttgtggccatccatggtgcagtactcctatacttgtcacctcgccagttggtgaaactatttcaaatctgattcggaatgggctgtttggtgttgaggacgctctgagatgttgtcatgactgtttgtctgcgcttgctgctgcatcatctgcaggaatccgtcatggtgatatccggccagagaatgtgatccgtgtgagcattggttcaaggcatccatattttgtacttattggatggggccatgctatcttataagacagggatcggcctctattgatttggttctgtctgatctacatttgctctacaggaaggcatgttatgtgcagcctctgatgcagaaagcttaatttatctgttattcttttgttgtggtggagtttgcccagagcttngctcagttgatggtgctcttcattggagggagacctcctggtnctggagagttatacagctgatgttgggtgatgtctcagcagtgctgaaagcttttgctgactatgttgacagcttttgtgngtccccctatccgatggnctatgagatttggttgagaaggtctcgatgagccctcnttgatgatcctggcctggagatt

SEQ ID NO: 41464 - DNA, 1542 bp, Oryza sativa
  Clone ID: PAT_MRT4530_44806C.1
aggtcctctctctcgccgctccccgcgctgctctgttggcttcgctgctgctgctgctgctgttctacgcgcgcgacacggaagagagaaaagtggttttttattgggttcctaagccctttttgtttccagaggcttctggattgatcggttgatctctctcccttcccctctagggtttcctgggggtggatctgaggagcggcggcgctccttcgtcccggtttatgtaaatctgatcgatccagaaagtttgtgaaaaaagagtgtggcacatacctaaagctggcttaaagtttgtccatagctaatatcatgggcgctctttgtgatttctgcggggagcagaggtctatggtttattgccgatcagatgcagcatccttgtgcttatcgtgtgaccgtaatgtgcattcagctaatgctctttctcggcgccatacaaggacacttctgtgtgatagatgtgcttcacagcctgccatggtccgctgccttgtagaaaatgcctcgctttgccaaaattgtgattggaatgggcatagtgctgggtcttcagctgctggtcataagaggcagaccataaactgctactcagggtgcccatcatcttcagaactttcaaaaatctggacatttgtttcggatattcctaatgtagctcctgagccgaattgcgagcaagggataagcatgatgagcatcagcgacagtggtgtcagtaatcaagacaatgctgcaggggacagcagtttgttagatattgctagtgcaacccttatgagtgatcttggcactgctggcaagccaaagtctttgataggctcctcatctgaagctggcgtgaaccttcttccacttgctactgatcagatggctggatccgtggattcgacatcagctaaggtgccctatacggcagaccaagatatgttcagcaaagacagtatatatgaagatttctgtgtggacgatgttgatcttagtttcgaaaattatgaggaactatttggcacctcccatattcaaacagagcaactgtttgatgatgctgggatcgacagttactttgaatcgaaggaaataccttctggaaactctgatgagcagcccaagctgatgcagccagtgaccagcaatgcagtatctgctgattcagggatgtcgatcccaggagccaaaggtgattccagtctttgtatacctgtgaggcaagctaggtccagtatctctctttcattttctggtttgactggtgagagcagtgctggagattaccaagattgtggggtatcaccagtgctccttatgggtgagcctccttggcatcctcctggccctgaggggtcatttgctggagctaccagagacgatgctatcacacgatacaaggagaagaagaagagaagaaaatttgacaagaaaatcaggtatgcatctcgcaaggctagggcagatgtgagaaaaagagtcaagggccggtttgttaaggctggtgaagcatacgactacgatccactctgtgaaacgaggagctactga

SEQ ID NO: 41465 - DNA, 1017 bp, Oryza sativa
  Clone ID: PAT_MRT4530_44807C.1
aatcccagatttcccattttacccccgggcgcaaaccctcgccgcgtctacccgatggccggcggcgcctcggcgggccccgtgcaggtgcgctgcgccggatgccgcggcgttctcgccgtggcccccggcatgaccgaattcatctgccccaagtgccgcatggcgcagcgcctcccccccgagctcatgcccccttccccgcccaaggcctcccctactccgccgcctcagccacagcctcatcctcagcttcagccgccgcctcttcctgctcctctccctcccccttcccgccgttccgcgccgcgagcgcagggcgtggaccccacgaagatccagctgccgtgcgcgcgctgcaaggccatcctcaatgtgccccatggcctcgctcgcttccgctgcccccagtgcgacgtcgacctcgccgtagacctctccaaactccgcaatttcctcgccacggccggtccaggcttcgcccctccgcttccgcttccgccgccgccaccaccgccgatgccgcccatcccgctgccgcaggttgcagttgatgttgagcgtgaggaagatgaaggtggtactgtcggggaaacttttatggattacaggcctcccaagctatctcttggtcttcctcatccagaccctgtggtagaaacttcatctttgtctgcagtgcaacctcctgaacctacatatgacttgactattatggatgaattggatgagaccaaggtgttatcttgcttacaaattgaaacgatagtgtatgcttctcagaggcacctttatcatctgcctactggtgctagagcaggtttctttattggcgatggagctggtgttggtaaaggccgaacgattgctggattgatctgggaaaattggaaacagggaaggcataaggcattgtggatttccattggttcagatctgaaatatgatgctcgcagagatttggatgatgttggtgcaaaatatgtggaagtgaattaagcagatcaaattcctgat

SEQ ID NO: 41466 - DNA, 370 bp, Oryza sativa
  Clone ID: PAT_MRT4530_44808C.1
atgggcgtcggcgagaagctcgaggaaggaggagggaaggtcggcgtcgtcttgttcctcttctgccagccgccgattgcatctagggagagaggagaaggggaaggaggttggcaacagcccctctccgccgggcggccattgccgatagagaaggaagagagaagagttgggcccgacacgtgggacccgtgtggggctcacttgccacgtcagttaaaactggccatgataatccacgttgacatgacactcggggtcctccaactatacaaaaccggtcacccaaggtcccttggtggttttgaccccggttttagtcacgtggcagctgaatcagcatgggacccacgtgggccccacatgccag

SEQ ID NO: 41467 - DNA, 303 bp, Oryza sativa
  Clone ID: PAT_MRT4530_44809C.1
atggattcatctgctgcggatggtgagacgaaggaggagtcgtcgaaagtgaagatgttgctgccggaagatttcctcaacaccgtcctcctctgcactgctttcttgtacaaggcgatgaataccatcggcacgctggccaccatctgggcgaccgtcgtcctgctcggtggattctccaccctcatcaagaaggaggacttttggtacgtcaccgtcatcgccttcgtccaatccatcggtactgactcgtcatcttctgatcctgaccatgctgatctcttctgttccatggcaaactga

SEQ ID NO: 41468 - DNA, 774 bp, Oryza sativa
  unsure (1)..(774): unsure at all n locations
  Clone ID: PAT_MRT4530_4480C.1
gtcccgataaactaatcttcctttatttcttgtcacgaacatgacgagagatagcagatcgttgatcgttcaacgtactcctcgtcatcaatttcttcgaaaaaaagggtctagttttgcacatggctggccctataagcttggccaggttcttggcagttgtcaccaataataaagttttgcatcttgctcattgctcaaatagagctagcaaactctttttccaagggattattccaaaaaaaaaaaactctttttccaagggtaactattgattgcctgcttgctcgcttgctcagtagaagtactggcacttgaccgggccctagccaaaagattcccagaacattgttacagtataatgcctcttctgcgcgggtcacttcagaaaactatgctccgttgaaatatgaaatgttgctttcttcgttccttaaaggatcttatttttaggctgaatcatttatcccatcaaaatcttatttttggacatagagatcatttgatttatagttattattcctcgattagtggtattggacccgaaatccctaacttatcatgcacatgcagccaaagagaatacacatgtagccaagaacaaaccgccagggatattttcatcttggctagtttgaaaaccggtagtgatgtgccccatcaccaccacgtgcagactaccgattcaaaaactagcaaggattagtantttctagggttaattgaatccatgccattgtaaatttacccattctaaaaaatgtcaacaattca

SEQ ID NO: 41469 - DNA, 3546 bp, Oryza sativa
  Clone ID: PAT_MRT4530_44810C.1
atggccggcggcggcggcggcggcggctccccctcgccggtagccgcctcggcggcccccgtgcaggtgcgctgcgccggatgccgcggcgtcctcgccgtggcccccggcatgaccgagttcatctgccccaagtgccgcatggcgcagcgcctcccccccgagctcatgcccccttccccgcccaaggtctccattactgggccgcctccgccacagcatcatcctcaacatcagccgaggccccctccagctccgctcgttcaacccaccagccggtccgcgctgcgcgttcagagcgtagaccccaacaagaaccaactcctgtgcgtacgcatcaaggccatcctcaatgagtcccatggacccgctcgcttccgctgcccccagtgcgacgtcgacctcgccgtagacgtctccaaagtccgcaatttcctcgccacggccggtccaggcttcgcccctccgcttccgcttccgccgccgccacaaccgccgatgccgcccatcccgctgccgctcatgcccttcctcccgatgatgccacatgttccggtgccgatgccgccgatggcgtcgcccgctgaattgcccgaggtgattattgaggttgcagttgatgttgagcgtgaggaagatgaaggtggtactgtcggggaaacttttatggattacaggcctcccaagctatctcttggtcttcctcatccagaccctgtggtagaaacttcatctttgtctgcagtgcaacctcctgaacctacatatgacttgactattatggatgaattggatgagaccaaggtgttatcttgcttacaaattgaaacgatagtgtatgcttctcagaggcacctttatcatctgcctactggtgctagagcaggtttctttattggcgatggagctggtgttggtaaaggccgaacgattgctggattgatctgggaaaattggaaacagggaaggcataaggcattgtggatttccattggttcagatctgaaatatgatgctcgcagagatttggatgatgttggtgcaaaatatgtggaaggccctgcttgggggagcttttggcagctgcagcttctgccagaatctcaagctcccccaaacagtccagattcttactcagatttgcatgctttaaataagctaccatattctaagatagactctaaggccgttggaatcacaactggagttatttttgtaacttatagcagcttgatagcatcctctgagaaaggccgttcccgtttgcagcaattgatagagtggtgtgggtctgagttcgatggtcttctggtgtttgatgagtgccacaaagcaaaaaatctgattcctgaggcagggagccagcccactcgaactggtaaagcagttcttgagatccaggaaatgttacctgaagctcgggtggtttactgctcagcaactggtgcatcagagcctcgaaatctgggttatatggttcgccttggtctctggggagatggaacatcatttcagaattttcagaaatttctaggtgctcttgagaaaggtggtgtgggtgctcttgaacttgttgctatggacatgaaagccaggggtatgtatgtttgcagaacgctaagttataagggtgctgcttttgctaccgtggaagctcctctagaggaaagaatgatgaatatgtataggaaagcagctgaattttgggccgagttgcgtgttgaactcctttcagcaattgaatattatgcagaagacaagggcaattcatctcagatttggcggttatactgggccagccatcagcgtttctttaggcatatgtgtatgtcggctaaagtacctgctgttgtgagattagtgaaagaagccttagcagaagaaaaatgtgtggtgattggtcttcaaagcactggagaagctcgaacagaggaagctatcagtaaatatggtgttgaaatggaagactttgtttctggtccaagggagttgcttcttaagctggtagatgacaattatcctttgcctccgaaacctgattgctttcaacaagtaggtgatgaaaaagttgcagaggttcagcgtaagcggcactatggacctgatgtatgctttaaaggacaagctaggaaactcgcaaaaatggaagatgaaagtgatgatggaactgatgaatattctctacttaattcatggattgatatcctcggcaaggaagaactccctgaggtcgccaaggactcgagcgtgacatcgggcaggtcccgcgtgttgagccgcgacgcgagtaggggctcacggaggagacagagaagctgcagcacaatggcggggtgcgatgtggcagcggacgcagtgaggaaggagttgagcatcagcggcgacggcggattggagagtgttgatgggaaggacaacaagcagcgagtgagggatccgacgctgctcgtcgatcgggctggctcggcgacggggagacgcgggggcggcggacttactctcatcggcaaggcggacccaggggatgggcttggcaacgatgatggatggttatcattcgagaaattctcttctagtattcacattttgatgcaatggggtttacctatcactagcatgagtatggtttatgtacacacacattctttattacttgaaagctatacaacgccagtgaaatcacagagagaaacagagtcagaccatgaatcaacagagtctgaagaggaattcaatatgtgtcagatctgcaacactgaggagttgaatgccattttaggagaagacgatgttgctccattgtactggttgcgccgcacatgttcaccctggttgtctgattcctccttggactggtatgacactgcagtggaaagaaagtcgaatattttgcagattattcgttccttggatttgcctaacaatcctctagatgatatcattgatcagctaggtggtccttacaatgttgcagaaataactggacgtcgtggtatgctagtaagagcatcagatggaaaaggtgttgtttatcaaacacggaacaagaaagaagtagcattggatatgattaatattcatgaaaagcagcagttcatggatggagaaaagcttgttgcaataatatcagaagcaggatcagctggtgtttctctacatgctgatcgaagggcgaaaaatcagttgaaagtggctaatacaaggcttctttttacaaatcttggaggtgaaaagcgatttgcatctattgtggcaaagagactggagtctcttggagctttgacacaaggagaccgaagagctggaccatcacttagtgctttcaactatgacagcacttatggaaagaaagccttgatgatgatgtacagaggaatactggaacaggatggtcttccagttttgccttcaggatgttctgaggatcaagctagcctccaaggattcatcactaaagcaaaagctgctttggtgtcagttggaattatcagggatgcgctaatgtgtaagcttctttgcaaacttatttgtcttataccgggataa

SEQ ID NO: 41470 - DNA, 302 bp, Oryza sativa
  Clone ID: PAT_MRT4530_44811C.1
cccacgcgtcctgccacgcgttcggtcgtcggcgtcaagtacaggccggtggtgttccccaacggcggcgcggcggcggctgcggcggggaagagcaaggcgacgccggcgtcggtgactgaagcggtgtacattttgtgcttgaagattcacgcggagagcttgggcgggcacgcagtggatgggtgcggcgagttcatgccgtcgcccttgcattatgccgctgatccggcgtttctcaagtgcgccgcgtgtgggtgccaccagaacttccaccgccggctccactatgcgcctccctc

SEQ ID NO: 41471 - DNA, 434 bp, Oryza sativa
  Clone ID: PAT_MRT4530_44812C.1
aaacgcggatgtcatgtacaagtagtgaagaatggctacagcattttaggagctcgcaataccttacagcgcaatgtgcttgagatgttacagtagtattgtttggggccaaaatgtttgtaatcaaatgtatcaaccaccggaaggaacaagttggctgtatgcaggctggtcatgaactttgctggacccacactgcaaaatgaacgtgtgcaaggaagggatgctgttgctgtgcgggtgatgaaatgatgcaacccaaattttggttgaggctgagtgactgattttggatgaggagctgcaaaatggcaagggactgccactggtatatatatggcaagtacaagaaatccagggttccctatgtataacattaagttcaagaaccacatcttgatatccacatatgttgttataaaaaaaaaaaaaaa

SEQ ID NO: 41472 - DNA, 4659 bp, Oryza sativa
  Clone ID: PAT_MRT4530_44813C.1
atggatcggcaatggatgtacgctgaccggtggtccaaagagtttattgacggcgtgcactattttttgagagtggccgaagctaacaggcaaaggggttttatttgttgtccatgcaataagtgtaagaatcagaaggagtattctgcatcaaggactattcatttccacttgtttgagtcggggttcatgccaagctataatttttggacatcccacggagagcaaggtgttgaaatggaagaagatgaagtggaagacgacaatattccggactttgctcagtacgttggatttgaaggaaatcaaacgggcgaggaggaaagggatgctgatggtaacgacgttgcggatgatcttggtcagatgttgcaggacaccaaggaggactgcgaaagtgaaaagggagcccataaattggacaagatgttagaggaccacagaacttcgttgtacccaggttgcgagcaggggcacaaaaagttggatgccactctggagttcttgcaatggaaggcaaaaaatggggttagtgacaaggcatttggcgatttattgaaactcgtcaagaacattcttccggagggaaataaattgcccgagacaacatacgaggctaagaagatagtctgcccgctaggactggaagttcagaagattcacgcatgtccaaatgattgtatcctatatcgcggtgaggagtatgagaacctagaagcatgccctgtttgcaaggcactacgatacaagattagacgagacgatccaggagaagttgacgggcagctaacaaagaagagaattcctgctaaggtgatgtggtatttccctataataccacggataaggcgtttgttcaggaacaaggggaatgctaggatgatgcgatggcacgctgaagagcgtcaacaggacgtgatgctgagacaccccgccgatggttcgcagtggcgaaacatagacagaaaatttaaagaatttggaaaggacgcacgaaacatacggtttggccccaagcaacctgataacgacatcgatgtgtacctaagaccactggtcgaagatcttaagctgttgtggaagaaggaaggtgtccccgtgtgggacaaggacaaacaggaggagtttaacatacgagcgctgctgttcgtaaccattaacgattggcctgcacttagcaacctatctggacagtccaacaaggggtacaaggcttgcactcactgtatggatgaaacagaaagtacgtatcttaagcactgtaggaaggttgtatacatgggtcatcgtcgattccttgcagcaaaccacccggtacggaagaaagtcaagcacttcgaacataaggctgaccaccgtacgaagcctaaacatcgcaacgggaaaacagtgtttgctatggttaaagatctaaaagtagtgttcggaaaggggcctggaagccagcctatagagagcgaagatggtcacgcggcgatgtggaaaaagaactctatattttgggagttaccctattgggaattcttggacgtacgccacgcaatcgacgtgatgcacctcactaagaacctttgcgtaaaccttcttagcttcctaggtgtatacggaaagtcgaaagatacactggaagcacgtaatgatctgaagcatatggaacaacgcggcgactttcacccagaaccaaaggagaaaggaagccattacttgagtccagccagctacactcttagcaaggcagagaaggaaagtatgtttgaatacttggagagcataaagaaaagacgttgtcggagtcgtccctcaagccggagtggtagctatccctcgaaggaattcgcgcaggcaagtgacatggctgatcgcgatgaggaacagatattgtacgatacaatcgcggagggaagcagccagtactggaatgaaaaagatgggaaagaggatccaaaccagtatttgaacaaggaagggaacataacaagggcacgcggagatcatgagagctttgtcccagattcggagaaagagatgctgtggaccacaatgctcgagacattcacccttcccgcaggtacagaggacaaagtgaaaaggtggactctgaagaaaatggcagaacagtttcagagcttcaagggagagttgtacaagaaatatattctgaaggggcagacaccgaacttcgacacattcccaaagctaagggatcactgggacgagttcattgcatataagacaagtgaacaagggcaggcgatgatggaaagaaacaaagaaaatgccgccaagaagaagtaccatcgccacttggggccaggcggctatagcgtcgcgatgccgaagtgggaggagatggaggctaggttgcttgagaggggtatcgaaccggccaccgctaattggccggaacgatcgaagttctggtactatgctcacggtggaacactcaacccagctgatggctcactgactccagagcatccaggacgaacacaagggaaaggggtgattccttggaagattgggttcaaggaggatatccacacgtacaggagtcggatgaggagcaagagagataccgaggcgaagattgttgatcttgagttcagggtatcgagctacgagctcagcatgcaagaggaggtggcaaggaaggttgatgaacgcatggccgcacatcggtccaatgatccccagccgaccattcctcctgcaatggtgagcccgtcaggaaaccgtagcagctgcgcctcaacggggcaggtaggatcacagagcatggacgccatgcaaacccaagacgaatccacctgccccgttgatgacatcactcagcggacaccatgtgagctgcatattcctttcaagaacttatcaataaaggtggcgtcgggcatgaccatcccaacggacccttcaggtacttaccactgcaggccgattccagcaggatactccaaggtcgaagttgagttggtcgaaggcgcgtacgaggacctcgaactggattaccctggaggagacggtgagacgcatctacgagacacaagccatgcaattattctatggcgcaggctgtacatcatcctccctgggcgacaagcggcgtctcgtgcaccatcttctctggctccgccatctcctccggctccgccatctcctcctcaggatcctgcaccgtctcctcctcaggatcctgcaccgtctcctcctcatgctccagcaccgtctccacctcaggctcctgcaccgactcctcttcaggctcctgcaccgactcctcctcggtctcctacaccgactcctccgcaagctcctcttccggcaccttcaaagtcaagggccccccaggctccaccgcctgcccacagaagggcaacgaagaaggcaaaaattgacgccgccaagaacaaggacccggggtacgattgcacacaagaggagcttgacgcttacatggcatcagaagtcaagagacaattcaagcctcaaagtccagaaaagaagattcctatagacccgagtgtcatgaacttcttcaggggtatgtctgcacctgccaaggaggccattaagctatcggactatgagcgaacgctgaagaaagcatcttctggaaagtccaaactagtccctcagcttggagagcaaccaaaccaggagatcgagccgttggtgaccggtaaagaaatgacgatagaagaatttattactgacaccggtctaactacggatcaattgctaggagtcacaccaatcgaaaaggcggaagtgaaatacatgtacgaactcggtaaaccgcttgtcaagcctgagctgctgcagtccctacccacacaaatgtacaagttccatccgctgtacatggagatgagcgccaccggtagagagatgatcggagcgaggatcagggacacggacttcttgcaaggagatgacattctctggatcaatttcaagggaatctatgaactataccagctggacgccttcaacgtctctattatgagttgctggattttaatggagattcaaagggcccgacggcggggggttttcgatactggattcatcgaccctcggaaagtaaacgtcgcaatgctcgaccaatatccacaagccacagaggacaatctcgtccatctcctgaaggcgcagcattacaagacgttcatactgttgccgtacaacatagaattccactgggtgcttttactcttcgacctgtcggcctgcaccgtcaacgtatatgactcaatggataaaaaagagtctacgtttgacaaggttttcgaacttatagacagggcttggtatcggttccgtcatttggtccgcggtaaatggagagaaagacttaggcggaagttcaaatttccttgcgcaaagcaaaagaagggaactaacttgtgcggctattacgtgtgcgagtattgccactgccttgcagaccaaatcatcaccataagaaagctcaattttattcgcatgagggataacctgaccacgcacaaggaatttatcgcggcggttcaagaacaactcatgggattcatcaacgaacaaatccttgatcccaagggtgaattctactacgacggaaacacaattcataggtccttagcttctgagctagcgactactactacgtcgaaatcgtag

SEQ ID NO: 41473 - DNA, 4860 bp, Oryza sativa
  Clone ID: PAT_MRT4530_44814C.1
gccccaagcaacctggtaacgacatcgacgtgtacctaagaccactggtcgaagatcttaaacaattgtggaagaaagaaggtgtccccgtgtgggacgaggacaaacaggaggagtttaacctacgagcgctgctgttcgtaaccatcaacgattggcctgcacttagcaacctatccggacagtccaacaaggggtacaaggcttgcactcactgtatggatgaaacagaaagtacgtatcttaagcactgtaggaaggttgtatacatgggtcatcgtcgattccttgcagcaaaccacccggtacggaagaaaggcaagcacttcgaacataaggccgaccaccgtacgaagcctaaacatcgcagcgggaaaacaatgtttgctatggttaaagatcttaaagtagtgttcggaaaggggcctggaagccagcatatagagagcgaagatggtcacgcggcgatgtggaaaaagaactctatattttgggagttaccatattgggaattcttggacgtacgccacgcaatcgacgtgatgcacctcactaagaacctttgcgtaaaccttcttggcttcctaggtgtatacggaaagtcgaaagatacactggaagcacgtaatgatctgaagcatatggaacaacgcggcgaccttcacccggaaccaaaggagaaaggaagccattacttgagtccagccagctacactcttagcaaggcagagaaggaaagtatgtttgaatgcttggagagcataaaggtaccgtctggatactccacgaatatcaagcgaataataagcacgaaggagaagaagttcacaaacctaaagtctcatgactgtcacgtgttgatgacacaactgctaccagttataataaggggtatccttccagacaatgtccgggcaacaataacaaagctatgtgcattcatgaacgcaatttcgcagaaggtcatcgatccggatagattagaagcccttcagaatgaagtggtgcaatgtctcgtcagttttgagttgatatttccaccttcatttttcaatataatgacgcatctgctttgtcaccttgtgaaagagatccgtattctcgggcctatgtacctacacaacatgtttcctttcaagaggtacatgggcgttctgaagaagtatgttcgtaaccgtgctcgtccagaggcaagcatcgccaagggttatggaacagaggaggtcatcgaattttgtgtagaatttatcgaagaccttcgcccaatcggggtacttgaatcacgccatgaagggagactacggggaaagggaactctcggaaggaaagcaataatgacggtagacaacaatttattctgtaaagcccatttcactgttctgcaacactcttcattggtagctccttacatcgaggagcacttggctctagttcgcgccaggaacatcggtaagtccgatgcatggattacacggcatcacattgatactttccccgcgtggctacgacaacatctcatgggtaacgagtcgatcaaccaacaacttgccttcctggcgaggggaccgtctgggtcgatcgcgacattccagggatatgacatcaatgggtacacattctacacgagagcccaagacatgaagagcacgaaccaaaacagctttgttcgtgtcgatgccatgggacacgatggaacaactgccacgtattacggtgccatcgaggacatatgggaacttgactatggtcctctcaaggttcctctgttccggtgccaatgggttaggttgactggtggaggcgtaatgattgatgacagtgggatgacaactgttgaccttaacaaggttggatactcggacgaaccttttgtccttgccaatgatgtaacgcaagtctttttcgtgaaggacatgtctagcaaaggaaagaagggcagagggcctgatgagcctaagcgtcaagtggttctcccaggcaaaagaaaaatcgtcggagttgaggacaagactgacgaggattacgatcagttggatggcgatcacaaggagggaacaatagtgaggagaaagtacgtgcggtcaaccgtcaccgccgatccgtgcgccgccgtcgtttcagccgtcgccgtcgctcgagaagaccaccgtcgtgctcgccaagtcgtcgccgtcctcgtccaccacttcgccgtcgccggagatcaccagagcagcatcgccgtcatcgacccgaaggtttccgccgcttcctcctcgtcgccgtcgccgcccgttggtcttccgccgccgttttggtcaccggtgagttcgccgcgttgtcctctccgtcttggtgccctccgtttgcgtcctagcgccgccgttcgccggcgagcgtgcgccgttcgagccgtctcctccgccgagccgccgccgctgtcggtgacgtcaccgctgacgtcatcggggtcgtccgccatgccacgcttcaagcctgagtacctgtttggtgttgagggttttgtccaggagttgcgtacgatgtcctttgccattggatttgggactgcccctttttatgcccagattcttcatgatcgtcatgaagagaagtgccgagtcaaagtcaccttgaacagcaatagtgaagaggtcccctcagtaatgtttgaagctggaggaagaaactacatccatgcatgtcaggaggtggcaaggatcgccataggagagctccgcgatcgctacagtaatcagttggccgacactgagtatcgctaccatcctcgccaaccccagggaagtgaccgtggcagttaccttgagactgaaggaattgagaataacgctaccacaaggcatttggtcgagatgctgtgggctatggatgaaagtcgtgcggagactgtgttagcagctcaagatcgtgaagatcggaatcgtggtaagatttgcaagctagaagacaagatggatcgtttggagaaggaactagccgcattgaagggagaagcaccaccgcagaaggccaggattcgtctcaccgcaaggaagagagctctatttgtccctcgctaccaattggcgccaaaagttcgtgtggtggagaaagaagttgccccaaccttagcagatcctccggttatcatcataagtgatgatgaagaagaagaatccaagcgcaaccattccaagattgagtgggtagcaactcaagatgatgaagacgagccgaacgagccttcaatcgacctccgatgctcggaagaactagacaccactaatcctgttgaagctggtgattggctgcatgccatagagaagaagttggatttgcttcagtgtactgatcaggagaaggtctcatttgcatcacaccagttgcatggccctgcctctgaatggtgggatcacttccgcctgaataggattactgctgaacctatcacttggcttgaattcaccgctgctttccgaaagacgcatataccatcaggagtagtgtctctcaagaagaaggagttcaggtcgcttacccagggatctcgctctgttacggagtatttgcacgagttcaatcgtctggctcgttatgctccagaagatgtgcgcaatgatgaagagcgccaagagaagttcttggaaggacttaatgatgagctttcttacccactcatgactggagattattctgatttccagaagttagtggataaggctattcgtcaggaggacaagtataatcgcatggagcagaagaaacgccggatggctcacttcaaggcacaacaggggagtaatcagaagccgcgtcttactttaggaccccagtctgtgccacaaggaggttcttcgtctgttgttcgtccgcagcgtcagttcttcaacaacaatgctggcaataacatccgtaatcaagtcccacgtcctgttgcagcctcgacacagcaacaacctgccaagagggagcaaggcagcaagcccgtggtgtgtttcaactgtggagacccaggacattatgctgacaagtgtccgaagccccgtcgcgtgaaggttgtccctgcccagagcaactctacagtacctgtgccaaaggcccgtgtcaatcatgttgctgctgcagaagctcaagatgctccagatgtgattttggtccgggagtatcccgatgtgttcccagatgatttacctgccaatgagttggcagaagtcaagaggacagtggacgatttgcttctgaaaggatacatcagaccgagttcgtcaccatggggagctccggttatttttgtggaaaagaaagatcatacccagaggatgtgtgtggattatcgtgcactaaatgatgtgactatcaagaataagtatccactacccagaattgatgatttgtttgatcagcttaaaggtgccactgttttctccaagatagatcttcgatctgggtatcaccagttgagaatcaaagaggaagatatacctaagaccgcttttaccactaggtatggcatccacaacgtgttccacgtctctcagttgaagaaatgtttgagagttcctgaggaacaggcaagtccggatcacatcgaaattcaggaagatctgacgtatgtggagaagccgactcgtatcctcgaaaccagcgagagaaggaccagaaacaaagtaataagattctgcaaggttcagtggagccaccactcagaggaagaggccacttgggaaagagaagatgagttgaaggccacccacccgcacctcttcgccagctcttccgaatctcgggtcgccgccgtcgcgctcaccgagcccgcccgcacctcggccaccattcggttgccgccaatcgtcgccgaagcgccgtttccctcgcacgccg

SEQ ID NO: 41474 - DNA, 315 bp, Oryza sativa
  Clone ID: PAT_MRT4530_44815C.1
cacatatagagtagaatattattacaagccacgacagaattcacaaagtgagctaaacaacaccaactttattaaaggcacttatactggttaccacctcctaacataggatggagaggagcgctgctgataaacgcttcacccggaggagatggactccaagacgatctgcacggagattgtatgcttattggcgagctgcatagcttgctggaacatagaggtcccatccaacttgaccatgttgctcaccactgaatgtcctccttgcagctaaaaactcaggactcataaggattcataaccttgaatcac

SEQ ID NO: 41475 - DNA, 1314 bp, Oryza sativa
  Clone ID: PAT_MRT4530_44816C.1
atggggctccaggagggctcgaccgtggcgagcggcagcgccctcccttctggtgggaggggaggcggcggacaggggcgccagcgcccttccctccgccggatccagcgggaggggaggcgccggcggctcaccgacgtcccagcggcagcatcgcccctcccctctgccggatccagcgggaggggagggcgcggtggcccgccggcgtccaagcggcggcagcgcccctcctctccaccggatccagcgggaggggagttggcggtggcctgtgacggcaacggcgatattctcgggcctgtgtacctacacaacatgtttcctttcgagagatgcatgggcgttctgaagaagtatgttcgtaaccgtgctcgtccagaggcaagcattgccaagggttatggaacagaggaggtcatcgaattttgcgtagaatttatcgaagaccttcgcccaatcggggtacctgaatcacgccatgaagggagactacggggaaagggaactctcggaaggaaagcaataatgacggtagacaacaatttattccgtaaagcccatttcactgttctgcaacactcttcattggtagctccttacatcgaggagcacttagctctagttcacgccaggaacatcggtaagtccaatgcatggattacacggcatcacattgatactttccccacgtggctacgacaacatctcatgggcacgccggagatcaaccaacaacttgccttcctgacgaggggaccgtctgggtcgatagcgacattccagggatatgagatcaatgggtacacattctacacgagagcccaagacatgaagagcacgaaccaaaacagcgttgttcgtgtcgatgccatgagacacgatggaacaactgccacgtattacggtgccatcgaggatatatgggaacttgactatggtcctctcaaggttcctctgttctggtgccaatgtgttaggttgactggtggaggcgtaatgattgatgacagtggtatgacaactgttgaccttaacaaggttggatactcggacgaaccttttgtccttgccaatgatgtaacgcaagtctttttcttgaaggacatgtctagcaaaggaaagaagggcagagggcctgacgagcctaagcgtcaagtggttctcccaggcaaaagaaaaatcgtcggagttgaggacaagactgacaaggattacgatcagttggatgtaaactattttggatgtattgattatccatataaatcaattgatgtatggcataatttactatcattcatatgctacatttaa

SEQ ID NO: 41476 - DNA, 2559 bp, Oryza sativa
  Clone ID: PAT_MRT4530_44817C.1
atggatcggcaatggatgtacgctgaccggcggtccaaagagtttattgacggcgtgcattattttttgagagtggccgaagctaacaggcataagggttttatttattgtccatgcaataagtgtaaaaatcaaaagaagtattctgcatccaggactattcatttccacttgtttgagtcgggcttcatgccaagctataactgttggacatcccacggagagcaagaggttgaaatggaagaagatgaagtggaagacgacaatattccggactttgctcagtacgctggatttgaaggaaatcaaacgggcgaggaggaaagggatgctgatggtaacgacgttgcggatgatcttggtcagatgttgcaggacgccaaggaggactgcgaaagtgaaaagggggcccataaattggacaagatgttaaaggaccacagaacgtcgttatacctaggttgcgagcaggggcacaaaaagttggataccactcttgagttcttgcaatggaaggcaaaaaatggtgttagtgacaaggcatttggcgatttattgagactcgtcaagaacattcttccggagggaaacaaattgcccgagacaaccaacctttccggtcagtccaacaaggggtacaaggcttgcactcactgtatggatgaaacagaaagtacgtatcttaagcactgtaggaaggttgtgtacatgggtcatcgtcgattccttgctgcaaaccacccggtacggaagaaaggcaagcactttgaacataaggcagaccaccgtacgaagcctaaacatcgcaacaggaaaacagtgtttgctatggttaaagatcttaaagtagtgttcggaaaggggcctggaagccagcatatagatagcgaagatggtcacgcggcgatgtggaaaaagaactctatattttgggagttaccctattgggaattcttgaatgtccgccacgcaatcgactcgaaagatacattggaagcacgtaatgatctaaagcatatggaacaacgtggcgaccttcacccggaaccaaaggagaaaggaagccattacttgagtccaaccagctacactcttagcaaggcagagaaggaaagcatgttggaatgcttggagagcataaaggtaccgtctggatactccacgaatatcaagcgaataataagcacgaagaagaagaaattcacaaacctaaagtctcatgactgtcacatgttgatgacacaactgctaccagttgtaataaggggtatccttccagacaatgttcgggcaaaaataacaaagctatgtgctttcatgaacgcaatttcacagaaggtcattgatccggatagattagaagcccttcagaatgatgtggtgcaatgtcttgtcaattttgagttgatatttccaccttcatttttcaatataatgacacatctgctttgtcaccttgtcaaagagatcagtattctcgggcctgtatacctacacaacatgtttccttttgagaggtacatgggcgttctgaagaagtatgttcgtaaccgtgctcgtccagaggcaagcatcgccaaggggtatggaatagaggaggtcatcgaattttgcatagaatttatagaagaccttcgcccaatcggggtacctgaatcacgccatgaagggagactacggggaaagggaactctcggaaggaaagcaataatgacggtagacaacaatttattccgtaaagcccatttcacggttctgcaacaatcttcattggtagctccttacatcgaggagcacttggctctagttcgcgctagaaacatcggtaagttcgatgcatggattacacggcatcacattgatactttccccacgtggctacgacaacatctcatgggtaacgagacgatcaaccaacaactggccttcctggcgaggggaccatctggctcgatcgcgacattccagggatatgagatcaatgggtacacattctacacgagagcccaagacatgaagagcacgaaccaaaacagcgctgttcgtatcgatgccataggacacgatggaacaactggcacgtattacggttctatcgaggacatatgggaacttgactatggtcctctcaaggtccctctgttccggtgccaatgggttaggttgactggtggaggcgtaacgattgatgacagtgggatgacaacagttgaccttaacaaggttggatactcggacgaaccttttgtccttgccaatgatgtaatgcaagtcttttacgtgaaggacatgtctagcaaaggaaagaagggtagagggcctgacgagccgaagcgtcacatggttctcccaggcaaaagaaaaatcatcggagttgaggacaagactgacgaggattacgatcagtttgatgggcaacctcctttcacggtgacgattgaccctagcatcctcctatcaaatgaagacaccccttactcacgtagcgatcacaaggagggaacaatagtgaggagaaagtacgtgcggtcaaccgtcaccgccgatgtattgccgtaa

SEQ ID NO: 41477 - DNA, 678 bp, Oryza sativa
  Clone ID: PAT_MRT4530_44818C.1
atgccggtgaagagcagcgccagcttccggctcaccgcgctgccggtggtggtggtcgcgcagctgctggccgccgccgtgctgacgctcacgctcgtctgggtgctgcacttccggggtggcgtctcctggtcctggcataggagctctacccctcagctcgtttacacggcacatcctctcttcatggtgattggccttgtcatctgcacgggagaagcgataatggcgtacaggatcatgctggggtcaagggaggtgaagaaggcggtgcacctgctgctgcatctggtcgccctcgccttcgccgccgtcggcctgtacgccgccttcaagttccaccatgatctccgcgcccctgacatccgctccctccatgcttggcttgggataaccactgcagcactctatgcctttcagtggctggtgggttttgtctactttgtattcccgggggcggtgatgacgatgagggctgactacgcgccatggcacattttgttgggcatcgtcatcttcctcatggccatctgcaccgccgagaccggcctagcacgcttcatcttccccttccacggctatccgagcgaagcgttcgtcgtcaacttcaccggtctcgccatcctcatgttcggcgttgctgtcgtcgtggctgccatccttccatcgagatattaa

SEQ ID NO: 41478 - DNA, 1629 bp, Oryza sativa
  unsure (1)..(1629): unsure at all n locations
  Clone ID: PAT_MRT4530_44819C.1
aaagaaaagaattcctgtaaaggtaatgtggtatttcctaataataccacggctaaaggcgtttgttcaggaacaaagggaaatgctagaatgtttcgatggcacgctgaagagcgtcaacagnacgggatgctaaaccacnccgccgatggttcgcagtggcgaaacatcgacagaaaatttaaagaatttggaaaggacgcacgaaacatacggtttggtttgagtacggatggcatgaatccttttggagagatgagcagcggccatagcacttggcccgttacgatatgtatctacaacctcccccgttggctatgcatgaagaggaagtacataatgatgccgattataattcaaggccccaagcaacctggtaacgacattgatgtgtaccaaagaccactggtcgaagatcttaacctgttgtggaagaaggaaggtgtccccgtgtgggatgaggacaaacagaaggagtttaacctacgaactctgctgttcgtaaccatcaacgattggcctgcacttagcaacgtatccgggcagtccaacaaggggtacaaggcttgcactcactgtatggatgaaacagaaagtatgtatcttaagcactctaggaaggttgtgtacatgggtcatcgtcgattccttgcagcaaaccacccggtacggatgaaaggcaagcactttgaatataaggcggaccaccgtacgaagcctaaacatcgcagcgggaaaacagtgtttgctatggttaaagatcttaaagtagtgtttggaaaggggcctggcagccagcctatagagagcgaagatggtcacgcggcgatgtggaaaaaaaactctatattttgggagttaccctattgggaattcttggacgtccgccacacaatcgacgtgatgcacctcactaaaaacctttgtgtaaacctacttggcttcctaggtgtatatggaaagtcaaaagagacactggaagcatcgacctttgtccgggcaacaataacaaagctatgtgctttaatgaacgcaatttcgcagaaggtcatcgatccggatagattagaagcccttcaaaatgatgtggtgcaatgtcttgtcagttttgagttgatattttcaccttcatttttcaatataatgatgcatctgctttgtcaccttgtcaaagagatcaatattctcgggcctatgtacctacacaacatgtttcctttcgagaggtacatgggcgttctgaagaagtatgttcgtaactgtgctcgtccagaggcaagcatcgccaaggggtatggaacagaggaggtcattgaattatgcgtagaatttattgaagaccttcgcccaatcggggtacctgaatcacgccatgaagggagactacggggaaaggggactctcggaaggaaagcaataatgacggtagacaataatttattccgtaaagcccatttcacggttctgcaacaatcttcattggtggctccttacatcgaggagcacttggctctagttcgcgccagaaacatcagggccgctgttgacgcatggaccaaaaaggagttttcgggttacagccgagtgtacatgaacctacagggtcgcacgcttaatggaccgaaataa

SEQ ID NO: 41479 - DNA, 1475 bp, Oryza sativa
  Clone ID: PAT_MRT4530_4481C.1
atggttacccatggcggcggcggcggcggcggcgctcggacgatttgggacgacgaggcggcagcggcggctggtgtgatgagacgaagccctagatgcgtgggagaatttataggagatccgttgctgggccgggatattgttttgggcctttgggattctcggcccatttcacgtgtctcgctacaccggaggcccatgaagagcccagtagaaaggcgtagtgtagtgggaaccctcggggagtcgcggcgcgagcacaccactgacctctgcggcggcggcgaggagaggagaggggagaagccgaggaggaggcagcggggagagaggatgccgcggccggaggtgcaggcgccgccggagatattctacaacgagtcggaggcccgcaagtacaccacctcctctcgcatcatcgaaatccagtcgaggattaccgagagggcgctcgagttgcttgcgctacccaacgatggcgtccccaagttgcttctcgacatcgggtgcggttctggacttagtggcgagacattgacagagcagggccatcactggattggttatgatatttcgaagtccatgcttgatgttgctctggagcgtgaagcggagggtgatctccttcttgcagatatgggccagggtttaggcttgcggcctggagttattgatggagcaatcagtatttcagcagttcagtggttatgcaatgctgacaagtcttgtcacaacccaagattgcggttaaaggctttctttggatcattatatagatgcctagcaaggggagcaagagccgttttgcaattttatgctgataatgtgaagcagagtgaaatgatcgtgactgctgccatgcgtgctggatttgcaggtggagtggttgttgactggcctcacagttcaaaagcaaagaaatcctaccttgtcctcacttgtggaccaccttctctaaattcatcgcttccgaagggtaaaggtcaagatggtgccatgtgtagtgatgatgatgagagcgatgatggaagtggtgatgaagatggagcccaaacagtcggcatatatgaaagaaataggccaaagaagaggcagaagacgaagaagaacggcaagggcaaggcttggctcttgaacaaaaaggagcagctgagaaggcgaggacgggaggtgcccgcggacaccaaatacacagggcggaagcggaaaagctacttctagtttcaaatgattcttggaatgcctgtgcaccattttgccgtttgtcatactagtagctcattattagtagtacgagaaaggttcagttgaagagttgggtgaatgcgctctctctctctacaccatagagccgttcatgttctgtaaccttctagcaattctgagttttgacaaatgctgtgcaaatctatgtcctacttttgaaggatccagtattgtatgtttgttgcttaaaattttacatgggttttggc

SEQ ID NO: 41480 - DNA, 4524 bp, Oryza sativa
  Clone ID: PAT_MRT4530_44820C.1
atggatcggcaatggatgtacgctgactggcggtccaaagagtttattgacggcgtgcattattttttgagagtggccgaagctaacaggcaaaagggttttatttgttgtccatgcaataagtgtaagaatcagaaggagtattctgcatccaggactattcatttccacttgtttgagtcggggttcatgccaagctataattgttggacatcccacggagagcatggagttgaaatggaagaagatgaagtggaagacgacaatattccggactttgctcagtacgctggatttgaaggaaatcaaacgggcgaggaggaaagggatgctgatggtaacaacgttgcggatgatcttggtcaaatgttggaggacgccaaggaagattgcgaaagtgaaaagggggcccataaattggacaagatgttagaggaccacagaacgtcgttgtacccaggttgcgagcaggggcacaaaaagttggataccactctggagttcttgcaatggaaggcaaaaaatggtgttagtgacaaggcatttggcgatttattgaaactcgtcaagaacattcttccggagggaaacaagttgcccgagacaacgtacgaggctaagaagatagtgtgccctctaggattggaagttcagaagattcacgcatgtccgaatgattgtatcctatatcgcggtgaggagtacgagaacctagaagcataccctgtttgcaaagcgctacgatacaagattagacgagatgatccaggagaagttgacgggcagctaacgaagaagagaattcctgctaaggtgatgtggtatttccctataataccacggttaagacgtttgttcaggaacaaggggaatgctagaatgatgcggtggcacgctgaagagcgtcaacaggacgggatgctgagacaccccgccgatggttcgcagtggcgaaacatcgacagaaaatttaaagactttagaaaggacgcacgaaacatacggtttggtttaagtacggatggcatgaatccttttggagagatgagcagcggccatagcacttggcccgttacgatgtgtatctacaacctccccccgtggctatgcatgaagaggaagtacataatgatgccgattataattcaaggccccaagcaacctggtaacgacatcgatgtgtacctaagaccactggtcgaagatcttaaactattgtggaagaaggaaggtgtccccgtgtgggatgaggacaaacatgaggagtttaacctacgagcgctgctgttcgtaaccatcaacgattggcctgcacttagcaacctatccgggcagtccaacaaggggtacaaggcttgcactcactgtatggatgaaacagaaagtacgtatcttaagcactgtaggaaggttgtgtacatgggtcatcgtcgattccttacagcaaaccacccggtacggaagaaaggcaagcactttgaacataaggcggaccaccgtacgaagcctaaacatcgcagcgggaaaacagtgtttgctatggttaaagatcttaaagtagtgtttggaaagaggcctggcagccagcctatagagagcgaagatggtgtatatggaaagtcgaaagatacactagaagcatgtaatgatctgaagcatatggaacaacgcggtgaccttcacccggaacctaaggagaaaggaagccattacttgagtccagccagctacactcttagcaaggcagagaaggaaagtatgtttgaatgcttggagagcatcaagtacttgaacgaggaggggaacgtggagagggatgcggaggggaacgaggaggggaacgatgcggaggaggctagtggaagtcagccctctgctggacagaagagggcacgcggacaacgaggtgccgcgaagaagatagagggtcggcacatcataaccgaggtggacgaagacggccgacctagtgcaccggcagaagcagccaagaattttgtacgccacagcggttggcttgtaagggacaacgtacctgtcagcacggtatactggcgcagaacaagggcacgcggggatgatgacagctttgtcccggactcagagaaagagatgttgtggaccacaatgcttgagacattcacgctacccgtgggtacagaaaacttagtgaaacagtggactctgaagaaaatggcagaacagttccagagcttcaagggagatctctacaagaaatacatcctgaagggactaacaccgaacttcgacgtattcccaaagctaagggatcattgggacgagttcgttgcttacaagacagggcaacaagggcaagcaatgatggccagaaacaaagaaaatgccgccaagaagaagtgctatcaccacttggggtcaggcggatatagcgtcgcgaagccgaagtgggaggagatggaggctagcttgcttgagaggggtatcgaaccggccaccgctaattggccggatcgatcgaagttctggagtcagatgaggagcaagagagataccgaggcgaagattgcaaatcttgagtacagggtatcgagctacgagctcagcatgcaagaggaggtgacaagcaaggtggatgaacgtatggccgcacatcggtcccaggatccccagccgtacattcatcctgcaatggtcagcccatcaggcaatcgtagcagctgcgcctcaacggggcaggtcggatcacagagcatggacgccatgcaaacccaggacgaaacctcctgccccgttgatgagatcacgcagcggacaccatgtgagctgcatattcccttcaagaacttatcaatcaaggtggggtcaggaatggccatcccaacggacccttccgggacttaccactgcaggccgattccagtaggatactcgagggtcgaagttgagctggtggaagccgcgtacgaggacctcgagttggactacccaggaggggacggtgagacgcatctacgagacacaagccacgccatcatactatggcgcaagtggtacatcattcttcctgggcgacaagcggcatttcgtgcaccatctcctccggctccgccatctcctcctgcaccatctcctccggctcctccgccacctcctgctgcaccatctccttcggctcctccgccacctcctgctgcaccatctcctccggctcctccgcctcctccgcctccaccgtgtctgcctacacctcccaagacaaggtctcgccaagctccaccgcctgcccgcacaagggcaacgaagaaggcgaaagttgacgccaccaaaaacaaggagccaccatacgattgcagtcaagaagagctcgatgcttatgtggcaggagaggtgaagaggcaactcaagcctcggagtcctgaaaagaagatgcctattgacccgagcgtgaagaacttcttcaagggaatgtccaaaacaaacaaggaggcattacagatatcggactatgaccgaacacttcagagagcctatcacaataagtccaaaccagtccctcagcttggagaacaaccaaaccaagaggtcgagccgttggtgaccggcgaagattttggcataacggatttcattgcagacaccggtctatctgtggatcagttggttggagccgcaccaatcccgaaggcggaagtggcatacaagtttgaactcggtaaaccgcttgtcaaacctgaacaactggagtccctaccgatacagatgtacaaattccatgaacggtacatggaaatgagcgccaacggtagagagatgttcggggcgaggatcagaaaccccgacttcttgcaaggagacgatgttctctggatccatttcaaggatctcttcgatctgtaccagttggacgccctcaacgtctctctcctgagcgcatggattttaatggagattcaaagggcccgacggcggagggtctacgatactgggttcatcgaccctcagaaaatcaactccgaaatgatcgacaagtacgagaaagacacagaggacaatctcgtccatctcctaacgcagcagcatttcaagacgtacatactactgccgtacaacacagaagtcactgtgtatgactcaatgaataaagaggagaagatttttgacaaggtcttcaaaccgatagacagggcttgtgatcggttccgtcaattggtccgcggaacttggaaagaaaaacttggacggaggtttcattttccatgtgcaaagcaggaacagggaactaacttatgcggctactacgtatgcgagtatgcccactgcctatcaaaccaaatatgcacaacacgagagctcgatcgtattcacatgagggataatctcccacacaaggattttatcacggctgttcaagaacaactgatgagattcatcaacgaagaagtccttaatcccgacaatgaattctactacgacggatcaacaattcataacgtcggtccttcctcttctgacataacgccggcgtcgaagtcgaagtcgtag

SEQ ID NO: 41481 - DNA, 709 bp, Oryza sativa
  Clone ID: PAT_MRT4530_44821C.1
cccggcgccacgagctgagctaactcccaagctagtgaagagtacaatcacacaattcgatcagggttttgctgattagtagcctccgatctcgttcctgccaagaaattaagcaaagcaatggccaagcaaaagatcgtgatcaaggtggagatgtcgtgcgacaagtgcaggtcgaaggcgatggcgctggtggcggcgacgggaggggtggactcggtggcgctggccggggacggcaaggaccaggtggtggtggtcggcgacggcgtcgactccatcaagctcaccgccgcgctgcgcaagaaggtcggccacgccacgctcgtgaccgtcggcgaggtcaagaaggaggagaagaagccggagcccgccaccgccgccgtcgtcgagtactcgtggagctaccacccctacgcctacgcgccgccggcgcagcacgtcgtctaccagcagtatccagccagctcgccgtggtggtgctaagtgcttaactactcgtatcgtatggataaaatcaatcaatctggtccgttggatcgacaagatcaagatacgtggcgtccatgtttctcggattaaaagtgtataaagtaggatgatctgggttgtttaggacagatcgctgagagatcagcatgtcgtccccccctccctctcatttttggtgatttaaattgattcagagaagattttggcttgtggactc

SEQ ID NO: 41482 - DNA, 5364 bp, Oryza sativa
  Clone ID: PAT_MRT4530_44822C.1
atggaagaaaatgaagtggaagacgacaatattccggactttgctcagtacgttggatttgaaggaaatcaaacaggcgaggaggaaagggatgctgatggtaacgacgttgcggatgattttggtcagatgttgcaggacgccaaggaggactacgaaagtgaaaagggggaccataaattggacaagatgttgcgagcaggggcacaaaaagttggataccactctggagttcttgcaatggaagacaaaaatggggttagtgacaaggcatttggcgatttattaaaactcgtcaagaacattcttccggagggaaacaaattgcccgagacaacgtacgaggctaagaagatagtctgcccgctaggactggaagttcagaagattcacgcatgtccgaatgattgtatcctatatcgcggtgaggagtatgagaacctagaagcatgccctgtttgcaaagcactacgatacaagattagacgagacgatccaggagaagttgacgggcagctaacaaagaagataattcctgctaaggtgatgtggtatttccctataataccacagctaagtcgtttgttcaggaacaaggggaatgctagaatgatgcgatggcacgctgaagagtgtcaacaggattggatgctgagacaccccgccgatggttcgcagtggcgaaacatcgacataaaatttaaagaatttggaaaggacgcacgaaacatacggtttggccccaagcaacctggtaacgacatcgatgtgtacctaagaccactggtcgaagatcttaagctgttgtggaagaaggaaggtgtccccgtgtgggacgaggacaaacaggaggagtttaacatacgagcgctgctgttcgtaaccatcaacgattggcctgcacttagcaacctatccggacagtccaacaaggcaaaccacccggtacggaagaaaggcaagcactttgaacataaggctgaccaccgtacgaagcctaaacatcgcaacgggaaaacagtgtttgctatggttaaagatcttaaagtagtgttcggaaaggggcctggaagccaacctatagagagcgaagatggtcacgcggcgatgtggaaaaagaactctatattttgggagttaccctattgggaattcttggacgtccgccacgcaatcgacgtgatgcacctcactaagaacctttgcgtaaaccttcttggcttcctaggtgtatatggaaagtcaaaagatacactggaagcacgtaatcatctgaagcatatggaacaacgcggcgaccttcacccggaaccaaaggagaaaggaagccattacttgagtccagccagctacactcttagtaaggcagagaaggaaattgtaataaggggtatccttccagacaatgtccgggcaacaataacaaagctatgtgcattcatgaacgcaattttgcagaaggtcatcgatccggatagattagaagcccttcagaatgatgtggtgcagtgtcttgtcagttttgagttgatatttccaccttcatttttcaatataatgacgcatctgctttgtcaacttgtcaaagagatcagtattctcgggcctgtgtacctccacaacatgtttcctttcgagagatacatgggcgttctgaagaagtatgttcgtaaccatgctcgtccagaggcaagcatcgccaaggggtatggaatagaggaggtcattgaattttgcgtagaatttattgaagaccttcgcccaatcggggtacctgaatcacgccatgaagggagactacggggaaagggaactctcggaaggaaagcaataatgacggtagacaacaatttattccgtaaagcccatttcacggttctgcaacaatcttcattggtagctccttacatcgaggagcacttggctctacttcgcaccagaaacatcggtaagtccgatgcatggattacacagcatcacattgatactttccccgtgtggctacgacaacatctcatgggtaacgagacgatcaacaaacaactggccttcctggtgaggggaccatctgggtcgatcgcgacattccagggatatgagatcaatgggtacacattctacatgagagcccaagacatgaacagcacgaaccaaaacagcgctgttcatatcgatgccatgggacgcgatggaacaactggcacgttgactggtcgaggcgtaatgattgatgacagtgggatgacaacggttgaccttaacaaggacaagactgacgaggattacgatcagtttgatgggcaaccccctttcatggtgacgattgaccctagcatcctcctatcaaatgaagataccccttactcacgtagctatctcaaggagggaacaatagtgaggagaaaaaaagacgttgtcgtcatcgtctctcaagccagagtgacggctgatcgcgatgaggaacagatattgtatgatacaatcgcggagggaagcagccagtactggaacgaagaagaggggaacgaggatccaaaccagtacttgaacgaggaagggaacgtggagagggatgcggaggggaaccaagaggggcacgtggagagggatgtggaggggaatcaggaggaggaggctagtggaagtcaaccctccgctggacggaagagggcacgcgggcaacgaggtgccgcgaagaagcttgagggtcggcacatcataacggaagtggacgaagacggccgacctattgccccggtggaagcagccaagaactacatacgtcacagcggttgggttgtgcgggataacgtgcctgtcagtacggtgtactggcgcagaacaagggcacgcggagatcatgagagctttgtcccagatttggagaaagagatgctgtggaccacaatgctcgagacattcacccttcccgtggatacagaggacaaaagattcaagggaaatctgtaccagaaatatatcctgaaggggcagacaccgaacttcgacacattcccaaagctaagggatcactgggacgagtttgttgcatataagacaggtcaacaaggacaggcgatgatggaaagaaacaaagaaaatgcctccaagaagaagtaccatcaccacttggggtcagacggctatagcgtcgcgatgccgaagtgggaggagatggaggcaagcttgcttgagaggggtatcgaaccggccaccgctaattggccggatcgatcgaagttctggtattatgctcacggtggaacgctcaacccagctgatggctccctggtcttcagcgatcagatacgcgaggctgcacgtcgactaacggacgcagtggaagcctcttctcagggcacgttccgacccgacagagagaaggacgagctgtcactcgccctgagtcggatgaggagcaagagagataccgaggcaaagattgcagatcttgagtacagggtatcaagctacgagctcagcatgcaagaggaggtggcaaggaaggttgatgaacgcatggccgcacatcggtcccatgatccccagccgaccattcctcctgcaatggtgagcccttcaggaaatcgtagcagctgcgccttaacggggcaggtaggatcacagtgcatggacgccatgcaaacccaggacaaaaccacctgccccgttgatgacatcactcagcggacaccatgtgagctgcatattcccttcaagaacttatcaataaaggtggcgtcaggcatggccatcccaacagacccttcaggtacttaccactacaggtcgattctagcaggatactccaaggtcgaagttgagttggtcgaaggtgcgtacgaggacctcgagttggattaccctggaggagatggtgagacgcatctacgagacacaagccacgccattatactatggcgcaagtggtacatcatcctccctgggcgacaagcggcatctcgtgcaccatctcctccggctctgccatctcctcctcaggctcttgcaccgtctcttcctcatgctccagcaccgtctccacctcaggctcctgcactgactcctcctcaggctcctgtaccaactcctcctcaggctcctacactgactcctccgcaagctcctcgtccggcaccttccaagtcaagggccccccaagctccaccgcctgcccccacaagggcaacgaagaaggcgaaagttgacgccgccaagaacaaggacccggggtacgattgcacgcaagaggagcttgacgcttatgtggcatcagaagtcaggagacaattgaagcctcgaagcccagaaaagaagattcctatagacccgagtgtcaagaacttcttcaggggtatgtctgcacctgccaaggaggccataaagctatcggactgtgagcgaacactcaagaaaacatcttctggaaagtccaaaccagtctctcagcttggagagcaaccaaaccaggagatcaagccgttggtgaccgaaatgtacaagttccatcaactgtacatggagatgagcgccaccggtagagagatgatcggagcgaggatcagggacacggacttcttgcaaggagatgacattctctggatcaatttcaaggaggacaatctcgtccatctcctgaaggcgcagcattacaagacgttcatactgttgccgtacaacacagaattccactgggtgcttttactcttcgacctggaggcctgcaccgtcaacccgcacccgagggcgcgggcggctgacggccgggccccacgcggcagccactcggcgcacccaagggcggccaagccggcgcggacggcgggaggcggcgccccgcgccccgatggtcgccgccggcgaccaccggcgcggcggagcggcggccgagagaggggagggaagggggaaaggaggcgacggtccacggctcacctcggggcgacggcggcgatgagggaggcggccgaagcggagggaggcggtgtcgcggctcgggtcgacggggtcggcggcgctccggcggtcggcgaccgaaacggagaggtggacgaggtcggcgaggatgcggcgaacccgaaggaggcggcgccgaggtgggaggcgggggagcggcgggagcggcgggaggtcagggatgatgggtgggccccacccgtcagcgagggtgccgggcgggcccgcccgatgggctgccttcaactcgtcttcatgctcccaagtagcttcttcctcggcgtgggtgctccattggaccttgcaaaaacggattacccggttcctggtcctgcgctccatggtgtccaggattttcactggtctctctacgtaggtcaagtcttcgcgaacttcaatctgctctga

SEQ ID NO: 41483 - DNA, 2370 bp, Oryza sativa
  Clone ID: PAT_MRT4530_44823C.1
atggaagaagatgaagtggaagacgacaatattccggactttgctcagtacgctggatttgaaggaaatcaaacgggcgaggaggaaagggatgctgatggtaacaacgttgcggatgatcttggtcagatgttgcaggacgccaaggaggattacgaaagtgaaaagggggcccataaattggacaagatgttagaggaccacagaacgttgttgtacccaggttgcgagcaggggcacaaaaagttggataccactctggagttcttgcaatggaaggaaaaaaatggtgttagtgacaaggcatttggcgatttattgaaactcgtcaagaacattcttccggagggaaacaagttgcccgagacaacatacgaggctaagaagatagtgtgccctctaggactggaagttcagaagattcacgcatgtccgaatgattgtatcctatatcgcggtgaggagtgcgagaacctagaagcatgccctgtttgcaaagcgctacgatacaagattagacgagatgatacaggagaagttgacaggcagctaacgaagaagagaattcctgctaaggtgatgtggtatttccctataataccacggctaaggtgtttgttcaagaacaaggggaacgctagaatgatgcggtggcacgctgaagagcgtcaacaggacgggatgctgagacaccccgccgatggttcgcagtggcgaaacatcgacagaaaatttaaagactttggaaaggacgcacgaaacatacggtttggtttaagtacggatggcatgaatccttttggagagatgagcagcggccatagcacttggcccgttacgatgtgtatctacaacctccccccatggctatgcatgaagaggaagtacataatgatgccgattataattcaaggccccaagcaacctggtaacgacatcgatgtgtacctaagaccactggtcgaagattttaaactgttgtggaagaaggaagcaaaccacctggtacggaagaaaggcaagcactttgaacataaggcggaccaccgtacgaagcctaaacatcgcagcgggaaaacagtgtttgctatagttaaagatcttaaagtagtgtttggaaaggggcctggcagccagcctatagagagcgaagatggtgtatatgaaaagtcgaaagatacactagaagcacgtaatgatctgaagcatatggaacaacgcggtgaccttcacccggaaccaaaggagaaaggaagccattacttgagtccagccagctacactcttagcaaggcagagaagggaagtatgtttgaatgcttggagagcatcaaggtaccgtctggatactccacgaatataaagcgaataataagcacgaaggagaagaagttcacaaatctaaagtctcatgactatcacgtgttgatgacacagctgctaccagttgtaataaggggtatcctcccagataatgtccgggcaacaataacaaagctatgtgctttcatgaacacaatttcgcagaaggtcatcgatcctgatagattagaagccctgcagaatgatgtggaggtcattgaattctgcgtagaatttatcgaagcccttcgcccaatcggggtacctgaatcacgccatgaagggagactacggggaaaggggacttttggaaggaaagcaataatgacggtagacaacaatttattccgtaaagcccatttcacggttctgcaacaatcttcattggtggctccctacatcgaagagcacttggctctaattcgcgccaaaaacatcggtaagtccgatgcatggattacaaggcatcacattgatactttctccacgtggctgcgacaacatctcatgggtaacgagacgattaaccaacaactggccttcctggcgaggggaccatctagctcgatcgcgacattccagggatatgaaatcaatgggtacacattctacacgagggcccaagacatgaagagcacgaaccagaacagtgctgttcgtatcgatgccatgggacacgatggtacgactgacacgtattacggtgccatcgaggacatatgggaacttgactatggacctctcaaggtccctctgttccggtgccaatgggttaggttgactggtggaggcgtaacgattgatgacagtgggatgacaacggttgaccttaacaaggttggatactcggacgaaccttttgtccttgccaatgatgtaacccaagttttttacatcaagaacatgtctagcaaaggaaaaaagggcaaagtgactgacgagtcgaagcgccacgtggttctcccgggaaaaaaaaaaatcgtcggagtagaggacaagactaactag

SEQ ID NO: 41484 - DNA, 7297 bp, Oryza sativa
  Clone ID: PAT_MRT4530_44824C.1
atggatcggcaatggatgtatgctgaccgtcggtccaaagagtttattgatggtgtgcattattttttgagagtggctgaagctaacaggcaaaagggttttatttgttgtccatgcaataagtgtaagaatcggaaggagtattctgcatccaggactattcatttccacttgtttgagtcggggttcatgccaagctataattgttggacatcccacggagagcaaggtgttgaaatggaagaagatgaagtggaagacgacaatattccggactttgctcagtacgctggatttgaaggaaatcagacgggcgaggatgaaatggatgctgatggtaacaactttgcggatgatcttagtcagatgttgtaggtcgccaaggaggattgcgaaagtgaaaaggagggcccataaattggacaagatgttagaggaccacagaacgtcgttgtacccaggttacgagcaggggcacaaaaagttggataccactctggagttcttgcaatggagggccaaaaatggtgttagtgacaagattagacgagatgatccaagagaagttgacgggcagctaacgaagaagagaattcctgctaaggtgatgtggtatttccctataataccacggctaaggcgtttgttcaggaacaaggggaatgctagaatgatgcgatggcacgctgaagagcgtcaacaggacgggctgctgagacaccccgccgatggttcgcagtggcgaaacatcgacagaaaatttaaagactttggaaaaccactggtcgaagatcttaaactgttgtggaagaaggaaggtgtcccagcgtgggatgaggacaaacaggaggagtttaacctacgagcgctgctgttcgtaaccatcaacgattggcctgcacttagcaacctatccgggcagtccaacaaggggtacaaggcttgcactcactgtatggatgaaacagaaagtatgtatcttaagcactgcaggaaggttgtgtacatgggtcatcgtcgattccttgcaacaaaccaccaggttcggaagaaaggcaagcactttgaacataaggcggatcaccgtacgaagcctaaacatcgcggcgggaaaacagtgtttcctatggttaaagatcttaaagtagtgtttggaaatgggcctagcagccagcttatagagagcgaagatggtcacgcggcgatgtggaaaaagaactctatattttgggagttaccctattgggaattcttggacgtccgccacgcaatcgacgtgatgcacctcactaagaatctttgcgtaaaccttcttggcttcctaggtgtatatgaaaagtcgaaagatacactggaagcacgtaatgatctgaagcatatggaacaacgcggtgaccttcacccggaaccaaaggagaaaggaagccattacttgagtccagccagctacactcttagcaaggcagagaaggaaagtatgtttgaatacttggagagcatcaaggtaccgtctggatgcttcacgaatataaagcgaataataagcacgaaggagaagaagttcacaaatctaaagtctcatgactgtcacgtgctgatgacacagctgctaccagttgtaataaggggtatcctcccagacaatgtctgggcaacaataacaaagctatgtgctttcatgaacgcaatttcgcagaaggtcatcgatcctgatagattagaagccctgcagaatgatgtggtgcaatgtcttgtcagctttgagttgatatttccatcttcatttttcaatataatgacgcatctgctttgtcaccttgtcaaagagatcggtattctcggtcctgtgtacctacacaacatgtttcctttcaagaaaggcaagcatcgcccaatcgggatacctgaatcacgccataaagggagactacggggaaaggggactctcggaaggaaagcaataatgatggtagacaataatttattccgtaaagcccatttcacggttctgcaacaatcttcattggtggctccctacatcgaggagcacttggctctagttcgcgctagaatcatcggtaagtccgatgcatggattacaaggcatcacattgatattttctccaagtggctgcgacaacatctcatgggtaacgagacgattaaccaacaactggccttcctggcgaggggaccatctggctcagtcgtgacattccagggatatgaaatcaatgggtacacattctacacgagggcccaagacatgaagagcacgaaccagaacagtgctgttcgtatcgatgccatgggacacgatggtacaaatggcacgttgactagtggaggcgtaacgattgatgacagtgggatgacaacggttgaccttaacaaggttggatactcggacgaaccttttgtccttgccaatgatgtaacccaagttttttacgtcaaggacatgtctagcaaaggaaaaaaggccaaagggcttgacgagccgaagcgccacgtggttctcccaggaaaaagaaaaatcgtcggagtagaggacaagactgacgaggattacgatcagtttgatgggcaaccctctttcacggtgacgattgaccctagcatccttctatcaaatgaagacaccccttactcacgtagtgatcacaaggaaggaacaatagtgaggagaaaagaaaacgtcgtcatcgtctctcaagccgaagtgatggctgatcgcgatgaggaacagatactatacgatacaatcgcagagggaagcagccagtgctggaacgaaagagaggggaacgaggatccaaaccagtacttgaacgaggaggggaacgtggagagggattcggaggggaatgaggaggggaacgatgaggaggaggctagtggaagtcatccctccgctggacagaagagggcacgcggacaacgaggtgccgcgaagaagatagagggtcggcacatcataactgaggtggacgaagacggccgacctagtgccccagcagaagcagccaaaaattttgtacgccacagtggttgggttgtgagggacaacgtgccggtcagcatggtgtactggcgcagaacaagggcacgcggggataatgacagctttgtcccggactcagagaaagaaatgctgtggaccacaatgctcgagacgttcacgctacccgcggggccggagaaacgcagacggcgtaccacacaggaaaagatcgcaattgttcagcagagctttgaaccggggatgacggtctccctcgttgcccggcaacatggtgtagcagccagccagttatttctctggcgtaagcaataccaggaaggaagtcttactgctgtcgccgccggagaacaggttgttcctgcctctgaacttgctgccgccatgaagcagattaaagaactccagcgcctgctcggcaagaaaacgatggaaaatgaactcctcaaagaagccgttgaatatggacgggcaaaaaagtggatagcgcacgcgcccttattgcccggggatggggatcgtcacactgatgatacggatgtgcttctccgtatacaccatgttatcggagagctgccaacgtatggttatcgtcgggtatgggcgctgcttcgcagacaggcagaacttgatggtatgcctgcgatcaatgccaaacgtgtttaccggatcatgcgccagaatgcgctgttgcttgagcgaaaacctgctgtaccgccatcgaaacgggcacatacaggcagagtggccgtgaaagaaagcaatcagcgatggtgctctgacgggttcgagttctgctgtgataacggagagagactgcgtgtcacgttcgcgctggactgctgtgatcgtgaggcactgcactgggcggtcactaccggcggcttcaacagtgaaacagtacaggacgtcatgctgggagcggtggaacgccgcttcggcaacgatcttccgtcgtctccagtggagtggctgacggataatggttcatgctaccgggctaatgaaacacgccagttcgcccggatgttgggacttgaaccgaagaacacggcggtgcggagtccggagagtaacggaatagcagagagcttcgtgaaaacgataaagcgtgactacatcagtatcatgcccaaaccagacgggttaacggcagcaaagaaccttgcagaggcgttcgagcattataacgaatggcatccgcatagggcaaatccactaacaccgaacttcgatgtattcccaaagctaagggatcattgggacgagttcgttgcttacaagacagggcaacaagggcaagcgatgatggccagaaacaaaaacaatgccgccaagaagaagtaccatcaccacttggggtcaggcggatatagcgtcacaatgtcgaagtgggaggagatggaggcaagtttgattgagagtggtatcaaaccgaccaccgctaaatggcctgatcgatcgaagttttggtactatgctcacggtggaatgcttaacccagttgatggctcccttgtcttcagtgatcagatacgcgaggctgctagtcgactaacgaacgcagtggtagcctcttctcagggcacattccgacccgacagagagaaggatgagctgtcactcgccctacagactccccgagcatccaggacgaacacgagggaaaggcatgctgatcgcgatgaggaacagatactatacgatacaatcgcagagggaagcagccagtgctggaacgaaagagaggggaacgaggatccaaaccagtacttgaacgaggaggggaacgtggagagggattcggaggggaatgaggaggggaacgatgaggaggaggctagtggaagtcatccctccgctggacagaagagggcacgcggacaacgaggtgccgcgaagaagatagagggtcggcacatcataactgaggtggacgaagacggccgacctagtgccccagcagaagcagccaaaaattttgtacgccacagtggttgggttgtgagggacaacgtgccggtcagcatggtgtactggcgcagaacaagggcacgcggggataatgacagctttgtcccggactcagagaaagaaatgctgtggaccacaatgctcgagacgttcacgctacccgcgggtacggagaacatagtgaaacagtggactctgaagaaaatggcagaacagttccagagcttcaagggagatctctacaagaaatacatcttgaagggactaacaccgaacttcgatgtattcccaaagctaagggatcattgggacgagttcgttgcttacaagacagggcaacaagggcaagcgatgatggccagaaacaaaaacaatgccgccaagaagaagtaccatcaccacttggggtcaggcggatatagcgtcacaatgtcgaagtgggaggagatggaggcaagtttgattgagagtggtatcaaaccgaccaccgctaaatggcctgatcgatcgaagttttggtactatgctcacggtggaatgcttaacccagttgatggctcccttgtcttcagtgatcagatacgcgaggctgctagtcgactaacgaacgcagtgaatattggatttaaggaggacatccacacgtacaggagtcggatgaggagcaagagagataccgaggcgaagattgcagatcttgagtacaggatatcgagctacgagttcagcatgcaagaggaggtggcaaggaaggtggatgaacgtatggccgcacatcggtcccaagatccccagccgtacattcatcctgcaatggtcagcccatcaggcaatcgtagcagctgcgcctcaacggggcaggtcggatcacagagcatggacgccatgcaaacccaggacgaaaccacctgccccattgatgagatcacgcagcggacaccatgtgagctgcatattcccttcaagaacttatcaatcaaggtggcgttgggaatggccatctcaacggaccctttcgggacttaccactgtaggccgattccagcaggatactcaagggtcgaagttgagctggtggaagctgcgtatgaggacctcgagttggactacccaggaggagatggtgagacgcatctacgagacacaagccacgccatcatagtatggcgcaagcgtcaagaggagcttgatgcttatgtggcaggagaggtgaagaggcaactcaagcctcggagttctgaaaagaagatacctattgacccgagcgtgaagaacttcttcaagggaatgtccacaacaaacaaggaggcgttacagatatcggactatgaccgaacacttcagagagcctatcacaagaagtccaaaccagtccctcagcttggagaacaaccaaaccaagaggtcgagccgttggtgaccggcaaagattttggcataacggaattcatttcagacaccggtctaactgtggatcagttggttggaggcgcaccaatcccgaaggcggaagtggcatacaagtttgaactcggtaaaccgcttgtcaaacctgaacagctgcagtccctaccgacacagatatacaaattccatgaacggtacatggaaatgagcgccaagggtagagagatgttcggagcgaggatcagaaactccaacttcttgcaaggagaagatgttctctggatccatttcaaggatctcttcgatctgtaccagttggacgccatcgacgtctctcttctgagcgcatggattttaatggagattcaaagggcccgatggcggagggtctgcgatactgggttcatcgaccctcggaaaatcaacaccgaaatgatcgacaagtacgagaaagacacagaggacaatctcgtccatctcctaacgcagcagcatttcaagacgtacatactactgccgtacaacacagaagtcactgtgtacgactcaatgaataaagagaagaagatttttgacaaggtcttcaaactgatagacagggcttgggatcggttccgtcaattggtccgcgggacttggaaagaaaaacttggacggaggtttcattttccatgtgcaaagcaggaccaggaaactaacttatgcggctactacgtatgcgagtatgcccattgcctatcaaaccaaatatgcacaacacgagagctcgatcgtattcacatgagggataatctcccacacaaggattttatcacggctgttcaagaacaactgatgggattcatcaacgaagaagtccttaatcccgacggtgaattctactacgacggatag

SEQ ID NO: 41485 - DNA, 190 bp, Oryza sativa
  Clone ID: PAT_MRT4530_44825C.1
tgctgagtgttgaatttatgtggatctgatgtggtggatgcatggtggagtgatgtgcacaattttgtggggagggggtgaaactgaaatcacctgtccatgcacatccatgacttgtagctttcactccccactgttcatgatatgatatgatgtggtcttcagttcccaaaaaaaaaaaaaaaaaaaa

SEQ ID NO: 41486 - DNA, 497 bp, Oryza sativa
  Clone ID: PAT_MRT4530_44826C.1
cttgggaatagcaacaatccaggttgttatacttgcacactgaaaaagaaacaggttgaaagcaatatagcaggtgaccatgttaacttactcaggtgtccatatatagataaggatgttgcctatttggtccttataacagtggctaaatatgtgggtggcatagtagatttacaagtgcagtctgcacgatggccttataaggcacaaggctaattaacaccatattgatatcataagatattagcatcacgtttcatggagagcgaaccctgatggcaccaaaaggactgtatggcagggccagtacggtcttcagaagatatctatggttgcttgcaaatgcttttcttgtagaaatgaaaatgcatagtgagcaacctcatgctgttgtttactgcaaagtctgtccatccatcttttaagttgcaacgatgatccgttgatgtgtggagaaccattgtgattgaagggccttccaatgcttgaacttgtat

SEQ ID NO: 41487 - DNA, 513 bp, Oryza sativa
  Clone ID: PAT_MRT4530_44827C.1
atggcctctcaacaggaactcttatcccgtatgtctagaattagaatctcacaaaaagcaaggtcctcacacctcatcagatatggagaggttagagtactggccagaaagtcagcattttgtatggataaggagcatctgaaagagggtagggattccaggcaaagtgggtatcaagagatctgctatgtggcagcttgtaacttgctagtgaaaagaaaggaacaatgctacacatggtggcatactcaagatgaagtgatgacaaactttgtagaatggatgttcatatatagagatgaagggatcttatcaagaacaattccactatctgaatctgcagctcgtggaactcttcagatggaaactagcgatgaagcgctgttgaaggcattggagcagggcatcctcattgcctgcaacagttcagcaaaagttccggatgaacaacaaacccacagtttggtctctaacgagtatgaactacccccaatcgaaacggcaattcattga

SEQ ID NO: 41488 - DNA, 582 bp, Oryza sativa
  Clone ID: PAT_MRT4530_44828C.1
atgccatgtctggccggctacacatggaagccaagaccgatgctgcttctacacgtgcgcctgatcaggaagctaattaatggctttgatcagtcatataaccaagacaccgttatatatgacaaggaaaaacagatattcgcatggtctgatctttataaatatgtgaacgaaggaaaattctatttgacaatgttgaagacttcatgtctctatggttctacaccaagatcgactaatgcgagtacgacaaatgttgacaaggcttcgttgcagattatacgccttctcgatcgctcgagaacgggagttccggataaggaaagacgactagagttctacatggaaacgataagaactactcggattatatccatattggtttccctagttgtacttggacaaggggacacctatgggtataaatacaaggcccccctaggaggagaggggacacggaacaataaatcaagacacaagatcaacgtacaagccaacatacgtcaagacaagccgtcggatatcgacatcagagatatgcctagaccgaccctatccggtacctacagaggccggccgtag

SEQ ID NO: 41489 - DNA, 297 bp, Oryza sativa
  Clone ID: PAT_MRT4530_44829C.1
atggcagggagtcctggattggagcacacctggggagggaggagtggagaatggttcccggcggtggacgggagtaccaccaggggcgtggcggatgaggggtggcgatgccggcagatgacgcaggagagcgatgaaagcggccggcgaggttgtctggcagtgatggagactaccaacaaggtggagatggggaggaggccgagcaattttgtggatggcaaaatcgagtgtaggtggtgcgtcatcgatggcgagatcaagggggaggagccgaggaagctatcggcagcgtga

SEQ ID NO: 41490 - DNA, 727 bp, Oryza sativa
  Clone ID: PAT_MRT4530_4482C.1
atggcaaagcatattctgccaatagttgagggagtaaatattgacttcttgtttctgccgatgatagatgcacatgcaattgcgccctcctagcccaaatgagtaaattcagccctcttcggcatcttgtgaatagttggactaagaagcctaacatcccaaatgggcctttgcggcgtggagtccagataagttacacgcgaattattcggttcggttacatgttttggagatcatgtagacatcctgatcacgcgtcctgttatatgttgtacataaaccgagccaccgcctcctcgcaatatacgcgaaaaccaatctagggtttgcctccttctctgtattatgtcaccactcgtagtctactccgttcctcttgccgatgtgtacctgtgatcaggagaggagatctcccgacccatcgcccttgacgtcctgccccggaagaaggtaccaataaggttcttggtaagcgcttcacgtgatcgctgattggtctactacaacggcttgtcttcctctatgcttgagggctgcgtgctgacgataacgtccggtactgagcgttgttcctgggatgtccgctgctcctcgtcaacctgatccatagtaaaatctgaacccccgatacacattcaccatgtttcgtttgtttgatcttgttaacagtgaaatatcaataaacttcggcgcatcgccaccccttttacttttctactttttcaac

SEQ ID NO: 41491 - DNA, 596 bp, Oryza sativa
  unsure (1)..(596): unsure at all n locations
  Clone ID: PAT_MRT4530_44830C.1
tntgaatcaagggcaatagaaccctgagaaattgtgacaaaaccgatgtatcgaaacatgtgccaaaatttcaatgctcctcaatagcattgcaatgttctcaacggcaatacagcacctcgatctagagcttactataggtccatataaatgaattacaataaggattgcaaaaagatcttcaacttgaaacttctatttcttcttgtcagtagtaccagcagacctcatcttcctgatgacacccgccatctcctctctcttcttctttgctctcttgtgggtaccgagctttctcttagcgaccttcagtgcacgcttgtcctttccaaccttcagaagctcagtgattcgtttctcatatggagcaaatcccacaacctccctaatcaagcccctgacaaaattcactctcttggtacttttccccttgcggtcggacgggcgaggtggcagctcgcgcttggtgacgacgtggcccttgttgatgccgacgaagagccccgacttgggctgcggcggcgccatggcggatctcctcctcgctcctcggaccttggatcggcgacagctacaaaaccctaagccgccggctg

SEQ ID NO: 41492 - DNA, 160 bp, Oryza sativa
  Clone ID: PAT_MRT4530_44831C.1
ggaccccatacaaaaaccaatgactttggggaattaatgaatgggaataaatttgtaacaagtccagttggaacaaaatggttattttaagctaccaaaacactctatttatggttacaacataaggcccacacaatattatgaatggtactcgaaagtt

SEQ ID NO: 41493 - DNA, 2718 bp, Oryza sativa
  Clone ID: PAT_MRT4530_44832C.1
atggggtgtgtggggatcgagaagaaagattgctacactaggttaggaatacagatatgggaggcggtcttcgagagctcttcgcttggatggactaagaaatttgaagcttattgtcctggtgtaaagcatatggagtggatgcctaataagctcggccttgcgtatggcgatgaaagaggattgataacattattacaatacaacaaagagcaaggttgctttaaatccaaaatcatacatgacaagccatctagaggagaaacaacctcgatttcatggagtgggaacagctcttatctagcatcaagttttcacccaagagcaactgaagatgagacaagcaacagtatgatcattattcataagagggcaagtgcttcaagaacaaatgaggtgcaatcaattgagatggaaggccgaccaaacctaatagcaaagtttcaccctgttcataattgtcttttcatagctaagcggcggtggggattagacatcaagatcttctcgaacacaatcactggctttgaaaaagaatctgataagtgggttcaagttgcttccttggttgataacataatatctttctataaatatgatcactattccggatctgagtggactcctacagctaagcaaagagtttctttccaatacaaagtgaacactggaaatcgattcaaaaaaattctttccatgggttgctacatagactcaactattgcaattggttacacggatggttctattgagatctttacaaagaaaagaggaaaatatgttagtgctttaaacaagtactgggagcatcattggtcaaaagctaaatgctgggcatccaccattccttgcctatcctggcaatacaacaccgaaaagactcctaaggtgctagcagtaggaggggaacatggttttgttttgttctatgattttattgaagcggggccttacactgaaataccaaaccgtgactatgaatgggagactaactactacaaatgtccttccgaaccggacgaggaggtcgaggaggaggaggaggaggaggaggaggagccaacacatgatgtcactcaagagttaaactcacaagaagaagttgagcctgtgaaggaaacaaaatttgctatctgtcaacagattttctgtagcagaacagtaaatatggaagatatcaaagccattggatttaaaatggagtacacactcatcaattataaggtcacatttgagaaccttgcttatgttgaagccaaaaagagattagtaaatggaaagtatcccgaaaagatattagaatggaactacaacagtgagcatatgatcagaggtttgataattgacaagaaaaagggaaatataatcaaggtggaccactataataatgtaaaaatgtcataccatggcatgaatgagatgccatatgaggaatcaaaaaatgtttatggatctacatttatgtttgaagaacctgagtttgctgccatggatacaactttctcttgttgtgaaggatatctatttgcccaactcgttgatttgatggataccaatcctcaagaagtgccagcgcctacctacatgactttatacaaacatctcagggaagcctttgatcagggctataaagatggaactcttaaacaatctgtggccaatgaccttgctaggtacatcgataaagatccatcacttcttccaatgcttcagaacattaagaacaaaggaatctccacgttcttaataacagatagtttgtgggattatactgacattgttatggattatgcgctacatcaagataaagtgaacaaacacagctggcttcaatattttgacattgtctttacaggaagccgaagcttttttagtgaagaaagccacgtggagctgttcgacgtggagattgaaaccgggaaaatttcaaatcctaaagaatatcagttggggagatcgaaaacaaatcaagcacctaaggagatccagaaagtatatcagatagattgtaatttaatgccattaatgccatgtacagtcaatgtccacatgactcagactccccataattctcccacacatacacactcgtatcgagtaacaccgccaagggcagtgtacatgcatgcaaaaccacctcccgtaaagtccaaggatgaaaaatgtttagtttggattgtcgagggatggaatgatcggtttcgactgggaggagatgttggacatcttcaaagattattacctaataccaatgaccccaagcaggttctgtatgtgacacatcatattaccaaagagatgctcaacaacaaggcccaaggttggaagactatgcaaattatacctgagctggaaaaggaattgcaaattatcagagaacaggggtcaattcgacagacattctctcctactgagtggttctcaatatgcttacatgctacaatgattaagggtgattcagatgtgagaagaaagaagggaatggacagcgaacgtgaaactgctgaaaagaggctagcttcaaagtttaatgataaatggggtccagttatgaaggctgggaataagaattcccgatttgctcgcgaggtagaaagatcagcatggttatataccagcagggcgtcaaacttggctgctgagagatgttatgaacaatcagaccagttgatggcacatgactccgatttgttgagcttccatttgggcaaggactga

SEQ ID NO: 41494 - DNA, 507 bp, Oryza sativa
  Clone ID: PAT_MRT4530_44833C.1
atgtcgtcagcagacagccattttcccacgtcgcgcctgcttccggcggaagtggaggtaggccagagcggcgactacgggcaggcgagggacggagagcggcggtggagggagatcccccatgacgcgccgccgtggtcggctccgatgaaaagccatgcccccacgccacgccccatcaagagaaggcgaggtgggggtcgaccgccacaaggggaaggaggcaagctcggaagtgcggaaggaacgccaatagacggctcgggcaccggcgacgctcgcgaccagatgagtgggatggtgccggacggtggacaaatcccgccattccttcctctcacggcctccacctcaattgacgcgcgggcggcgaagggagagcttgtccaacacctttggaagcagcttgaacgcgccctcggtggcagcggagctgttcttgtccgggtgcaggacgaggcagaggcagcgccctcaggcacggtgccccctggatccagtcgttag

SEQ ID NO: 41495 - DNA, 138 bp, Oryza sativa
  Clone ID: PAT_MRT4530_44834C.1
atggcgccgtgctgcgccgggagagctccgtcggccgttcgatcaggcggggatgacaggaggttgccgacttgcaggattttggaagtggagctgtcagtgttgtcagttaattacattggagaagtaaccgatcaa

SEQ ID NO: 41496 - DNA, 469 bp, Oryza sativa
  Clone ID: PAT_MRT4530_44835C.1
accttatctgcagcttggtgctgcaacatattctgcatgatctgtcatcttaaaccattttactatctcagtgctttgcatagtcaaaccgtatgcacatgacgggttgattccactgattagagtaatagactctcttgctttgaaaaagaaaaggtttttgctggatacactgtccctggactagcaaacagagcacacttgaaacaatagacaggtgtacttttttgtcatctgttctgctcatgtcctgttcagttattgacaacaaggaacatgcacgctaatgcgcttacaatgatgaggttaatccgtaattggttattttattagtgctctaattcatgcctccccactggccatgataatggactgtgggggagatatttcctgctggtctgcgcaacctgaatttttcaattgtcacatcttcaacgaacttttgtcgtctaaccacaaaacaagctat

SEQ ID NO: 41497 - DNA, 165 bp, Oryza sativa
  Clone ID: PAT_MRT4530_44836C.1
caatgcctgcatgcatgccccaacatgcaagccctttgccattgtcttggagctggctgcaatggctggcatgccctgccatgtgtggcaaatgaatgtgctgttgggtttgcatgtgatgttgcgcaatggggttggtttgcaatgcatgccttgcgtgttgaa

SEQ ID NO: 41498 - DNA, 796 bp, Oryza sativa
  Clone ID: PAT_MRT4530_44837C.1
tcacaattttgttcaaacgcagttttttcagcagcagtattaatagcttcaggaatcacataagaatgagaaacttttctccaaatataaaattgcatcttactacaccattgagaaaaatccgttccatcgaaaacatgaggcttagttcaaaacctagcaggagtagccatggcaaaaactcctcgaattcgacagatcgcagtctgaccgaagttgctctgccggtctgaccgcctggttgctatcggtctgaccgcgattagatctccggtctgaccgccgagatcagctgccgcttactgttgccgccgccggtctgatcgcccgtatgccgccggtatatcgtcggttacaccgccaaaacccggctccccctctatttatacccgaggtaggcagcctaaagtaacgaaccaaactcatactagaagtcctaaaaaccttaggaaaccctctagtgcatcgagtcacctacacatgaaataaacaaagaaaccatattccgagaccaagttatctccaatttgtctcattagtagcaaacaatagtattacatacgtatagtatccatctagaagccataataatgaaacacggcacacactgcccggtctgaccggtcacatgaaataatgaacatgcgattcacctgtaaatccaatcatctccaaactcacttcgtgaataaattccaaataacaaaaccaataatctccaattcccaattgttcatcacagaataataatcaaaaacacatttgattttacaatcaagttgcaactttgtgtcca

SEQ ID NO: 41499 - DNA, 1803 bp, Oryza sativa
  Clone ID: PAT_MRT4530_44838C.1
atggaggacggcgacgatgttgacggcgacagcgaccacgaggagggcggcggccgacggcgccgcccctaccgcctcgcccgcgcgccgtccggccgtgccgtcgcctccctcggctctgcaacgctgcccccttcaccggcctcaccatcccctctcctgaagctcgccggaacggtgtcctcgccgacgtctagtgctgtcgtcatcttctccttccccggctccacggcatcaccctccaccccgaccgctgcccgtcttcgtctggagaccgccgaccgccgcgccggcctctccatcctcctcgtcgtcaacgtcgcctccggcagccccttccgccgtgcccgtgcgccggccgacgtcgccatctcctcctccggcatcgcagcgtcaaggttgccctcggccttgcctcccctccatctgaacccctccgctatccgtcgtcgtcgtcaccgttcgtcttcgccgatcgacgtcccatcggtcgcccggctcgtcgtctcgctgcgccgccacagtcatcgtcatcacagcggcgtgttccacgccgttctcgtctcagtgcagccgctgccggctgccctcgtcgcctcctcgccggccccggtcgtcgtcgtcgtcgtcctctcgtcgttcccggtcgtcgtggtgttcgtccctccgtcaagccgatcgcgttcgccgcccgcgtttcgtcaagtgtgcagcagccccgtcattgtcttcgtcctcggccccgcgtcgtcaagccttgtgccggccgcgtctcgccttcgtccaaggatcgcctccgaagttgtcttctcaccgttcgtctcagccgcgcccgttcgtcgtcgtcgttcgcacgcctcgtcgcgtggtggtaaggatcaatccttcgctgcccgcccttgtccttttggtgttgccaccatgcccgttgtgcggttgtcggccccggcttgtagctttgcttgtgtgcttcgcatagcttttgtcgttccggaggttctcgaagcgtgggtcgcggtcgtcgccgaagcaactgccctccctcggccacccttcggccagatctggaagggtggggcgctgccaccgacaccaccgccctcccacggcctccgtccggctggatttgaaagggaggggcgccgccgccactgccctcccccggcctcccctggcctccctccggccggatctgggagggaggggaggggagccgtgcagcgctgccgggggtgggggccgccgctgccgaccccgcgtgtcgccgtcgccattgttggttcccgccacctgagggagagagcgctggtggtgagggagctgagggagaggacaggcagacaacgtaagaggtccacctgcaaaaataaagtgtgcctcctgcacggcgccagatcagcgacgggacatggcaggcattcactggttgtcgaggtgaccgtggcgcagaacggcagcaacaattattggacgattgttgttgccttggccgcagcgcccaagagcaagaagaaggcaaggttgtcctacactatccgtatcggggaggggacgtacatcgagtggcggagccatcgggggtgccagagggagccagcatcaccatatccagtagcggagccatcggggcacctcctgcacggcaccagattagcggcggcgcacggcaggcgttcgctggttgtcaaggtgaccgtgtcgcacaacggcagtggcgattacaggacgattgctattgccttggccgcaacacccaagagcaagaagaaggcaagattgtcctacactatccgtatcgggtag

SEQ ID NO: 41500 - DNA, 223 bp, Oryza sativa
  unsure (1)..(223): unsure at all n locations
  Clone ID: PAT_MRT4530_44839C.1
ytagcngcggcgaatttaatagcttattcgtccaacaaaatacagtaaataaatcttacaactnggacaatgacaatgttgttncacccactcangcagcgaccaaaactnccaactacttcttctccgatgcnngcgacggtgcgcagtgcgangaagggatgctgttcgagatcaaggtcgcccacgtcncggcttccgtcttccttgcncacyntttttt

SEQ ID NO: 41501 - DNA, 237 bp, Oryza sativa
  Clone ID: PAT_MRT4530_4483C.1
ctcttttttttttttgggatccatgattattcatccgagtactttaatacccattcccaaattgaagatgaatatctgaacaacaaacaatcatccccataaccttatttcaagatatgaacaacacatacaaattctcaagataaaaaatacatgatttaacatgaacaaatcacccgagtaattcattatcatcgcctatcccactgcttctgcttctggtccgctaggaacaac

SEQ ID NO: 41502 - DNA, 2185 bp, Oryza sativa
  Clone ID: PAT_MRT4530_44840C.1
cccggtcgccccgcgtccggaggaccccacccaaaatcacacgcgccaaccagatcaaacccacctcgcaggagaagagaagcgatctacctctcctcgaggtggtggtgaggatttggagttgaattgtggggagggggacctcgcgggtgttgccggtttggagcccaagatagggttatgagctgcttcgcggaccgccgctgctacgccgccagccgccgccaggacggcctcctcgtgttcatgttcttcatctcgattcccatacgtactagtagcagtagtagtaataattgtaattccagtagtagtattagtagtaatctcctgtaagcggagttcctcctcgcggctgcgtgtacggggacgggaggaccttcttcctcttcgtgttcatcttcttcttcttcttcctctcttccttcggcttcggcgctggcggctatggatcccaatagcctcaaaactggaggcctcttgcttccgaccattgagaggcaatgtgcttcgcctccatccgtcatcgtgatcggtgggggaatttcaggggttgcagcagcccgtgctctctccaatgcttcgtttgaggtgactgttttggagtccagagatcgcgtaggcggtcgtgtccataccgattactctttcggatgcccaattgatatgggagcctcatggctccacggcgtttgtaatgagaactccttggcaccattgattggctatcttgggctgaaattatatcgcactagtggcgacaactctgttctgtatgatcatgatttagaaagttatgcactctttgataaggctggccatcaggtctcaaaggagacagttgctaaagttgaagaaacatttgaaagaattcttgatgagacagttaaagtgcgtgatgagcaggaacatgacatgccccttctacaggcgatttcacttgttcttgagaggcacccccatctgaagttacaagggatagatgatcaagtcttgcaatggtgtgtctgtcggcttgaggcatggtttgctgcagatgctgatgaaatatctctgaaaaactgggatcaggagcatgttcttaccggtggccatggtctgatggtgaacggatactatcctataattcaggctcttgcacaaggtctagatatccggcttaatcaaagggtaaccaaaattgcccgccaattcaatggagtgacagttaccactgaagatggaacaagttactctgccgatgcttgcatcattacagtaccgctcggtgtgctcaaggcaaacataatcaagttcgagcctgagttgccctcatggaagagctctgcaatcgcagaccttggtgtcggtatcgagaacaagatcgccatgcacttcgatacagtcttctggcctaatgttgaggtgctgggaatggttggcccaacgcctaaagcatgtgggtacttcctgaacctccacaaggccaccggcaatccggtcctcgtctacatggccgccggtagatttgctcaagaagtggaaaaactgtcagacaaggaggccgttgatctggtcatgtctcacctgaagaaaatgctacctgacgccactgaacctacgaagtatttggtttcacgctggggttctgacccgaactcgctgggttcctactcgtgcgacctggtcgggaagccggccgacgtgtcggcgcggttcgccgcaccggtggagaacctctacttcgccggcgaggcggccagcgccgaccactcggggtccgtccacggcgcctactcgtcggggatcgccgccgccgatgagtgccggaagcgcatcctgatgcagaagggcatccctgacctcgtccaggtcaaggcctacgaggagatggccggagtcattgctccccttcagatttgcaggacctgaaaaaaactgaacctgctccaccctgccattgtcatggaatctggattgattcaattgccatgcctatgccctggaatcttgatgattcaatcactcatacaagttcaagttcatgtaggggattaactgcatgaatcaaaattattaattaataattatgtaattgtcatgttattattgaataaataaatcgagatcatgcttgagatctttgtacaaaaaaaaaaaaaaaaaaaaaaaaaaaggggggcctgcagcccggggatccactagt

SEQ ID NO: 41503 - DNA, 487 bp, Oryza sativa
  Clone ID: PAT_MRT4530_44841C.1
atttcatccaattaaggtttggattgtggatgcaatcatcttgatactcatgcaaccaatgcatgttagttgatttatttcacctgtttgtatgaatcagtttcttttatcgcgcaggatttaattgtccatgcattcttaatttggcacaagcattgacacatgataacttggtttgcctgatttttatgattggcaacactctaatcatggaaaccaattcaatatacactagctttcatgcaggtaactagctattaatgcatgtgttctacaatttggtcttgggttctaaattgggagaattattaagaaccactcggttatctcttcagggccagtaacacttctagactcactagaaatagatatattatctcttcacggcactactgtgttcttttctaattgagcatctaaaatagaagaaattatgcctatgtaccttttctatatacagtgaaataggttttgatagcaaaaatat

SEQ ID NO: 41504 - DNA, 1786 bp, Oryza sativa
  Clone ID: PAT_MRT4530_44842C.1
cgccgagtgagagtgacgcgtcgcgacgccatggcagaagacttcggcgccttcatggagaggttcgtgctgccgccgccgccgccgccgtcgtcgcagcaactccccctgcacggcctcaccttcgccatcaaggacatcttcgacatcgccggccgcgtcaccgggttcggcaacccggactgggcgaggacccacgcgcccgccgccgccacctcccccgtcgtcctcgccgcgctcgccgccggcgccaccagcctcggcaccaccatcatggacgagatggcatacagcatctatggcgagaacgcgcactacggcacgccggccaacccgtgcgcccccggcagagtccccggcggatcctccagtggctccgccgtcgccgtcgccgccaacctcgtcgacttctccctcggcaccgacaccggcggcagcgtcagggtgcccgctgcctactgcggcatcttcggcctccgcacctcccatggcctcgtttccgctcaaaacgtcatccccatggcgcaaatgtttgatactgttggctggttttccagagatttatctacgttgtctcgtgtaaccaaagtgttgttgccacttcctgatgacactgtcaagcacccaactcatgtcacaattcccatggactgtttccaaatcttagggtctcttgatgaccctacatatcaaatcatcaatgcttcagtagcaaagaaatttggtagtcaggcaatagacaataccaaccttggagacttcatctctgacaatgttccaagcatagggaagttcatcgctgacttctctgaaagcgaactaccttctgtgccagctctctccgtcatttcacatgtcatgctcagccttcagaggtctcagttcaaagcaaaccatgcagagtgggttaacactgtaaaacctaacctaggccctggattacgagagaacatacatggggccgttgcatcaggggatgatgaacccctggaggaatttctagccgtaagggccgaattcaagtctgcacttgctgctcttctcaaggatcatggaatccttgcgattcctacggttcctggccctccaccaatggtgggcattcaggcgcaggctgctcctctggataattaccaagcaagagcattttcccttctcgacatcgctgtagtatccgggttttgccaggtgagtattccactgggcaagcgcaatggtcttcctgtgtcagtttcgctggtggcacgacatggcgcagaccatttcctcctcaatgtggctgaggagctgtaccagacgctcatagacgaagccgctaaagcttgggcctcctgaatcctccagcccgatttcatctgtatatacctactaatacaaagtctaaacacgtattatattgcatatatggaataatggaaatggggtgatacaatccacccaatgtaaacttgcatatgcatatatacatgaactagctgatacctcgcactttgctgcgaaatacgtggatgaatgtatgttatacataagataaatgtatatgtttaaataatgtgaaaatgatgtggaaattaaaatactccccaaaataaaaactagtgagtcatgtaatttaaaatactttagataataattgctagtggctgatgatgtgacacacttgcacgttaagttttagaagtttgggtgtatgaaaatatagatatatgtgtttgcactccacagacatgttatttggattaaagcttttgtatgtttttccagtgaaaaaaaaaaaaaaaaaaaa

SEQ ID NO: 41505 - DNA, 498 bp, Oryza sativa
  Clone ID: PAT_MRT4530_44843C.1
atggcgggcgcctcgctcaccccaagccgaactggagcccagagcagccaccggaagcgcaaggtccccgcggccgctgccgccgccccggcccgggaggacgaggcggctgaggaggaggacatggaggagctggagcgggaggtggaccgtctgggccgccgcctcctccagcaccgccgcgaagacgccgcccgcctcctcaacgccgccgcctcccgcctcaccgccctccgcccccgcctcctcgtgtcagatgctgacaacattatgtacattgcagaagttacaactgcatcgcagcatattgctggaacaccagttgcgaaagttgaccaagagaagaaggaaaaactaaggatcgtcaaggccaaaagtgaggcgaatattggggctatgcccatggtgttgaagagaatcggtgaatctatcgcaaagatcgagaagcttgagcatttgaatgtgaatatccatcccgttttcaaaactaaacggtag

SEQ ID NO: 41506 - DNA, 462 bp, Oryza sativa
  Clone ID: PAT_MRT4530_44844C.1
atgccggagcacctcgtcgtcgatggcttggccatgaccacgttggcgtccatccagagcttcttaatagataccaagcagtttgcattcggccggaacatccttgattcctcgacggcggcagcagcagcagaaatttttcaccatcgcgaggaggcgacggcgctcggtggggagggacgaagtcagcgtcggctgcagccaccgcaggtgctcgaacagcagcgcatccacggcgaccgccaccgcgccgacgcgggtccgccgcccagccgccgcgagcaggtgccgcaccggcccagcctcgagaacggctgggtcgacagggaacaatcacctctcccccttcgtcgtccccacttccaccctgatcacatccgccgcctcggaggcggaggcggaggcggaggagtcgaggcgctagtgcccgccgcggcgggatgcggagcggaggaagtgtag

SEQ ID NO: 41507 - DNA, 281 bp, Oryza sativa
  Clone ID: PAT_MRT4530_44845C.1
gaaggcaaatgcattggcagaggcgacatgagcgagccatggtaaccagcggaaagcaggcggcgggcgcccgggccgtctggggtggattgggaaccaccggaaacggacgcgcgagtgaccttcgtattgctcatgtaataagagagctgatgaatggcggcactgtacagcaataaagagcttggggaagacagaagcgaggaccctgatcatggaaagagggcacaagctttaaaagagctcttcttgcctagtttgcgggactatgtcaagacaat

SEQ ID NO: 41508 - DNA, 189 bp, Oryza sativa
  unsure (1)..(189): unsure at all n locations
  Clone ID: PAT_MRT4530_44846C.1
aagacgagaagacgacaccgacgacacgatcgagacagcgacagtcagacgaccgacgacttaagcggacaaggtcagccgacgatagacagacgtactcagaccacacattncacgcagcgtccgactcactagcntcntactcacaacagcgacaccaatccatcacgacatcatcgtcacaccgat

SEQ ID NO: 41509 - DNA, 344 bp, Oryza sativa
  unsure (1)..(344): unsure at all n locations
  Clone ID: PAT_MRT4530_44847C.1
gagtaggagttttttttttttttttttttttttttttttttnnnngnngggggggttgggggggggnggtggattggggaaggggttgggggggatttattttttataaaagagaaaatggaaattggagagagacaaatgattagggatacatgcggtaaaaatgcatgtttgcatacattaaacttggggagggtaatgggntaataattggacacacccatgtggggttaataatattaggtgaaaacaaccgatcgatcgcgattgatgaccagccgagacgacgacatgatcgattgatcgattaggcacccaaggcgaaacactccgggggggggggg

SEQ ID NO: 41510 - DNA, 140 bp, Oryza sativa
  Clone ID: PAT_MRT4530_44848C.1
atggccgagaaaccaccgctgtcgccatcctcagctagaaacgtcgtgcccatcgatccagaaaaattcacacctgatcaaaagaaagatttcgacgcgatgatgcagcaggcacgggatcagttcttgaactcattcat

SEQ ID NO: 41511 - DNA, 492 bp, Oryza sativa
  Clone ID: PAT_MRT4530_44849C.1
atggcagccatgcctctcctcgccttcgcctgcccttccacgcgcggcgtgtcgcttcaagactctagcagaaagtaccgcagtagctgctgtcggccgaaggggattgaggattggggagggggattgctggattgggtgttgggggaatcgatggaggtggatgagatggggaaattttggtctagggttacacaaaacaagcccaatggcccgcgggcactggagttcgccaacttcgcgaagccaatgggaggcaccgccatcaacacggggagctcgccacggttcgacgtgttcggcaaagacttcgggtgggggaggccggcgaccgtgcggagcggcggcacggacaagttcgacggtaaggtgacggtgtacgaggggccgaccggcgccgggagcatgtcgctggaggtttgcctgactccggtggcgctagcgaagctcgtcgctgatgaggagttcatggacgcggtgaccgcgccgtga

SEQ ID NO: 41512 - DNA, 328 bp, Oryza sativa
  Clone ID: PAT_MRT4530_4484C.1
gcagccatcaccggcatgagagcctccacctcgcgcggccatgcttgctctgaggggagccagggtggcacacctacggtacgctttcgccgctgtgggtgccacctccacgccctcgttttccgggttctcgcgccgcctcccgcttcttgcctccgcggccctgttgcctctgccgggatgcatatgcttcttctccggtttcgccgtcaggagggataggtaccgtccaatgcatccagtatgcggcgctgttttgaggttcgatccagaccaccaggggggcatggtgtgcggttgctactgttcccagggagggcaaggagat

SEQ ID NO: 41513 - DNA, 514 bp, Oryza sativa
  unsure (1)..(514): unsure at all n locations
  Clone ID: PAT_MRT4530_44850C.1
ctctctctcattctctctctctctctctctctctctctctgccccttttcccccacctacacgccacattctctctccctctcctccccccattgcggctaccaaatgctcctccagatttgctccaaggtatgctatgtttttatgtatgcatctgtagcacccatgtcctctccttttccctctccttgttctttgtagcagtgtgtgtagcctgcccatgtcatggcatgccaagggaaggcagaaagaattgcacaaaacaacagagaggcaggcaggcaggcagatgatggtcttgatcatcagctggatttagttagttttgtgtgtcatactataataatacacacatgggatgatagctaattcaattaggggagtacttgcttgtatgcacatctccatgtgtatgtttggtgtgtgtgcatgcatgctngcatatgcagcaaacacacacaaagnttggttatttatttgcttatttgctcctggnggtcagcctgaactggct

SEQ ID NO: 41514 - DNA, 3133 bp, Oryza sativa
  Clone ID: PAT_MRT4530_44851C.1
ttagttctcttcttttgacgacaggtccaagagatcttctgcctccctcataatctacttttttttttttttttttttactcggtaatctactatagcattatatatcatcaggtccacgttacattctaccactcacactctcatctcatctcatcactcatctcactcttatctttcagcttgcatcgcaggtgcaaggaggaaggcaagagactagcgaagcactctcacagccacaggacacatggtgaattgcacagataaacaaaatgctagcacaccagcgaagcccggagcgagtgcgtcgtcgacaggttggtgcaggacgcccaccgtatcaccgactcggcgaccgccacatccaggtgctcgcgctcgccggcgccgatggtgtggttcctcctgctgttcatgccgatggcgcgcgacgggttcgcccttacggcggccctcaggacctccgctgtcctcggagccgaggacgagacgagggccaccaccgtcgcgtcgcagtgagctttctcgcccaaggcgtcaccatcaggcgacgactcaggctcgccgggttcttggccgcagaagaaggagaagctcggcatggaagcgaccggggacgggaacacggcgttgcagggttcgcagacgccaccgaaggagaaccccgagagcgcgcacgacggagcattctcggcgacaaatgcagagaacgatgatctgcaggcgaatgtgggggagcacgcttcttcagacatgctttggcaggcgaccgggccaccggtgttgaagctcacatcgcggctgcatgacgccagcggcgtcgagaacgaacccatggaatcaacttcccatgttgccagcgcctttacattatgattacaaaagtcgattccagggacaaggccctcaacccaaattgactctgtattacttgatttaggattatcattgccactgatattcttagctgtaatggcagtcccagttcccttgagaccactatatgccttcagtaacagaatttctctgttggtatgaaaaattttcagggccaagaaaggtcctatgcgatgttcctctctctgaggggcactgagactagaatcaccacaatcatcaccaatgttggcccgcttttcgtctagtgattccggaaaaacataaaaacgaggcaatggtatattcaatgctcgagtccagaatattgagtttgcccaaaggaagtcttcgaaccgcacttcaattgagcttcctgattcatcgacgtttaagagctccccaaccagacctttaaccttattatcgaataaggtttgcaatgacttcctctgcatcacggttgcccggtgaagtgtggtcccttccaactcagcaagctcatcttcggtgaaccaaatggagcttccgaaggtgcttggaagcatatccaaatacggcttccagagggagctagggcggagtcgctcgaccatgaggaagagcatgacgaggaggcggtcgtcgacgccaccttcctcgaagagcgcgcggcaccgcggcccgacgagcgggtcctgcagcacccgcatcggagtgatggcgagatcgagcggcaccaccatcaccacctcgtcggtggcgccggcctcggcggcggtggagaagacgccgtagccctcgcggccgcagcggcggatcgtgcagccgcggaggtcggcgccgttggccagcgaagcccggagcgagtgcgtcgtcgacaggttggtgcaggacgcccaccgtatcaccgactcggcgaccgccacatccaggtgctcgcgctcgccggcgccgatggtgtggttcctcctgctgttcatgccgatggcgcgcgacgggttcgcccttacggcggccctcaggacctccgctgtcctcggagccgaggacgagacgagggccaccaccgtcgcgtcgcagtgagctttctcgcccaaggcgtcaccatcaggcgacgactcaggctcgccgggttcttggccgcagaagaaggagaagctcggcatggaagcgaccggggacgggaacacggcgttgcagggttcgcagacgccaccgaaggagaaccccgagagcgcgcacgacggagcattctcagcgacaaatgcagagaacgatgatatcgcggctgcatgacgccagcggcgtcgagaacgaacatgagccggcgtcctctcctctgagattgatctcatggcaatgtccacaagaatcttgggattggtcggcatgatcttgtatccaggaatgctctgcttggctgtgagcctctgtcgaggatcgcgccgcagcatctcggttattagctccttcgctgaatcggaaaccttgtcccagggatcagaaggaaaccgcagctcagtcgacctgatacattcgaaaatctttgatttggttttcccccaaaatggggggatgccactcaggaggatgtaaagtatcacacccgcgctccatacatcggcagcctcattgtacccaccggcgagcacctcgggcgcaatgtaaaatggactacccaccatgccactcaagctccgaccaggctggatgtaggttgcgaggccgaaatcggcgagcttgatcggcgaagaaggcgatttgctgacaaggaggatgttctcgggcttgaggtcccggtgcacgatccccttgctatggcaatgcgccacgacctccatgaggtagcggaagagcgcggcggcctcgtgctcggagaagcagccgcgctcctcgaggcggtggaagagctccccgccggcgcagagctccatgaccaggtgcacggacgcctcgtcctcgtacacggccttgaggtcaacgacgttggggtggcccgagaggcgcgccatgacctcgatctcgagcttgacccccctcacgtcgtcgggggacacgaggcggtccttggcgatggacttgcaggcgagcgcctcgccggtgaccatgtcggagcacgaccggatcacgccgaactggccccacccgagctggggccccagcgcgtagcgatcctcgaggcacgacacgtgcgccgcctccagtatggcgccgcgtagccccgccgccttgtacgagttgtacttggcgtcgccgccgccgccagcggcggccat

SEQ ID NO: 41515 - DNA, 1584 bp, Oryza sativa
  Clone ID: PAT_MRT4530_44852C.1
ccaagatcgagatcgccggagatgaaggcgccgccgccgccgtcgccggtggccaagagggcgcgcgtctcgccgttcgtcttcctgctcgtgctcttcctcctcctcttctccttcctctacggcgaagacctcaaggagctcctcggcagccaagctcaagcgcggccgagcctccacttcaatgccgccgccgccggtgatgggatcgagctgccggccgccacggcggcgacgaccgaggggaggacgacgacgaggaggtggcgggggcggctgccgttcgcggcgaacggcgacggcgaggaggaggaggaggagtgtgacgtgttctcggggaggtgggtgcgcgacgaggcggcgcggccgctgtaccgggaggcggactgcccctacatcccggcgcagctggcgtgcgaggcgcacgggcggccggagacggcgtaccagcggtggcggtggcagccgcgcggctgcgccctcccggcgttcgacgcggcggcgatgctggacaggctgcgcgggaagcgcgtgatgttcgtcggcgactcgctggggcgcgggcagttcacgtcgctggtgtgcctcctcctcgccgccgtccccgaccccgccgcgaggtcgttcgccacgtcgcccgaccagcagcgctcggtgttcaccgccgcggcgtacaacgccaccgtggagttctactgggcgccgttcctcctccagtccaacgccgacaacgccgccgtccaccgcatctccgaccgcatggtccgccgcggcagcatcggccaccacggccgccactgggagggcgccgacgtcatcgtcttcaacacctacctctggtggtgcaccggcctccagttccgaatcctggaggacgggccgttcgacgccggcggcaactcgtcgacgacgacgtgggtgtcgacggaggaggcgtacgcgatggcgttccgggagatgctgcagtgggcgagggagcacatggacttcgcgacgacgcgagtcttcttcacgagcatgtcgccgacgcacggcaagagccaggactggggcggcggcgagccggggggcaactgctacggcgagacggagatgatcggcgacgccgcgtactggggctccgacagccggcgcggggtgatgcgggcgatcggcgaggtgctcgacggcgatggcgccgacgtgccggtgacgttcctgaacgtgacgcagctgtcgctgtaccgcaaggacgcgcacacgtcggtgtacaagaagcagtggacgccgccgacgccggagcagctcgccgaccccaagacctacgccgactgcgtccactggtgcctccccggcctgcaggacacgtggaacgagctcctctacaccaagctcttctacccttgaaaataattaaaaaaacaactagaagcttctagaacaatccatgtaggagtattatgtaatgtatgcatgcaggcatgcagctaggccgcggcatctagctaacactggttcaatatttcggaaagaaaaaaaaaggtaaaaaaatccttccatgaatctagagaacaccctttgacttcaaaaaaaaaaaaaaaaaaa

SEQ ID NO: 41516 - DNA, 576 bp, Oryza sativa
  Clone ID: PAT_MRT4530_44853C.1
gaatgtatcaggtcgactgagctgcggtttccttctgatccctgggacaaggtttccgattcagcgaaggagctaataaccgagatgctgcggcgcgatcctcgacagaggctcacagccaagcaggtcctagagcattcctggatacaagatcatgccgaccaatcccaagattcttgtggacattgccatgagatcaatctcagaggagaggacgccggctcatgttcgttctcgacgccgctggcgtcatgcagccgcgatgtgagcttcaacaccggtggcccggtcgcctgccaaagcatgtctgaagaagcgtgctcccccacattcgcctgcagatcatcgttctctgcatttgtcgctgagaatgctccgtcgtgcgcgctctcggggttctcccttcggtggcgtctgcgaaccctgcaacgccgtgttcccgtccccggtcgcttccatgccgagcttctccttcttctgcggccaagaacccggcgagcctgagtcgtcgccctgatggtgacgccttgggcgagaaagctcatgcgacgccgaaccggtggtggccctcgtctc

SEQ ID NO: 41517 - DNA, 1150 bp, Oryza sativa
  Clone ID: PAT_MRT4530_44854C.1
ggccgcgttttttttttttttttttttggttaaaaactctaatattattactccacacgaatgtgcgcgtacattgcttagctagtactcacatctttattcccagttataacatgctaaggctacattttatagccttgattattcatccactgcacgctgaaacatccacagacacataatacgttgaacattaatacgtacgtacgtgatgtgtttgcaacttttgcatgcgcacatcaccatgtacgtgcaactaaccatggatgcttagcggtgcacaacgatcttggtgtacttggtcatgtcagtggtggcgctgcgtgcgctggtggcgagcgggaagtagaagggatagatctcgtagcgcaccctgcagctactgtagttaatctgacatccctgttgtgcgccgcagtattgaccgaaccttgacaccgccgttgacagacactgtgcgcaagccagcggtgacaagtcctgtgtgcactgtgccagcccgtagatgttgatgaacggcgtgtactgatccttcgtcctacccagcccaccactcccagcctgtgatgcctgcgacgttgccttgcccataaccttccctaccgccttctggaacgccttgccgttatccatcgcctgcacgttcacaagaatcaccccggcatctgtgtccgtctgcccgatgaagttctcgttctcgaaccgcatgaagcagtagtcataccatattcttgagtcggattggtagttgcagctggtgaggatctggttggcggcggaggcgaggcaggcctggcagtcgctggtggagacgtcgccgcggcattgcgcgagaccgtagatgacgttgttggctttcccggcggaggacgtggcgaagccgccgccggtggagcccttggcgacgaggtcggtgaggacggagttgatgcttgccacggccttgctgttgccggccaagctgttccctgaacagtagctgccaatggagtccatggccatgctcagtgggagcaaggcaaatgacatgagcaccaagcaacggcaagctttgctactgaatgccatcattatgatcactcaagctcactctcactctcactgtcactgctgtgtatcacacctagctagttagaagtgtgcctcgtgc

SEQ ID NO: 41518 - DNA, 422 bp, Oryza sativa
  Clone ID: PAT_MRT4530_44855C.1
attcatggttgttgacgctagcactgaaaaacacttcaccgtgaatttactgaaaaacagactacaactgccgtttgggagttccctgttttgaaaaacacaatctgctacaacgctgataattttccaaataatgcggtaccggtggagaaactccctccggcccaaaagcacatacattaacctggtgatcaacctaggaaagatcacatcccctcttaatcttaacccctcttaattctttttgaggcggggggagaactggtgaaaaataccgatgaccttttttgcctactgacatagttgttcaaccattggcacacactgcttccccttatttacaaagttggaatttgcaaacaaggctcccgtatccatgccgatttccaactagcagaggttccaaacaaacatttttttgg

SEQ ID NO: 41519 - DNA, 129 bp, Oryza sativa
  Clone ID: PAT_MRT4530_44856C.1
atgaccatctcgtgcgcaaccctcgtcatcgccggctccaccacaacaccatctaatcatcacggcgcctctccatctcaagattcaaatgataagataaacagtgagatttttgctgtcatcggctag

SEQ ID NO: 41520 - DNA, 292 bp, Oryza sativa
  Clone ID: PAT_MRT4530_44857C.1
cacacaccactgcatatgcttagctcttctagttggagtgagagagcatcaaaagggagttgtgcatgatgacgatccggaacatatgcgtggggagccaccagtaggtgtactacccgggtgtactcaaggccgagttggcctagttcatgttcaccctcatctttgtgttcgtcgggcagggctacggcatggtctttagcaagctgaccggcgggagagcgaccaccctcgcctgtctgatcgcctagtccgtggtccacatctgttcactgttcatagtatttgcttc

SEQ ID NO: 41521 - DNA, 1779 bp, Oryza sativa
  Clone ID: PAT_MRT4530_44858C.1
ttttttttttttttttttttttttttttttttttttgacaaaattttactatttatgttttatatatatatgaacaaatagcctgtgcaagttgcacggtgtaacgtatgggttattgactagtattacataatccatgacctgtaatacgctaacactacaacaatggtcaaaacagacattgccatacaggcacatggccttaaaaagaagcaaggaaagggagctttacattcaatggtgtggttcgctcatcatcatcaatatatcctcattgatcagcttctcatccggtggtgtcatttacacaagaacaccagccatggtgaatggcaatggtgccataacactatcatatactgtatatatctatctaccacggcttcaggtcttcccgggtcccctcggtccagttgagcaccttctgcccgggcttgaggaacacatccctgccatggggcagcttcctcgccagcgcgttcatcacctggtggaagccatccccgggctccgcaggctgcgggaacagcatggtctgcttcatcgacggctccgcgagcatcgcctgcttccggaggatcacctccgttggtatggaggtcaggatggtgtccagctgcgggacatcgtcctcggccacgaacacggcgatctcctcccacgggatcgcgtcggagaaggggaggacgatgtcgtctgcgatgatcaccgggatgcagccgaacaccacggcctccaccagacgagggctccatggcgcccagcccagcgggcacaggcagaagactgcacgctgcatgtcctcgtagtaggtttgggggtggtccgtagagatgtcgaacatcgggttgttcttgaagttctcccacaccgatgcacgggcgccccttgcatagtaaccaccctcaggatcattcgaagtatcatagaacaaaccacggaagtagacaaagattgaccgaggagtctctggtggaacaagatgagctctgatcttgtgagcaggagtatacggcgggactgtgatggagccatccttgagacacgcatggttcttctgcccaaacgtctgcaccagcgtagcacggcgcagcaccggaaggatgcctcgctcaatagccttcgcctcctggaagtagaagcacgctgcaaagtcatgtggcacaacgaagaaatgatccgcaccctccgttctgttccagtagggccagtacttggagatgaacttgatcgcacttctcatcatgcgtggagacttggtggtcaggggatggccccatggcgtgaggtcgcatgtggtgtacactggagtgtagaaccaatcggcttcgtccggattcgaagtccggatcgcactcgacagcaggaagcgatgcatgaagatctctgtggcaaacatgtggctgaggcatctggaatctttcgccacaatgttcttgttgtacttggggggcagctcgtagacatacaccttcagctttccaacaggatcgtctttgatccgctcgatgccctgagcggccgcggctgcgacgccggaagaacaggcgaagagaagaagcacggcgagcggcatggccagcggcggccgcgctcgcgctcgcgcactcctcctcctcgtccccatgagctagtcgtcgtcaacgcctcgatcggtgtctggatcggggagggagatggaggctcgagtttggggggagggagaggtagtagaggagggaggtggtgggattattctttaccaggagaaggcatgggagaattcagaatagaatagtt

SEQ ID NO: 41522 - DNA, 588 bp, Oryza sativa
  Clone ID: PAT_MRT4530_44859C.1
atgccacgtcgtcactccctctctctctttcccttcctctccctttctcctctttctctctcttcacttttctccagcgggcatgggcggcgggggcggccgcagcggcgacgctctgggagcagcggggaaggtggaaggggaggaggggtcgacccggaggtgctgcggtcgctgctggtcacggtgtacagccacagcatggcggcggcggcggcggcggtgaaggaggaggacgacagcatcgagtgcgcggtgtgcctcgcggagctcgaggagggcgacgaggccaggttcctcccccgcgtcgggagaggaaggaggagctgcggcgccacctcgccgaggacgccgactggccccgcgccgatggctgctccttccacgaggctgccggggcgaggcgggagaggaggaggcggcaggcgacgaggcggcggcggcggctgcgaggcgggagaaggcgagggcggcggcgaggctacggtcctcgaggtacttgacgatgtcagcgagccactgggaggcgatgccgcagttgtcggagaggaagtggagcgcctccttgaagcgggacatcacggcgag

SEQ ID NO: 41523 - DNA, 303 bp, Oryza sativa
  Clone ID: PAT_MRT4530_4485C.1
atgaagatttacgtgaaaacatgtggaacattacatgaacatctgttggccggcgggcagggtggcgacgggcaagaacggagggagacaaggtcgccgctgccgctcggagggaggcgacgtcgccgccttgggtgcctcttgtgctgctttgacggcgggaaagacggggaagggaagggagaggagctggggcagtgcgcagcgagggcgctgcggacgacgtcgctgtgggtgcgggaccacggcgtggagctgcccgagatggtggtgcaggcggggaggcggcggaggaagccgcat

SEQ ID NO: 41524 - DNA, 345 bp, Oryza sativa
  Clone ID: PAT_MRT4530_44860C.1
atgggagtggaactagccggcggcgcggcgtcgtggcgcgagcttgtcgtcgccgaatatgccattgggacgcgaattttcttcattctacgccactccgtccgccgacgtcagtcctcctcgtcgtccgtccgtctgccgccacctgcgccccgtccaaccgccggcaccgccgcgttcttgtccgtccgccggcgccacccacgtgccaccgccctcgtcatgctcggcgtcctctgccactcgctgtcgctcatgctcagcatcgtcatgctcatcgcctacctcttcttccaactcaagacgcatcgccagctgtttgagccccaacaggttcgtgattga

SEQ ID NO: 41525 - DNA, 456 bp, Oryza sativa
  Clone ID: PAT_MRT4530_44861C.1
atgacaccggcatccaattcgtatgcccccgcgcgcatcatcgtcatcatcccagtactggctcatcatcttgagcgatcactaaatcatcctcaacctgattaccatttggttggatggatcgaacgtacaggacatgcatcggatcgatcaatcacgaacctgttggggctcaaacagctggcgatgcgtcttgagttggaagaagaggtaggcgatgagcatgacgatgctgcaggcacacgacaggtcgagggcggcgtcgccggagacgatggcgtgctcgccggaggtgacgcatacctgagcatgagcgacagcgagtggcagaggacgccgagcatgacgagggcggtggcacgtgggtggcgccggcggacggacaagaacgcggcggtgccggcggttggacggggcgcaggtggcggcagacggacggacgacgaggaggactga

SEQ ID NO: 41526 - DNA, 197 bp, Oryza sativa
  Clone ID: PAT_MRT4530_44862C.1
atgggggttgttccttttattattaaagaagatcttggagcacaacgatggggaaaaaaaataacactaatgcaggttcataaaaaaagattattgttttcggtcaaaaaaaaaattaaacatgacctgcctcgaggattaacccgataattttgaaccgggacctgtaaggttaacaattttccttatagagggtt

SEQ ID NO: 41527 - DNA, 619 bp, Oryza sativa
  Clone ID: PAT_MRT4530_44863C.1
actagtggatccccggcccgggcacaaactccaaacccattactctcctcacgacattctcgcgctctcccctcctgtaaagatcggtggttgcgagcggcgtcacggtaaagcggagcaaattactcctatatattaccctgcagcgtagaccgatcgatcgggcggcggcggcggcgtatggctgggagcgcgaggtcggcggcagcgaagcacgcctaccggatgttcgcgccgtccaggggcgcagcggcgaggtgccccggaagccccggggcggacgagttcgacgagtcggacgtgtggggctcgtacggcgcggccggcgtggagtccagccccgccgagctaggcgcccggggccgcgcgatcccgtccgcccgcgccggccggaaggccccgctggatcgggccgccggctcgctgccggtgaacataccggactggcagaagattcttggggtcgagtacagggatcaccaggccgctgctgcggagtgggagctccagggcgacggcgacgacgactacgagtacggcaaggtggccggcgtcggcggcgtggtgataccgccgcacgagctggcgtggcgcggccgcgcggcgtcgctgtcggtgc

SEQ ID NO: 41528 - DNA, 1006 bp, Oryza sativa
  unsure (1)..(1006): unsure at all n locations
  Clone ID: PAT_MRT4530_44864C.1
cacaaacgatgggttcgaggagcaagatcagcctgaagctgctggtggacagcaagtcgaagaaggtgctgttcgcggaggccggcaaggagttcgtcgacttcgtcttcagcctcctgacgctgccggtcggcgccgtcgtgaagctcatctcggcggggacgatgcagggcagcatcgggcggctgtaccagagcgtcgagcacatcaacgcctcctacctcctccccaacaaggaccgcgccgacctgctccagcccaaggtgctccacccggacgcccgcgagctcctgctgctgcagccggagagcggcggcgccgggggatcgccgctggccaggtttaagctgtacacctgcgcggggcactgcaccacggccgccatggaggccaaggcggcgtgcccgcagtgcaagcaggcgatggacaccgaggtggcgctcgtgctgccgtccgcgtcgtcgccggcgcagtcgtcggcggcggcgtcgggaggcgacggggagagcagcgggtacgtgaaggggctcgtgacgtacatggtgacggacgggctggaggtgacgcccatgtcggccatctccagcatcactctcatcaacaagttcagcgtcggcaaagacgtcgagcttgccgagaagtacgtcagcatcgccatggacgaggggctgggcattctgaaggcggcgctgcgctctgacacggtgctctccgacgtcttcctcgccaagaagaagtgaaacaaccagtgctttttatcgatgccgcatggacgttcttcgatttgcttgctgcccatttcgccttattttgctccatgtctgcttcagaattcagtgtgtctgcctcgcatcaatgtttagttgctctgtattagtactggacatgatctatctatctactaatattatattggctttattacctaatcagcccaagaactccattttgctggctgtgttcnaaaaaaaaaaaaaaaaaaaaaaaaaaaaaaaaaaaaaaaaaa

SEQ ID NO: 41529 - DNA, 384 bp, Oryza sativa
  Clone ID: PAT_MRT4530_44865C.1
gctaatctcttttctctactctacttgcattacaccacctctgcattgcacttcagttcattcattccactgatgcatggatcgatgttgctaccttcttctcttctcctcatgcatccatgcatcgatctcacctagcttcttcctcatcctctctcgatcgattacaagagtaaagtgtttgctgttcttgctatcgatctacagttgagtaggttcttgttggagaagcagggtacgtgcaaaatgcacaccggttggtcgagctaattaacaagctctgacgaccatggtgatcgaatgcacgtgctccccttctccaccatggccttctcaccttcttcatcttcaccatctccactgattgatcgatctcaaaccaca

SEQ ID NO: 41530 - DNA, 469 bp, Oryza sativa
  Clone ID: PAT_MRT4530_44866C.1
aaaacatcaacctgaagaggatattgctttgggacctaattgctggatatgcaatcatatgcagaaagagcctatcatcaagagtgttgctgccactggctggtggtgcagatagcacatctgatgcatcaataatatggtgcatgtgcccccttgtcactgaagatatatagattggccatgaactagttaaagcggatgctatgcggatagcccagacagggatggacacttccctatagatcgcatatagctcagcaaaccgttaataatacactgtatacatggggactgactataaatgtccaggtaccacatcacgatcaaaaatgcctgctcaatatatcggttcattacactggtacgatccacttgattatatgatctacgcattagctgtcttgtgtgcatgattgactgggaaacgccctccgtacaaagatgaatggggttgcagcactgaaaatgt

SEQ ID NO: 41531 - DNA, 209 bp, Oryza sativa
  Clone ID: PAT_MRT4530_44867C.1
acgcgtccgccacgcgtccgccacgcgtccgtaccgaacacggcacgttctcggatcacgtgacggcggacccgtcacgctgtcgtacagcagctgagctggcgtcgggatctaacaagtctacagcccgagcagcgaggacggtgagcgggggtgatgggacaagtgcgtgacggcggaggcgcgctgcggcgggaaggagcgcagat

SEQ ID NO: 41532 - DNA, 300 bp, Oryza sativa
  Clone ID: PAT_MRT4530_44868C.1
atgaggaggagaggcggtgcattggagtatggcgggtacaagaggtacgtgtggcgcgtgctgaagcaggtgcaccctgacttgggcgcctccgcccaaaccatggacgttctcgacatgatgatggccgacatgttcgagcgcctcgccgacgaggcctctcgcctcttcaagctctccggccgccttaccctcaccttccgtgaggttcagtccgccgtccgcctcgtcctccccgccgacctcgccaaccacgccatctccgagggcaccaaggccatctctaactacctttcctaa

SEQ ID NO: 41533 - DNA, 183 bp, Oryza sativa
  Clone ID: PAT_MRT4530_44869C.1
atgcatcttcaagacgccaaggagaaaaaccaggtgtccaggaatactctgaacacgccaggtgccccgggagccgaggacgccctcgggtgtgccatcgccgtcgccgcttccgcctacgggcgcagccgcaaccatcaccatcgatgttgcagcctgcaagtcacggccaccgtcgtctag

SEQ ID NO: 41534 - DNA, 2828 bp, Oryza sativa
  Clone ID: PAT_MRT4530_4486C.1
atggcgtcacgcggcggcgacggcctcgtcggaggagggcgcgggcccctcggtgggcgggacggtagagggcgcggcccggccggtgggcgaggcggcggaaggggaggcggccacccgcagcagcagcagcagcagcagccgggctacggccgcggcgacgggggcggccgtggtcctgcccctgctgctggtggtgtcgttggtcgaggaactggaggcggcggcggcggcgggcgcggggacggcggacgcggccgtggccgtggcggcggcggcggagatggcgttcgccctgctatggccgcggctccggcggcgtcgactcctggtccggttgctgttgctgctcggagtactcctcctcctactcccgcggtccagatccccgcggtggcgtcgtcgtcgtcagcgcagccagcggcggcggcgcagcctcctccggcagccgcggcggtttctgccctcgcgagggacgttgggaggcagctggctgtcgtggcgggcggcggccgccccgctccccccgcggcgccgccggcgcccatcccggtgtcgagcaagggcgtcgcgccaccgtcgcggccggggttcgggacggtgggggagaggatcgtggtgcgcgcgaaccatttcctcgtccgcgtctccgacaacgacatgatctacctctacgacgtgagtttgagtcccccaccaaagaccaggcgcatcaacagggtagtgatgtctgagctggccaggttgcaccgtgagtcgcatctcggtggcataagcttcgcgtacgacggaagcaaggccctgtacactgcaggaaaactgccgttcgactccatggacttcaagatcaagctgggcaaagagctcagggaaatctatgtcatcgtttctcggtcgttctactccactatgttcggccgacaagacattggtgatgggctggaatgctggaaaggatactatcagagcctgcgcccaactcagatgggactctcattgaacatagacatatcctctaccccattcttcaaacctatcagcgtggtagaatatgtcaagaattgtctgggcacacctactaatgctaatggccctgaccctaggcggcctctttctgacattgatcgcctgaaggttaagaaagcactacggggagttcgtgttgaaacaacacaccaggggaagagcagcaagtacaagatcactacgattacatctgagccactgagtcagctgaacttttctatggatggaactacccagactgttattcagtacttctcgcagcggtacaaatacaggctgcagtacacgtcttggccctgtctgcaatccggcaacccttctaaccctatatatttgccaatggaggtatgcaccattgtagaagggcaaagatactccaagaagctcaatgacaaacaagtgactggcctcctgagagcaacatgccagcctccccagaaaagggagcagaaaatcattgagatggttcaacacaacaactacccggctgataaggtgctgagataccatgactctggaaaggagaaaacttgtaatcccagagttgggcaatggaatatgatcaataagaaaatggttggtggagctgtggttcaaaagtggacttgcgtgaatttttcacgcatgcatattgatgccgtgcacagactatgcggcgaactagtttatacatgcaatgctattggcatggttttcaatgaaatgccagagatagaggtggggtcagctgctcctaataacatcgaagctgccctgagcaacattcacacaagggctcctcaactccagctgctcattgtgattctcccagatgttaatgggtattatggaagaattaagagggtgtgtgagactgaacttgggatagtatcccagtgcctcaagccaggccgcaagctcttgagcttagacaggcagttcctggaaaatgtctcactcaaaatcaatgtcaaggtggtggcctccatggactggcctgagatcaccaagtacaaagccctcgtctctgcccagccacctcggcaggagattatacaagatctcttcaccatgactgaagttgcgcagaatgctgatgctccagcacagaaggctgaaggttcgaagaagaatttcatatgcggcggaatgttcagggagttgcttatgtcattctacagtaagaatgctaaacgtaagcctcaaaggataatattttacagggatggtgtaagtgatggacaattccttcatgttctgctctatgagatggacgcaatcaagaaggctattgcatctttggacccagcatacaggcccctggtgacatttgtggttgtccagaagaggcaccacacaaggctcttccctgaggtgcatggaaggcaagatctgacggacagaagtggaaatgttcgtccaggaaccgtggttgacactaacatttgccaccctagtgagttcgacttctacctgtgcagccatgccggaatccagggaacaagcagaccaacccactaccacgttctccatgacgagaaccgttttagtgccgatcagctgcagatgctcacttacaatttgtgttacacctacgctcgatgcacccggtctgtctctgttgtccctccagcctactacgctcacctggcagcattccgggcgaggtactacgatgagccccccgccatggacggagcttcgtcggtcggcagcggcggcaaccaggcggcggccggcggccagccaccggcggtgcgccgcctcccgcagatcaaggagaacgtcaaggacgtgatgttctactgctgatcgaatcggcg

SEQ ID NO: 41535 - DNA, 812 bp, Oryza sativa
  Clone ID: PAT_MRT4530_44870C.1
ccacccatctccctcaacttgctgccgctcgatggctactgtggccgtctctgggtgccaaaacaacggagtccaatggctgactcggttgaataaaagttggctccgcgccggtggagcctcgcggggcgcttgacgagcccggtcacctccacgatccttgtcgaccagtccggcttgggcacggcgccgtggttgcacacgtagtggactggcgtcggcgtgatgaaaccgtcaagcatgaggcacggcagcagcggctcggagttaaaggggtgcttgccggtgagccagacgagcaccgggtgccgacgcacccacgcgtcactgcgtcagaggtggcctcgtcgcatgggtcattgacgggaggctccacctcgaggcgcgagtggtacaactaccttcagtccggtggtatgtcgtcatcgtcgtcggagtcggtcttggagcccaaccgacggttgtcgccggtggatgggaacaagtcgatgttgctcgacgactcattgctcgccaccatggaacagcttgaccgtggagttccccgtcacgttggtttgcgcgggcaaccaacacaaggagcagaacatgtccaacaactcattcctcggttcctcgccttgacaattaacatagggaagggaaggaatcaactatcagtaagagggttagcagaagactccatagctctagctcaagtgacggacattgttgagataactgcatctcctccttgtgtgccctcaacagacaaccgttttgcgaaaggaaagtggattcagaccaacgaggacctgacttttatgtggtaa

SEQ ID NO: 41536 - DNA, 1446 bp, Oryza sativa
  Clone ID: PAT_MRT4530_44871C.1
tcagtcactctcacgcgtggagttcttcatcagtccatggctggcagtgtccagcaatagctgcgtctcgccgcgcagcaaacggcggagcaggcggagctgcacgcgctccggcaatgtcaggtcgtcgtccagcaccgccgccgcgagccttgcgtccacctccctccacgcggcgaccaacacgaggcgccgtcgtcccccacgctcgaggtcgagggtcgtcagaatcccggagccgagcgccgccgcgaccaccagctcgtcgaggagggctggcagctcaagctcggcgacggcgacagcgacagtagcgcggccgtgctgcttgccgtctcgccgccacgcctctgactccgcggcgtcgccgttgatggcgcagagcgccgcggcgagctcgtacggctgggagtccgacgggtctttctgcacggccgccttgtaccgccgcagcgcgtcgtcgaagtccccgtccctggcggcgaggaaggcgaggaggaggttgacgtcgaccgccgcgaggtcgtcgccctccgcctcggcgtcggcgagggcgcgctcggcggtggcgcgcgcctctcggagtcgctcgccgcagagcggccgcgctcggagcagcgacgcgagcatcgcttgggagcattccacgaggaacaccggctgcaggttgacgggcttgatttcgcggccaccggaggaaggcggcggcggcgtcgacttcggcctcgtgaagtacggaaaacggctgtacttggacacgaagaggcgtagtgcggtgagcagcaacgaaatggccagcttgtccgcgacggaccactcaccttgctcgaaattcttgacgagcacggcctcggcgagctgggtgtacagcggcgaggacccgggcatggcgaatacgacctcgaacgccaccctccatccggcgtcctctgggaggccgttgagccactcggccggggtccccatccggccgtgcaggaggcgcagcgcggcggaggtgatccgcaggtgggggtcgcctggtctgtccgcgaccagccgggcgacatcggcgagcgcttggtcgaatcggccgtcccgagcgtgtacgagtgccaggcccatctcgacccggtagacgaccgtggactccgcggccgctagtttcttggcatactcacggaggtacctgccggtgaaggtcggagcgcggagtgcaccggcggcgagcgcgtgggccgcgtcgaggaacaaggcgtccctgccgctgctgctgccggcgagggccgcgttgaggtcccgcagcccagggtgcgcgcggacgaggcccaggtgtccgcgggtggtggtggcggcgccgtcttgcggcggatgggagacgcggacggaaatccccgacagcttcgccgccacggccgccgtcccggccagtgccgcggcgagggcggcgcggcggagtctggacat

SEQ ID NO: 41537 - DNA, 203 bp, Oryza sativa
  Clone ID: PAT_MRT4530_44872C.1
ccattataattatgttcctgctgttggggaagtggcttcgccctcggaggcatgggaccgaggatcccccgtcgtccccattctcgtggctgattaaggagtcttacagtcttgctcctgggaagcccctcggagcccgccagccaccgggggagactagcgaaggtcccctttgcggagccctcgaggggctccaggagtaa

SEQ ID NO: 41538 - DNA, 6190 bp, Oryza sativa
  Clone ID: PAT_MRT4530_44873C.1
atgtattcagaagagggaaatgttatgatgatggttgaggctcaagacaaggtagagaatctgaagcaagaagggagaacagttcaagagtatgccagcgagttgcaacatttatgggcagatcttgatcattatgatcccctacaattaaagcatgatgatgatattgtgattggaaataaatggctgcaaaggagaagagtcattcattttttaaaggggttgaacaaggagtttgaggatagaagagcagctatgtttcaccaagctacattacctaatatggaggaagctatttcagccatggttcaggaggagatgaggcagaaagtgatgaaaggaagtaatcctgtgaggtctgcatacatcacaattaatgacagggagtgttataattgtgggttaaaggggcatgtgagctacaattgtccttctcctaggaacaataatggtcggggtgtagctcgtggaggagcacgtggtggctttggtggcttcaatgggagccgtggtggctatggtggctatgtaggagaccgaggtggccgaggaggtgaacgtggaggccgtggtggaagtcgaggtagaggcctaggtggtcctagggccaatgttgtcatgggggagagctcatctatcactctaacaggtgaacaagctgcacaatgggaagaatggcaaaagaataagggccccgtggactccaatcaacaaaattctgctaaagcaacaaccagccacttcggtaactttgccaactacgcccacacgggcgaaggtactcaggcacatgcacttgcatccacatatagacatcatgtagactggataatagattcaggtgcatcaaaacatgtcacaggcttgcctaataatttctcctcatactcccctattgctccctctgaaactatccaaattgctgatggttcatctcaactcattcatggtatagggtcagtagagtgcactccatctattagcttgtcatctgttttgcatgtcccttcctttccagtcaacctcctctctgttagttctatcattgatcaattcaagtgcatcgttatatttgatgagaattcatgtctcttccaggagaaggggactgggaggaggattgggactggagtcaggcgtaatgggctgtggtacatcaatcaagaggagatgggattggctgtagtagtgggagatactgagaaggagattattttgcttcattgtcaattaggacatccatctttcgagagtttgagtaagctgtatcctgacctctttaccaaagtggacaagagtagacttgtttgtgatgcttgtgagtttggcaaacatacacggtctacatatgctggaattggtcttcgtagttgtgaaccttttatattaatacattctgatgtttggggaccatgcccagttacttctgtgagtggattcgaatggtttgttacctttattgattgttatactcgtatgacttggatttacatgcttagacataagaatgaggtcattcgttgctttcaagacttccacaaattggttaccaatcagtttgatgcaagggttcggattattcgaactgacaatgggacggagtatattaatagtgagtttgtgtcatatgtctcagatcatggaattattcatcaaaccacttgtcctggagccccccctcaaaatggtgtagctgagaggaagaatcggcatttgctagaggtggctcggtcattaatgtttcaaatgaacgtacctaagtatctgtggagtgaggcagtgatgacagccgcataccttatcaaccgcatgccatccaggatacttggtatgaaatcaccagctgaacttttacttgggaagcgagaatttaaagttcccccaaaggtatttggttgtgtttgttttgtgagagatcatcgaccttttgttggcaagttggatcctcatgcagtaaaatgtgtctttgttggctatgcatctaaccagaaagaggagttctcaactgtcatcgagatcgacagtcgagagggggagatagttgaggttgatgcacataagcaaggtgatgaggatgtggttattgggtcaattccgagttttgttggtgatactattgagaaggttgtggacattggtgagaaggtagtagacattagttgtgacaaggatgagggggtagttgtcgggacaatcccatgtcctctggagcgtgtggaagtacaacaaactaaaatgagagtatatcaaagaaggaacaagaaccaagttgataaggtgacagggaaggagcaagtgcaccagaggagccaaattcagaatcagggggagagaagtggtgagcctatgcaagagcaagacaaggagtcacaacagctgcagcagtttgagtacccagtcccagattcctcctctagcctctctccaacaagttcctccctccttgagacaagtggtaacatttctcctacctttaaacaagtagagttacctcttgcacaacgtagagaaactagatctaatgctggaagacctcctatacgccttggttttgaacaccttagttctagacatgacattgcaaactatatctcatactctcatatttcacctgcatataaagcattcattgcatcattgcaaatagtgcctattccaaaggactggagatgtgcaaaacaagatccaagatggaaggatgcaatgaaggaggagttgcgtgcccttgaaaagaataagacatgggaacttgtgaaactaccaatggggaaaagagcagtgggatgtaaatgggtatttacagtgaagcaaacccctgaagggaaagtggatagatataaagcaagattagttgcaaaaggttatagtcaaacatatggaattgactatgatgaaacatttgcacctgtggctaagatgagtacggtgaggattttgatatcatgtgcagttaactttggatggcctcttcatcagttagatgtcaagaatgcttttctacatggtgatttacaagaggaggtatatatggagattccccctggatttggaaatagccagactgttgggaaggtatgtaggctcaagaagtccttgtacggtttgaaacaatccccacgtgcatggtttgacaggtttaggcgtgcattgtgcaatatgggatattcacaatgtaatggagatcacacagttttctatagacataggggggcacacatcactatcttggctgtttatgttgatgatatagtgatcactagagatgatgtagaagagatcaaatgcttaaagcagcgattaggagaggcctttgaggtgaaggatcttggacctcttcgatactttcttgggattgaggttgctcgatcatcaaaggggatagttctctctcaaagaaagtatgtccttgatttgttaacagaaaccggaatgcttggatgtcgtacaagtgctactcccattgataggaatcaccaattgagtgcacagtcaggtgatccagttgatagggaaacttatcagaggttggttggacgtttgatatatctatgccacacgagaccagatatctcttatgcggtgagtgtggttagtaggtatatgcatgatcctagaacaactcatctagaggtggttcataggatcttgaggtacttgaaaggaactcctggtaaggggttgtggtttagaaagaaccaacacttggatgtggaaggatattgtgatgctgattgggcaagcagtgtggatgatagaagatctacatcaggatattgtgtatttgtgggtggcaatgttgtctgttggcgaagcaagaagcaggcggtagtggctcgatctaccacggaagctgagtatagagccatggcattgagtttaagtgagatgttgtgggtgaagaatctattgttggagctacggttgttcagaaataatactgtggtgcttcattgtgacaacaaatctgctatcaacattgcaaacaatccagttcaacatgaccgcaccaaacatatcgaaattgataggttcttcatcaaagagaagatcgataatggggctcttagactacaatacattaaatcttctgagcagctagctgattgtttaaccaagggattaggtcctagtgagaaaaaaatccccaaaactgaactttactatctaaggattgtgaaagggtattttcaagaattaagtctatccaacatcatttcaagattttatcacttgaggatccttgatgtacggcaatgcagtggtcactttaatttaccgagtgatatgagtaaccttataaagctgcggcattttcttgacccaaatgattcttttcactctgccattgctaatgtgggaaagctgaaatgcttacaagaattaaagagatttgaagtcaaaggacaagctgaggcatttgcattaagacagatagggcagttggaagagctaaaaggatcactgtgcatttataatcttgaaaatgcacagacaggggaggaagcaaaccttttaaacaaaaggcacttacacaagttagagctgcttggcataccacagctagcaaaatgggttggaaatgatgcttcccatgtgttctccctgctagaggtgttcattataagagattgcccagaacttatggagttgccattttcacattcaacttgccctcgatcaggacaggagatgaacttgacccaattccctacactaagggagcttgaggttgtaaattgtccaaagctgtcatcatttcctcacattccttggacaagctctccatgtcgtgttcttattgatgaagtgggatcagattttcagcggttggattactcaaaaaataaccaatctgaattttgcttgaaagttgtgggaaaggatggccatctagatatgtcattctggaatgtattggcatttagtaatctaactgaactgaaagtgttgtatttgaagaaatgtcctcctttgccactgaaacatctcctagtgctatcatgtttgaggagtcccacgatacatgattcaagtaatgtcttgttgaatgttgaagctgagaacactgtcggctaccaatttcagattgagggtctcagtatcgatgactgtagctgtagcgggaaggaactgacgctgttgctgtctcttttccccaagctgtcaatgttttcattacaaggttgtgggaagataagagtgcttggtgtggcgaaggagcagacaatggcaatgtcagcattgtcgtcgtcaccttctggtcataagttggaggatgcacatataggacaggagcaggagcaggagcaactaagaggagaggatgagaaagcagcagctgatgcaggactgctgctcttgcctcaccaacttcaggatttgtacatagagaatatctcaaagctgatcctgcagtttgattctctcgtagatggcatggcaggaggcttaagaagcataggaggaggattacaaggcctgcacttcctaagaacactcactattcggggttgccccaatttcctctcctcctactactcgtcctccgtcgtctgtttgcttcccatttccatcctccctgcaatatctgcatcttgatggtgtgggaggcatggagactctggcgcctctctcaaacctcagctctctcaccagattaaccatacggaaatgtatggatttaagaggtgaggacgtgtcttctctcctcgcccatggccaactcacaaacctgaacatcttcgagacccccaaattcttcgtcgggtgtggctctgactccttgcggctgcagtgcctccaaacagatgacatcacaaaggtccttgccgcgcccatctgcagcctccttgcttcctcactcaccagcctaaccattagttggaacgacgaggtggagcgcttcacaaaggagcaaagcgcggcacttctgctcctctcctccctccaggaccttgaattttggtactgctcggagctgcagtccctccccactgggttacacagactcaccagcctcaagagattaaagatctggtcctgtccagccatccgttcgctgcccaagggcggccttccgagttcactggaagtactagatgtccgttctagcaacaacgaggagctcaaaaggcagtgccgcgacctgagaggaaccattccgatcatcaaagacagacgatactactaa

SEQ ID NO: 41539 - DNA, 968 bp, Oryza sativa
  Clone ID: PAT_MRT4530_44874C.1
gcacgagggcgttcctcccctctcctctccccttccctccatcgcatcttctcccgctccttcgatcccaaatcggccgccgccgccgctccgccatgtccccctcccgccccgacgaggcggaccccgccgccgacttcggctcccaccccaccgaccaagagctcgtcaccaaatacctacgccgccacgtcgactccggcgggaacccgtggcggtacgtccacgaggccgacgtgtacgccgccgatcccgacgacctcaccggcaagtactccccggccgtcgccagcgacgggtccagggcgtggtacttcttcaccaccgtgcggtccaagagcaccggcgggcagaggagggcgcgggccgtgggcgacggcgggtgctggcactccgaggccggcgccaaggacgtcgtcggaggcatccgcagcccccgcccgatagggcggcgccagttcttctcgttcgtcaacaaggagggcccccggcgggtgcggtcggggtggatcatggtcgagatcggcctcaaatacgcccagcagaacgcctcctccgacgagcttgttctgtgtaaggtgtaccggagcccgcgggcgccaccggctgccgccgccgccaacaaatccatggccgccccacctcccaccgccacgaaatccaagacggaggaggctacaccacctcccgatgacgtgaaaccggtggtggcggctgcgcagactcccgacaccaaaatactcagggcggcgaaggaggcggccgcgactggatgcaagaggaaggccgacgtgaagagctctggtgcaagaaggggcaagcggctctgctcccgctgccgggcggagacatcggaatcggacagcgagacggcggtacttgacaggtcgccgtccatcgaagacgaaacggcggactcttcagaaatccatggaagcagtgatggcaaattcatcaggttcttgtga

SEQ ID NO: 41540 - DNA, 740 bp, Oryza sativa
  Clone ID: PAT_MRT4530_44875C.1
accggtcttccagtttctattacgagaagtagcaacaaaccgtattacatataatttcgagtaataattaaaaaagtatatcaacatcctaaatcaaagctatttttaaacaaataatacttttttttaacatgattgacaaagtttccctcaaatatcctttttttttccctaaaaaaacatgattgacgaagcctgataaactgacatgtaaattcagggtttcaagtcttgatgaacaaacttatgatagtactggaaaaacctgaaagcatctgctttttttaacgagattgcttccatccaccaaagtcctcaggaagaccacgctggcgaacatcctcaggagggaatgggaggccgactttgatttctccacaggaatggtcatccttcacaacattatacagaggtgggggaatactcccttcagtatacactggttccaaaggaatcgttgcttcaccaacaaagtcgtcgggtgagccagtatcactggccaagagcttgatcaacagctctgtagctttgtcagacacggggaagacaaagttttcgttccattcagggttacttcctttgccacaatccacatagcagaagttgcacatggcaatgcattcttttggtataattctaacagtcagatcgttccattcatccgcaatgcaccacaagactgatgctatgctgcttctctgctcctgtgaacggcacttgagaattgcatatggatccat

SEQ ID NO: 41541 - DNA, 211 bp, Oryza sativa
  unsure (1)..(211): unsure at all n locations
  Clone ID: PAT_MRT4530_44876C.1
ggcttctccaccccctattnacctanccctcctcggttcggtnccgtggttcgnctagggtttagtgggttganatngcggcgccggatgtcgagtaccgctgcttngtcggcggcctngctggncaccnacgaccgctccctcnaggccgcnttntccacctacggcnagatcctcnactccaagatcatcaacgacangaagacgggca

SEQ ID NO: 41542 - DNA, 434 bp, Oryza sativa
  Clone ID: PAT_MRT4530_44877C.1
ttttttttttttttttttttttttttttttttttttttttttttttttttttttttttttttttttttggggaacaaactttgggggaattttaattcggggaaaacggggcaaaaacattttggggcatgccattacccccaaagattttattcctaggtcttaaaaaggtctccgggcaaatgggccccattataccggaaccccgggtaacccagccctaaccggatttaggaggcatcggcttaaacgggctattgggtcgggcctttgggggacaaagtaaaatttgtgaccaagccttttaataggaccccagggcttaatcttaaagggatttgggggtcttccttaggagcaaaaaaccctcaaaaaccggggtcagggggagaaatttttaaattgccaactttggttgttcccctgcagcaagg

SEQ ID NO: 41543 - DNA, 1271 bp, Oryza sativa
  Clone ID: PAT_MRT4530_44879C.1
ctagtggatcccccgggctgcaggtcttagcccgcctcgccgcctacgtcccggcgcgcgcgcggccggccgtcgtacaaacccgcgccccctgcccccgccattgccgccggcggccacccatggacatcgacctcgaccgggcgcgcgccctgcgcgtcctcggccgaggcgccatgggcaccgtcttcctcgtcgaggcccggtacggcggcttccgctacgccctcaaggtgttcgacaagcggtccgccgcggcgaccaggcacgacgccgagcgccgcgcgcggtgggagctgtccgtgctctcccgcctcgcgcacccgcacctcccgtgcctcctcggctccgccgagacgcccggcctcctcgcgtgggccgtcccctactgccccggcggcgacctcaacgagctccgctacgcgctccccgaccgcgtcttctccccggcggcgatacgcttctacgtcgccgagatcgtgtccgcgctgtgcgagctccacgcgtcgggcgtggcgtaccgcgacctcaagcccgagaacgtgctcctccgcgccgacggccatgtcaccctcaccgacttcgacctctcccgcctcctccctcccaagacggcggcgccgtcgtccgcgtcgccgccgccgcgcatgttccagggcggcggccaccgcccgcgcgtctcggcgaggagcgagatccctctcttcagccatgccaccaagcccgacccctcgccgccggcggcgaacccgtcggcgaagcagcagctccagagcctggtccggttcatcatgaagggcgacaggagcgagctgtccaagaaggccaagtcggcgcgggtgtcgccggtgagccggaagccggcgagcttcgcgtcgtcgtgggggaagtcgttctcgttcgtgggcacggaggagtacgtggcgccggagatggtgaggggcgagggccacgggctcgccgtcgactggtgggccgtcggcgtgctcgcctacgagatggcgtacgggcggacgccgttcaagggcaagaaccggaaggagacgttccggaacgtgctcctcaaggacgtggagttcgccggcgacagccgccgccggctgccggagctcaccgacctcatctcgcggctgctggagagggaccccaggaagaggctggggtaccaaggcggcgccgacgaggtccgagctcacccgttattcagaaacagtggcgtaggacatgctcagcgtggtgtcccaaccgccctacatcccgccgccggctga

SEQ ID NO: 41544 - DNA, 1641 bp, Oryza sativa
  Clone ID: PAT_MRT4530_4487C.1
atggcgggaacgtcgacgatggcgccgtggtccgacctcccgtctgatctgctgggcctcgtcatcgcccgcctgcccttccccgccgaccgcgcgcgcttccgcgctgtgtgccgcgcctggcactccgccctgcgccgccacgtcgccgccccgccgcagctcccgtggatcgtgctcccggaaggcaccttcgtcacggtctccgacggcggcgtccaccgcatggctttccccgagagcaacaccgtctgcattggctccaccgacggctggctcgccctccaccgcaccgacaacgatgacgatgacagcgtcgatggcgccaggacgacgaagacgaggcacacgttcctcctgcacaaccctttcaccggcgccaccgtgccgctcgccgagctgggcgacatcctcgacgacgacttctttgaggagttcagagtctgcaaggtgatcatccggtcccaccccaatggcggcggtcacctcgtcgccgtcatgaccaaccactgggactgccctttgatcctgtgccagccagggaagggcatctggacgcctgattcttgcacgatgccattcgtccgtgtcgtcgacattgccttcttcgcggacaagctttatctaattacaaaagccgaggacctcttcgccgtcgacctcgccgacgacaaagacggcaagcccaccgtcaccagcgtcgagcgcatcatcagacaaccgagaagccctgatggcgtaatcgacgcgtttaggtggagcgacgatgaagacgacgacgacggcgacgcacaagacaatgacggtgacgcatcgaccaacgaccatgatgagtcattaaaccaagagggagacagcgagaacgatagcgaaattgagcccgtcggtgatgatggcatcgacgacgtcggccatcagtggcagtacctcaccggtgaggatctcatttggaagactacaaagtacgagttagagggggacgactacgcagttaacggtagctggcacctcctggagtcgtctggccggttgctcatggtgagacgggagtgtttaatcgcggccttcgtcaaggacgccgaccacacccgcagcgtggatgtctctaaggccgacatggacgccggcacatgggttccggtcaccggcggcggtctaggtggccaagcaatcttcctcagtgaactcttcaacaagtccatgcctgctcccgcacacggcgaggttttagaggacacgatgtatttcgtcgacacaccggacgtgtgggacttgaaatccggccggcgaatacgggtgcgcttcataaaggtgcataccaggttgtgcgccaaggctcaggcagcggccgagaagaaaatccgggatgagagggccaaagctcagaaggaggccgaggacaagaggcacaaggggggcagaggggagatcacgaggcttagaaggatgaccgtggaaggtggaagttcggcgctgcacggtgaacatgggcgggcagcaaggtgccagcaacaacgctggagtcacgaggatagaggagagcggttgatcggcgttggtggtggtgaaagattagagcttgtggttaggagacagcagctggtgatggcaaatccggtggcgaggagccatcaaagatga

SEQ ID NO: 41545 - DNA, 151 bp, Oryza sativa
  Clone ID: PAT_MRT4530_44880C.1
gggggcgaaccctgaatccctttgacatatttattcaagggcgaaattccaatagagcaagaagctttatggtaccattaatccaatcacgctgtaggcattgactcgatgagtttgatctagcatttcaaacttttgccagggccttcaa

SEQ ID NO: 41546 - DNA, 152 bp, Oryza sativa
  Clone ID: PAT_MRT4530_44881C.1
gttttattgccacagaaacaatgtgatgacccatgtattttgaccaaattgatcataccaatagtacaatactagtaggaatagagaaattacaaagatgtacatatgtgtaactagctatctgatataattatgaattagcttaaaagtta

SEQ ID NO: 41547 - DNA, 175 bp, Oryza sativa
  Clone ID: PAT_MRT4530_44882C.1
atggccggcggcgggcgatggtgggcgacggcgcgtgaggcgcctggggtggcggcggccatatctctcttgcgcacgctcgccgagccgtaccgccgcccttcttctcgatggccactattgtggaaaagatggatcaaactatttctagggaattataaccatagaaatgccg

SEQ ID NO: 41548 - DNA, 848 bp, Oryza sativa
  Clone ID: PAT_MRT4530_44883C.1
cccacgcgtccgcccacgcgtccgcggacgcgtgggctgaatttctttggccacaggcgacagccccaaaaccccgacaccccaccgccgaccacctcgccgccggcggcaccgctcccctttgccgccgtcggctctacctccttcccactctcccgtccttctcctagcctccctcctctctctctctctctcaatacctttttctacctttcatactaccttccatgttcttgttccgaatctgggttcccaagccgctgatgcgccccttccctgattcttctgatggaactaggggaggctgtgtggccatttttcccgttggagggtttcgtctagatctgtcgggtgtgggacatgcggattgcaggtgctgtcggttgtgttggcggcggcgggtcctgccgggatagttggccgccgacggccgcttggctgttgggttgcacggtgtgtgctggctggtagcgaggatggttttagggtgttgggcgaaagctctgtccgactcatagccggcctgacggcgatgaacgtccttggacatcatgcaatgcccccccttgaggcgtcgtcgcaagagcatctccagtagagaccctaaatacaattcctaaacagtttttaggtgctaaggacaaaaaataaactccagcaaaacccatactacaggtcctaaaataggaaggacctcaaatacccctccgcagtccctaggcctgggggctgtagaccgaggccctatcgccgtttttctacgcgggaggaaatttcctgacgtgtggtgtctgtcttccctcccgcggaatcgctgccacggcgccgatcttcgccagctcgctggt

SEQ ID NO: 41549 - DNA, 1236 bp, Oryza sativa
  Clone ID: PAT_MRT4530_44884C.1
atggcctccacctcgaggcggtggtggtggtggccgtgggcgacgccgccgcccttctcctcctccgcctcgcggcaccacaagggggaggggtgggggctgggcgggcccgcgctggtgaaggccgtcgggtggctcctcctcgccggcctcctcttccgtgtgctctgctccttcccctcctccacctcttcgccggagatcagcgaagaacctattgaagtgtaccatgacaaggaatacagaaacaggagatggcacttccaatcatacaacttcaccgtgtcactcgtctggagtcccttcctcaccaaatctgaggtatttgaaaatgagaatgggcaatccacctctgaaatccagcttcaccttgacatacttgacccaatctggacaagtcagtatgagaccttcgactatgttgttattgccggtggacaatggtttctcaaggtcgcggtctactgggagaatgatagggtgataggctgccattactgtcaggacaagaagttacgtgaacttggatttgaacacctctatcgcaggactctgcaacaaatcttcagattcattgcatcttcaaaccacaaaccagctgttctcttcaggacttgggcacccgatcacttcgagaacgcggaatggttcaacgggggaacttgtagccgggttttgccttacaagaagggagagtacagcggaaaagacatggatcgtatcatgagaccaattgaacttgaggagttcaggaatgccatggcggcactaggtggttcgcggaactctgcgaatctgaagctcttggatacctacagcatttcgtccatgagacctgatggccatgttgggccttacaggtatccattcctgaaagggccagaagatgaggacgatggtgccgccgagcttgctagatccggcatggggctcggcggatctggccttgagggtggtggagtaagaaaaagctggatgacggcatcaccgagctcgccagttccgccgagagcaccgacttcatttcccgccaccatcttcccttctcctcacatgtgtctctccccaggttgccaccaacgccccgtcgagctcgtggtggtgaccttgcttacaacggccactcgttggatgcctgtcaccgcctacatgtgttgtggaggcgtcgcatggggccacaccctctcccaacgcactgctcgagtcgtgcctcgtcgcgccctaacaaatccctga

SEQ ID NO: 41550 - DNA, 1266 bp, Oryza sativa
  Clone ID: PAT_MRT4530_44885C.1
atggcctccacctcgaggcggtggtggtggtggccgtgggcgacgccgccgcccttctcctcctccgcctcgcggcaccacaagggggaggggtgggggctgggcgggcccgcgctggtgaaggccgtcgggtggctcctcctcgccggcctcctcttccgtgtgctctgctccttcccctcctccacctcttcgccggagatcagcgaagggaaatgtaacctttttgatggtgaatggataccaaatccctctggcccagcctataccaacaaaacttgtcgatttattgatggtcaccagaactgtatgttgaatggtagacctgacatgtcatatttacactggaggtggaaaccatatgagtgtgaactgccacaatttgatgaagtgagatttctaagtgctatgaggaacaaatcctggggtctgattggtgactccattcttcgtaatcaagttcagtcactgctttgccttttgtctaaggctgaagaacctattgaagtgtaccatgacaaggaatacagaaacaggagatggcacttccaatcatacaacttcaccgtgtcactcgtctggagtcccttcctcaccaaatctgaggtatttgaaaatgagaatgggcaatccacctctgaaatccagcttcaccttgacatacttgacccaatctggacaagtcagtatgagaccttcgactatgttgttattgccggtggacaatggtttctcaaggtcgcggtctactgggagaatgatagggtgataggctgccattactgtcaggacaagaagttacgtgaacttggatttgaacacctctatcgcaggactctgcaacaaatcttcagattcattgcatcttcaaaccacaaaccagctgttctcttcaggacttgggcacccgatcacttcgagaacgcggaatggttcaacgggggaacttgtagccgggttttgccttacaagaagggagagtacagcggaaaagacatggatcgtatcatgagaccaattgaacttgaggagttcaggaatgccatggcggcactaggtggttcgcggaactctgcgaatctgaagctcttggatacctacagcatttcgtccatgagacctgatggccatgttgggccttacaggtatccattcctgaaaggtgacaaggatgccaaatcagttcagaatgattgcctgcattggtgtgtaccaggccctatcgacgcttggaatgatctcgttatgaagatggtattgggctga

SEQ ID NO: 41551 - DNA, 1677 bp, Oryza sativa
  Clone ID: PAT_MRT4530_44886C.1
atgctcctcctcgccggcctcctccgccgcgcccgcccgccgcgccgcccctccgtccgccgcctctccggcctcctcgaccgctacggcttcgtgccacccgcctccctcaccccgcactccgcctccgacgacggcggcgccaagaagcggcgccccaagaagcccccctaccggccaccctcctcgctggaccgcggcggccgccccgccgcgcgctccgacctccccttcgacttccggttcagctacaccgagagctccccgggggacaagcccatcgggctccgcgagcccaagtactccccgtttggccccggccgcctcgaccgcccatggacgggcctctgcgcccccgccgtcgacaccacgctccgcgacgcccacgccgacgacccggcccccgccgccgagagggagctcgaggaggcgcgccgccgcgagcgggagcgcgtgctcggcgagccgctcacccccgccgagcgcgccttcttggttagcaagtgccagaagagccgcaccaagaagcagatcaatctcgggagagatgggctcactcacaacatgctaaatgacatacataatcactggaagaacgacgaggcggtcagggtgaaatgcctcggcgtgccgacggttgatatgcagaatgtgtgccatcagcttgaggataaaactggtggccttatcatccacaggcatggtggtcagttgatattgtacaggggacggcattataatccaaagaaaagacctgttattccgttaatgctgtggaagccagctgaacctgtatacccgaggctaattaaaacaacaatagaaggactgacagttgaggagacaaaggaaatgaggaagaaaggcctatatgttcctgttttgacgaagctagccaagaatgggtattacgctagtcttgttccaatggttcgggatgcctttttgactgatgagttggtccggatagattctaaaggattgccaaaaagtgattatcggaaaattggagtcaagctcagggaccttgttccttgcataattgtctcttttgacaaagagcagattattgtttggaggggaaaggattataatggaaccatacaggataatacacagaagacatctgtttcagttctcgaagaagagagtgcaggagctgagagcgagaacggtgatcaggaacaagcatcaagcgactgggcttctgatgagtgctctcagttgagtagctctgatgaaatgccagatgacaaatcagctatttctgaggcagactctgattagatcaatcggatattcagaatccgcagcatgtagttcgcaaactgtcactagatattcagaagttggcatgcgaacatttcatgtgagactacgatcaagcgtgtttttagtcaccgatggctaaataacttcgttcatctcgatattctgagtttctgacattagttggtttggattgaagattcacatgaaacagttttgcttgagactctagtcagttggttattggaagagtgagatattggtcttgtttggcttaacaccaagaagatgccacgatggagctctgaacaaaaatatatacaattctcatatgacattttataagaacatcttgttaagcctattgaacaacagtgctatccagcatttcctggcaatcgatattct

SEQ ID NO: 41552 - DNA, 731 bp, Oryza sativa
  unsure (1)..(731): unsure at all n locations
  Clone ID: PAT_MRT4530_44887C.1
ccggccgggaggttcctcctcatcttcttctctcctcttatccccttcgccttcctcctccccgcctacacgaccagttcctggtttctgctgccttccctcggtctggatcaacaagaggaggtcgtccaatggcgagtggtgggagcagcaatgccgggagcctgacgcagtggctgagggagaaggggttcgacgaggaggccatcgggcggatgtcgagacggtgcaagaaccttcacggccttgacgccggcgaggcctccggggtgtgggactacctcctgaacgtcgtcaagatcgagcggcggaagctccggtacgtggtcaccaagtgccccaaggtgctcaccctgtccgtcgacgacaagctcgtccccacggtgcagtgcctcaccacgctgcaggctaagcccggcgaggttgcgcaggccattgtcaagttcccccagatactgttccacagcgtggaggagaagctctgccctctcctcgccttcttccagacgcttggcatctctgagaagcagctcgccaagctgctcatggtcaacccgcgcctcatcagctacagcattgaggccaagttctcgcagaccgtcgacttcctcgtcggccttggcattgacaaggagggtatgatcggcaagatcatggcanaggagccctacatcatgggttacagtgttgacaagcgccttcgtcctactgccgagttcctcaagtcggcg

SEQ ID NO: 41553 - DNA, 774 bp, Oryza sativa
  Clone ID: PAT_MRT4530_44888C.1
tgtggctgatactgtaaatactcatggtctgttgtcagacaacaaagtcacatctgtactgatggcaattcgaaaagcccttgaggtgcaggtggaagaaagctcatcaagagaactctgcatactgactactttagcccgtagcgaacctcctctgtgggaggaagcactgaatagaataaaagttatccgagaactggaacttcttggggttgatgatgccaggagaaagctctacccatctgctgaagagtccctgaagcacttgctatggttaaccgaaccagaagctgtttttaatgctgctttgggactgtatgatctgaatctttctgctatagtagctttaaattcccaaaaagatccaaaagagttccttccttttctcaagagtcttgaatgccttcctcctgctattatgaagtacacagttgatttaagactcggaagatatgaaagtgctctcaagaacattgtttctgctggcgacgagtatcatgaggactgtatgaaactcctcaacgctaaccctcaattgttccctttggggctccagttattcactgacccagataaaaggcatcaaattcttgaggcatggggtgatcaactttctgaagagaaatgctttgcagatgctgcaataacttatcaatgctgttcgtcgtatcagaaatctttgaaggcgtatcgtgattgtggggattggagaggtgtgttcactgttgcaggtcttctgaagtttaaaaaggaagaaattcttcaactagcaca

SEQ ID NO: 41554 - DNA, 714 bp, Oryza sativa
  unsure (1)..(714): unsure at all n locations
  Clone ID: PAT_MRT4530_44889C.1
agagaaaaactctatgcttcttaagaaaattattatgagatgtatttcttacaagaaggtcttctttatatagaactagaaaaaagtaaacgaggaaataagaaaataaagaaaagtaaaattctatgaagaaatagtaaaacaatagaaattaacataataaagaagaaaaggaaataatgtattggatctatgcgagtgtccttagccaaccaagtaaaccaagaaggccaacatcaagtactcgtgatttcttctcaagcccaatatcagcagctacccgatgagcacacatcactcctgaaaaagccacagctataactccctggccaggaaaacaactatcccccacgcagtatagaccatctatagccgttgtattgaatggcatgcctaataaacctttcggggttcctctaggcattggcccataagttcccttatccctcgcaagaaatcgtctgtgtgttcttggtgttcccacctccttgaacgtaatagatgaactgagccctggaaacaattttttctctagtctctggattattctagctgccacatcttcctttttcgcctcatactcttttggagggagtccctcccaatcctcaatggacgaagttgtaaatatgtgaagtatatgtcgaccatctggagccaaagatgaatcaagaatggttggaatgctgangaaaatactgccataaggctcct

SEQ ID NO: 41555 - DNA, 144 bp, Oryza sativa
  Clone ID: PAT_MRT4530_4488C.1
atggccgacaccggatacagatgccaggtgatcgaaagtgtgggcaacgccttcggcacgctggccttcacctgtgccaccgtcgtcctctctatttttgctaatttttttgcacgtctcctggagaacgacaacatgacctaa

SEQ ID NO: 41556 - DNA, 333 bp, Oryza sativa
  Clone ID: PAT_MRT4530_44890C.1
aggaacctcatcagcaaaagaaggttagaaggcggcaatgcgacgccggcacggacgcacggcagggaaacagagccaacgagccagccaaccacgggtcttggtatctccatctcgggctctcagctggcatctccggttcccgcgccgacggccggtggcggcatcatgacagcgagcgggagcggatttgtgcagcgtgagccatgggctatgacagcaggtggcggcgaccagcgatccaacgatgagaggtggagcggtggacagccagacaagcagagaggagccgcccgacgatctggcattgctggctctatggctcgccgttga

SEQ ID NO: 41557 - DNA, 444 bp, Oryza sativa
  Clone ID: PAT_MRT4530_44891C.1
ctgcaggaattcggcacgaggttcaaaggggctaagctgaagtggcaacacaaatgcactaaaaatgaaaagatttggactttaagcttatgtctcacaaaagaaaatgccatgtttgtgtgttttttcttttattcttctggctgttggctgtgaaatatgcctgtagtgtctatgcattccatccgtatgataattgctaacattatggatgattttgtatctatgcaagcttacaaagttctgttacattctggcatcagggaactatgtcacacttgagttttactcttaaacaacttttagtggtgtcaaacaagtgaaaacaatggctatgatacagtttatataacatgaatacatgatatgcaacacttagtaaaaatatgctcttatttagtgattcccccactttgttttgtcacccggactcacgcttttgtt

SEQ ID NO: 41558 - DNA, 360 bp, Oryza sativa
  Clone ID: PAT_MRT4530_44892C.1
atgtcatggcacagggccggtgtcctgctgctaggggctcagtcctgcctacctgtcccgggggttccggccgtaggtggggttgggaaaaagagattattgcgtcagcggactcggctcacggtggaccgggtgcacggcagcggttcacagaaacgaacggccgagatcgatctatccaaaacggacggccaagatttaatggtctacgaccggtctacggcggacggtgtcgatgacgtcagcggtgacgtcatcaccggcgacggctcggacggcgcatcctcgccggcgaacaacggcacggcgacgcgaacggaggacacctacgggttgcgggcaacacggcgaactcactag

SEQ ID NO: 41559 - DNA, 499 bp, Oryza sativa
  Clone ID: PAT_MRT4530_44893C.1
cccgggctgcaggaattcggcacgaaagtcaagaaacccaaataacagatatggctgttgatcgacctataggagataggtgtcttgtgagcaactcgggtgatgtctctacagctcttagaaagctaattgaccaaggaatggttaatgttggtgatatagaatcagaattgggtgtgtcttcagaatctttggaagctgctctcgtgcctgaaacatcgaccttctcccctggtctgaagttgaaaataatcaagttactgcaaaacaccattcgtgtaccttctgttcaagagaagtgttctaaagagggttctttggcactacaaggtactgtgtttacaggtgagagtaagagcttaactgatacacaaatttgctcagaactggaggaaggcatctcttcgtttgatcattgctgtccagagggcgataatactaacaaagactgggctgattcagtagaaaatggtttccacaattgtggtgaagattgcat

SEQ ID NO: 41560 - DNA, 347 bp, Oryza sativa
  Clone ID: PAT_MRT4530_44894C.1
ctacacaccagacaatatatacaagcgaaacatgcaaattttgtatcaaatgacactgccacgttaaggtctcatctatcctagatttgtttgcaatgatcatggccaatagcaccaaagaggagatataacagttggatggtgtcgtgctgatattagtagtactacagacaatagttgtgttatgtatgcaatacggaacgtgcaaatagtttgagcttcaaagatggaagctaccatcttttacaacttgtgtgggcttagaatttcttgtcacactattcatttcaatatttctaaaaatatagacaagatagcaatactttgcgaccaaaaaaaaaaaaaaa

SEQ ID NO: 41561 - DNA, 199 bp, Oryza sativa
  unsure (1)..(199): unsure at all n locations
  Clone ID: PAT_MRT4530_44895C.1
catctctccatccattgctcgcagatggacaagatgatgctggagccagggcggcggnggtgtcgccggntgagtaccagtactactaccatggcggnaccggtgccggcggcctcgtngaccaggagatggccgtggccggcgccggcgacgtccgacgacgacggagncggtgctncccgatggagcttcttgangg

SEQ ID NO: 41562 - DNA, 754 bp, Oryza sativa
  Clone ID: PAT_MRT4530_44896C.1
cccgcgcacgctcgttcctccccattgacgatggggcaaggtcgacggcgatgggggcgatggagatgccgctctcccagtcgcgccgccgccggagtacgagatgccgttgatgatgtggggtgtgatccaggggaggaaggagtggtcgtctcccacgtgctcgcgccctacttcctccgaccccgccggcgagcccgaggccgtcgagctcccctcctacttcaaggtgctccaggagcggctcgacattgtactctacctcggcctctccaccgacgacctctcctcctacctgctcctcctcgcctgctccatccgcaagaacacctccgtcgttgtcgacctcacccccatcgtcaagtccctcctccggtgcacgttggtagatcgattgatctccacggcggcgcttcactaccaccacagccaccagatcaaggcgccgatgccgacttggctcatcgtgaaggctaccccgcagccgagggacggggccaagaagctggccgtggcagcgtactcggcgctcttgttgtcaccgtccgtgtggcagaaggcgcaggacgccaagaagagcaaggcggtcggcgtcgacgccgccctcccatcatcgccgaggatcacttgcatggggcaggtcaagggtaggccgaggagatgcttgggtgcgtgccgcagcgaccgtccggccgtgaggggtagctcaggtctactggagcggctcacgctggggctgttcgggcggcggtag

SEQ ID NO: 41563 - DNA, 346 bp, Oryza sativa
  unsure (1)..(346): unsure at all n locations
  Clone ID: PAT_MRT4530_44897C.1
cccacgcgtccgaaaaaaaaaaaaaaaaaaaaaaaaatgatattaaaaaaaaaaaaagaaaagaaaaaagggcagacgttttaanttttcaaattttactttcttccttatgcgaaccattatctttttttattgtgtcacctaaacccatttctttggccgctgttcacaatttacagactgggaaatcccaaatcctcccttcttaaaccttttgagtacattcttctttcccctgttggtgtgttgagttaataggtcagaacctatcgcccttcccaactttcgaaccattctttatggctaaatggcatagcgcccttgctcccgtttttttaagcgctta

SEQ ID NO: 41564 - DNA, 261 bp, Oryza sativa
  Clone ID: PAT_MRT4530_44898C.1
tgactaatatatgccacagtctccttgctgccatgccttgcgtcacatggtgcaaggtactaggcccttgatcggagatgcgcacagcgtgcctaatccgttctgcccaaacccggatccagcggtcatcctgctaagcaccgtttcctgccacatcacgtgcgctcaccttcaggtgtttgaccaccttcgaggcactctggactccttgcatattattcattcttgattggcagtcctttgaattttgttgatgtttgt

SEQ ID NO: 41565 - DNA, 225 bp, Oryza sativa
  Clone ID: PAT_MRT4530_44899C.1
atggtggggcgtcaggcgcgggaggcatcgcggtcactgggcggctcgccgtcgctagagcaacctgctgtggcccacccgcttgtggtggcggacctgaaggcatccctcctcctcaccgttcagtacaacgccaccaccaccgctgccatcgtcgccgcttgggccgccgacgaggaggaggatagcggcgccgaagtgcgaaaaatggtggaaattctgtga

SEQ ID NO: 41566 - DNA, 183 bp, Oryza sativa
  Clone ID: PAT_MRT4530_4489C.1
atggtgttcccgagcaacgcgcacccggggagggtggtggaaggcggagggagagagaggggtggccggaacagcggcgacaagagctcagctccggcgataagagaagagaagcggcgccgggtggcctcgtcggattggccgacgatggcggtttcgttggtcggcgacggctttcggtga

SEQ ID NO: 41567 - DNA, 1775 bp, Oryza sativa
  Clone ID: PAT_MRT4530_448C.1
tttttttttttttttttttttttttttttttttaacagataacctggtgtgttgaaattataatgtgagcaccaaaatatatagtaacagcattatgccagtaactccaattagtatcttaaagggtttcaggcaacacagtaaccactcaagcattcttatttcgtgttggggtattctagctagagaacaaggtgctaacctagcagaaaacattagttgccagcctgagagctggcaacttggcaagtgaacagatgtacaatactagctgattgtcttgacagaactatcacatggttcatagaaatgtcttcaccaacaccagacaggcctatctatgtgtccttccgtgcacttcaaaagcagccagggattagctctaagtgaaagctgtctcagtgctgcgcccactggatactcttgaggtcaatgcctgccttggccatctcatacagtggactcatgtcacgaagcttcttcacctgatgcacggtgagctcaattgctctgtcaacctcttcctcagtggtaaagcggccaatgccaaagcgaatggaggtgtgcgccatgtcctcttctacaccaagtgcccgcagcacataagagggctccaagctggcactagtgcaggcactgccactcgacacagccacctccttcaggcccatcagcaagctctccccctcaacatatgcaaatgacaaattcaggttaccagggtaccgatgctccatgcttccattgataacaatatcatcaacctgtccacggatgccatcaagaaggcgctgctgcagaaccgaggctctcctgtgatcatagtccatctctttagccgcaatttcgcaggcagcaccaaatccaacaacaagaggcgttggcactgttccactgcgaattccgcgttcctggccaccgccactcatctgcggctccacacgaatgcggggtcgacgacgcagatagagagcacccacgccctttggcccataaatcttgtgcgcagacaaagacatgagcccaatccccatttggttgacatcaatcgggatcttcccgagcgcctgggcagcatcagtatggaagggcacgcccttctccttgcagattcgaccaatctcctcgagtggctgcacgacgccgatctcgttgttgacggccatgacggagacgaggccggtgtcggggcggatggcgtcggcgagctgcgcgacgtcgacgaggccgtcggggcgcacggggaggtaggtgacctcgaagccttcctgctggaggtacctgcaggagtcgaggacgcacttgtgctcggtctgcgtggtgacgacgtggcggcggcggtcgcggtagaagcgcatgacgcccttgacggcgatgttgttgcactcggtggcgccggaggtgaagaagatctccctggggtcggcgccgacgagggaggcgacgcgggcgcgggcctcctcgacggcggcgtcggactcccagccgtagaggtgggtgcgggagtgggggttcccgtagcgggagaggtagaaggggagcatggcgtcgagcacccgcgggtcgacgggggtggtcgcctgcatgtccatgtacagcggccgccccgagatgcgcacgcccttgatggtcatcgcctcctcctccgccgccgccgccgccgcggcgggagcatcggccgtcacggcggccgtggagagcgcgcgggcgggggagagggagggggtggacccccggcggaggaggagcgggaggaggcggcgggagagcgccat

SEQ ID NO: 41568 - DNA, 1013 bp, Oryza sativa
  Clone ID: PAT_MRT4530_44900C.1
cccacgcgtccggaagaccaccacatccgcacgaaaaatctccgacgccacgacgctctctcgcctctcccggaatggaaacgttcgcgcggtggcgtccaccgccgccgccggcggcagctgggcgcgtgtcccttcgaccggcgtacgggaggcggagccgggccgccacggtctccccgcgcgcgttcggcggcggcgctgacttcgacggcttcgtgcggcgggcgtggcggggcgccaacgccggcgccgagcggctcgcgttcgaggtgcgccagaccgcgcagcgcctggacgggaggttctcgatatcgaggcgcctggccgaggccgcgcgcgccgcccgcgcgcgcgccgtcgagatcgacgccgagctcggcatcggccggcggtggcgctccttctccgtcgacttctcccgcaactggcccaggtataggagggagctgactgacttcatggccacacctattgggagagctttcactacgatctttttcatttggtttgcactgtcaggatggctattcagagttttcatttttggtacatttgtcctgccttttgctgcgccacttctccttgggacatttggtaatcgggtcgccattgaggggacatgcccagcgtgcaaacggaggtttgtgggttaccgcaaccaagtgattcggtgcatgaattgccaaaacatagtgtggcagccaaacaataggtcctctggacgagccagcagttcaagaagctcagggcctgatgttattgatgtggagtttgaggagaagtaagaacatgttgttacaacgtgcaccagcaacttagggaggggaagaatgagaagataggctggaagtttgtgatatgcgggtttgtacgtagttattcgtgcaattgtgtgttgtacattatgtgttctttgaaatttgaataaaacgaagcttcgccaaattaaagaactgcgcattacttgaaataaaaaaaaaaaacaaaaaaaaaaaaaaaaaaaaaaaaaa

SEQ ID NO: 41569 - DNA, 288 bp, Oryza sativa
  Clone ID: PAT_MRT4530_44901C.1
atgcccgcatccacggcacagaccgtcccgccctgctccacggccgctgatgtgcgcatcaagtttgtgatgtcgcacatcgtcttcctcctcgctacagccccacccttggccgggcagcgcagcaaggcagagccgctggagtactggagtccgatttggttgcaacagcgacaggggctggggctgagatggttccatgcatggatgctgcggatggaaggtccgggagatgtggaacgaagccacaaagcgcggcagggagtaatgccggccgagcgtgattga

SEQ ID NO: 41570 - DNA, 412 bp, Oryza sativa
  Clone ID: PAT_MRT4530_44902C.1
gcacgaggctacgcttgaggagctcaagtcctccgcgcctgggacttgaatgaccgagcgtgaaggcctgtcttgatgctcatttaggattcttggtatgattcgtagtggtagatgtttaggtgtttttgcagattttcgtccataaaagaatactgttgacttgtttgggcttggaactagcttattttatgtttctaattgtttacatgattatttagctttcacttcttgcctcctttcctataagataggtatatggttgtctctaagtggtatatttggggcggccagtaaggcatcctgatagaagggttggacacttcaaattaatttatgaggattacagattattgtaatttcacctaaaaaaaaaaaaaaaaaaaaaaaaaaaaaaaaaaaaaaaatcgag

SEQ ID NO: 41571 - DNA, 417 bp, Oryza sativa
  Clone ID: PAT_MRT4530_44903C.1
atgcccttgcccttgttgccgccggcccgccgccatcgccgacatccatgcatggaaccatctcagccccagcccctgtcgctgttgcaaccaaatcggactccagtactccagcggctctgccttgctgcgctgcccggctgtacagaactcctgtcctacgctctgcgtggtttgatttgtcgctccgacgacctcctccaatgtgcggccgatgctgctgcatcgaggagggaggcggcaggcggcgtgagctccatacccaagggtggggctgtagcgaggaggaagacgatgtgcgacatcacaaacttgatgcgcacatcagcggccgtggagcagggcgggacggtctgtgccgtggatgcgggcatggaaggaatcacgcggctggtcaaggatctcatctctctctaa

SEQ ID NO: 41572 - DNA, 281 bp, Oryza sativa
  Clone ID: PAT_MRT4530_44904C.1
tttggggtattttaagcagatggtatgtccccaacaccatgtcggattggtcttgcaacagccagtgcggtgccccccttgacatttacatggaaggggccatgtagtaacattccacgactcctaaatagagtgagagagtcacagacagaggggagcggaccaaacatattttaccggtagcaccatctttcaccatttgtggatgagcactggaattcacaggcctgtgggggttcttgctctaccacatcctgatgaggacaccaatgtggcaaggg

SEQ ID NO: 41573 - DNA, 800 bp, Oryza sativa
  Clone ID: PAT_MRT4530_44905C.1
taagtgcttacgaatttttttgtaacttttgtgttgaaaatttccattttctttgcatatatgaaaatgttgttgaatttcggtcaggaccgagaccgaatttgtctgtcctgacattttttgcattgaaattcggtcttcaattttcaaagaccgaaagaccgaagaccgagaccgaaattttcggttagaccgaatgcccacccctagttgtgtgcgcatgtttagtttagcatgagtggaagggtgtatgtgacatcctggcccaatttggattaggcctgtgtggctcatgtgagctgtgtgcgcatgtttagtaccaccccgtcgaataggctggctatgcggttctggagggacggctgttacactcccttcgtctgccggctctgctgcaagccgaggtagctccaggccctcgctcacacgcccttcatcatcgtctgtcgtcgcctcctgtgcacgagcccgcctcatgcgagcacggatccgccgtgcgtcattgccctgtgcgcccgtcaccatcgatgttttcgtcgtcgcctcacaccacagtaaagggagagtaacatcgacgcctcacaccacagtaaagggagagggcgctgaaaggagcttggggtagttgtagaggaggaagagtaacatcgacacaccacagtaaagggagagggcgctgaaaggagcttgggggtagttgtagatgaggaagagtaacatcgacgcctcacacctaaagggagagggcgctgaaatgagcttggggtagttgtagaggaggaagaataaagagtaaacat

SEQ ID NO: 41574 - DNA, 295 bp, Oryza sativa
  Clone ID: PAT_MRT4530_44908C.1
gtatttgagttggttttaagctcgttcacttttggcgatacataatgagtttataagaaatctcttaaaaaaactcgtatactaacttgagacgaacggactcttaactgcagctcatgattttctaaatatatatatatccaaatgaatttccacggtgaatttcatcttaactaaaccatataaaaataataaatttaaaataaccttcacccgttgcaacgcacgtgtattttttctagtgtatatatatatatatatatatatatgtgtgtgtgtgtgtgtgtgtgagaca

SEQ ID NO: 41575 - DNA, 685 bp, Oryza sativa
  Clone ID: PAT_MRT4530_44909C.1
ctagctagattcttcttcctcttcttctgaaggatcatcatcatcatctggattctggatggggaagaagatcacttcctgctccatcctccccgggagatgaccgtgagtcatggccatgtcggtctgcagatggcccctcactccggaagcctcggggatccgattcggatcccacagtgcgagaggagcaggacctaagcaggctccggatgatggccgcccggctccgggaaagctccgggaggtcatagcaccatgggctccggtaccaccaaaggtgactgggctccgaagcccagaggggttcccaaagtctggaaggagagctccggaggctaccttagggcgtgggagctccgaggggcccctaaagcccgatatgccggccggagcggatcatatctcatgtgctctcacaagacaagccaagaaccaggcgctagtggacgtgaataaatgcgtactacgcgccccaactaactctgacactgttgatggctgccaagcggagcacgctattacccaggggatgcctttacccgggttgggtaacactaggaaacttaaagaaataatctggaccggtgatcccgaagatcacaagaaaaacctctatgttcttaccacacttattgtcatttttcctgtggacaaatctacccattggttctggagccattag

SEQ ID NO: 41576 - DNA, 2350 bp, Oryza sativa
  Clone ID: PAT_MRT4530_4490C.1
acaggaattcagggagcttcaatctaaaatcaacaaaacataaagtagcatgctgtattctctagagatatcgggcagaattgagcaacaaaaatagctccagaaaaattcgtgaatggtagaactgaaactacagggataaaccacaatgatcagatggctacatggaagaggatgacatccaaaacaaagatccatgagcaatgttcctggacgataaacatagcaccacactaatctgccttagagcatatgtagctccttgctgacagcagcctacttttctttgttttcctcagattccttttggtataagaagtaaaatatttcaatctagcccagagttagagcccattaacgctttaatgtcatatgattccatttgtttattttgttttttttttttatctttatttttttaaatttttcaatagaaatgttctatcataaatttaatttatattgtgtctatcaagtattacatgaagaaaatcgattaacaatagaacaatcaaacttcgaccagctatacacattttagaagtgtaaattgtacaaccaacagtagtcagctaatgagacaggctcttggattctcaggtatcaacaaaatcccaagtcaaaccgatgaaaccaatcaacaacatgcgccttgtttacaagattccagcagtttgcgcattaaacgtgccgataccggccgttgaactctgcagcctggcgcgagctgtttccccaatgacgggtggctccccaaggaagtacttgatgcccatagtgatcaccaactctcctgataacgacaaaccctttgctcaggtcctcattagtgagccgatgcataaatgcagatgcgcgcccttgcaaggagcaaaggtgtggcaatgaatgcgaaagagacagaaacgaggtgagtgattggggcccagattgtaaaaagccagaattttgtgctcttaccgaaagaaattgctgttctcacggatgcgtgcaagtttctgggcacatggatagcctctgttggagccatcctctccaaggatcactttaatggctgaaataacttgttgtactgctggtggtgacatggaggtagcataaatatgcgctgggcagctaagcttcaggtgctgaattatctccttcgatgctgcaatatatccaccacatgatccaaatgacttagtgaaagtgcccatcattatgtccacatcagctggatcaaccccaaggagctcacaaacaccccgaccagactggccaacagcgccaatgctatgggcctcatccagataagtgtaagccttgtatttcttgcatacagctatgatctcaggtagtttgcacagctcgccttccatgctgtagataccctcaacaatgacaatgatctttttccaaggtctgtgtgtgcgtggttgaccaccagctatctgctctctcaggacctcttccaaatgagcaggggagttatgctggaaaacccgaacggttgcaccggatcctcttgcaccattgacaattgagttatggttcagtgagtcactaattatcagcccaccctttcctactaggcaaggaatgatggccgagtttgtaacataacccatgccaaataggatagcagcaggctttccaacaaagcgtgcaaccaactcctccaactcagtgtgaagtttggtcgtgccgccatcaacgcgaacactgcaggtgctgggtgagtatttcttgagagactcgatcacaagtggagtgcagtactcatctgctgctgcaaatccaaggtaattgtaggatcctaggttgaggcatcttgtggtatttgaagtacgctttaatgtcttgttactgtcattggagtagcgctcaacaacatcaaaccaagcatctggtgcacttgctatgggcctaccgaagcaatcctggatccgaaggtacaggcggcgcacgtagaaatcctccaggccgaggcagatcggcgcgtagcccttgacgttcttggccttgaaccaatcgatgagcttgcggaagaaatccctgagctggccgaacgcgaagagcagcccgtagctgaagagcgtcgtcagcgccgtggtgtacggcagcctcaccatctcgcccgcctcctcctcccccctcaccgaatccccgattgatagggtcctggagctccctccctcgcggaaatcctccggttcttggctgttcttggcgggcgattcttggattccaagatgatggatggttctcttgggaatcttgcttgcggtgtggatggggagggaggtggggcggggagaggaggatctaagggaggggcctcgaggtggaggaggaggagtcgccatgg

SEQ ID NO: 41577 - DNA, 156 bp, Oryza sativa
  Clone ID: PAT_MRT4530_44910C.1
ggcaagaaagaccacgcctaggctcgcaacaacaagcgcaagttgacattcaaggccaacccgcaaatgtcaggaagcaggatgatcggcttcaacagggtgctgaagatcgtcaagctcaacggatagctctcatcctacaaaatcggcgagctg

SEQ ID NO: 41578 - DNA, 746 bp, Oryza sativa
  Clone ID: PAT_MRT4530_44911C.1
cttccttccttctcagcttctccaagctcgcgcgcaagcaagccgccggaagcaacggggtcgccggcgaggaggaggcaggcggcgacgggaagcgggaggagtggtactccaaggcaatcgcctactggcaaggcgtggaggcgtcgaccgagggtgtccttggagggtacggatgcgtgaacgacgtggacgtcaagggcagcgacgcgttcctccgtcctctcctcgccgagcgattcggcgccgcgaggcgccatctcgtcgccctcgattgtggctcgggcatcgggagggttacaaagaattttcttcttaggcatttcaacgaggttgatcttgttgagccagtgtcccattttctagaagcggcacaggaaaatcttactgaatgtatggaagtaggggaagatacacataaggctgctaatttttattgtgtacctcttcaggatttcactcctgatgaaggaagatatgatgtaatatggatccagtggtgcatagggcaacttcctgatgatgactttatttcattttttaaccgtgcaaaggtgctgcatttaattcatatattatgtaaattttactgttacaatgatttgtttctgtttgtattgaagtattcatctgtgcttgacagttagatttaaaatttttgttgtgcgcaaaaagatgttaatatatgctatagcattataccattatttttatagaaggaaactggtcttttttttcccttcgat

SEQ ID NO: 41579 - DNA, 394 bp, Oryza sativa
  Clone ID: PAT_MRT4530_44912C.1
tagagagacctggaaggctggaaatcgagagcagcgaggcggcgaaacaagcaggcggcccggctctcagtctcatcccgtgcctcctccgcctccctaatcgtcaaccatctagatgtctcagtcggtgcaagggtctttttgttagttactttgcaaagttaaacttgaaaatttaaaggataaaaaaatgtccaggactgcaataattttgcatcgatttcgtcaagcagctgccagtcagagcctcgtagagacttctcttcagtcatgcccatattttggtgttcctctgagatggttaagctgcacagagcaaacttcaaaatgggaaacttctacatcttatcagattgatgacgtagatcaatattcaccaaattagtaagtgtag

SEQ ID NO: 41580 - DNA, 266 bp, Oryza sativa
  Clone ID: PAT_MRT4530_44913C.1
cggacgcgtgggcagacgcgtgggtagcttttcaatccatacatatattctgaaatgagtcagacattagctactgtaccaaatcatgggctctgcattattttccacatttcctcacagctagcatcgctcaaactgttcatatgcttaaccacatctattggatgtctcatgacactcataattgtaccaatgacacgctcagatataaatcctgtgttgagctctgtccttaagttaataataaatcgtttgacttatctgat

SEQ ID NO: 41581 - DNA, 1095 bp, Oryza sativa
  Clone ID: PAT_MRT4530_44914C.1
atgggaaagctcaccgacgtgacacgctccaacgacatccagctcaagatcgtgggccactccttgacaatggccatggacgacggcgagttcttcagttccaggcggtattgcgtcggcggacacgactgggagatccgcctgcggccgaaggatccctgggttggcaggcgcgaccggccgctcacgctcaagctcgtcctgcgcggcgcgccccgcacaggcagcggcagtgtgaaggcccagctaagctgctgcttggtagatccgacgcagaagctgaggccgtcggagatgaagaccgtgtcgcataagttccacaagcccggtgactactcgccccgtgccgtgttcatggcaagggacgagctggaggcgtcgggctatctcacagacgattcctacgtcgttcagtgcgccatcaccgtgctccgagaacagccggagatagccgcggcggcggcagcggcgggcgacagcgcgaatgcagccgtggcgccgtcgtccgagttgcacgcgtaccttggcgccctcctggagagcaagaccggcgccgacgtcacgttcgtcgtgtccggcgagtcgttcgccgcgcacaaggctatactggcctcgaggtcgccggttttcatggccgagctgttcggggcgatgaaggtgaaggcctcggagcgcgtcgaggtcaaggacatggaggcgccggtcttcaaagccattcttcacttcgtctacactgacaccgttccagagctcgaccaccgtgatggcgaggagacggaggcagcgtcgacggcgacggcgatggcgcagcatctgctcgccggcgccgacaggtacgggctggagaggctcaagctcatctgcgagagcaagctcgccgagcgcatcgacgtcgacacggtgtcgaccacgttggcgttggcggagcagcacgactgctcgcatctgaaggccaagtgcgtcgagttcattgctgccggcacggctgaaaaccttgatgctgtgttggccactgatgggttcaaacatctggaggcgagctgtccctcggtgttgactgaccttgtcaaggttgcccgtggaagaaagaattaa

SEQ ID NO: 41582 - DNA, 251 bp, Oryza sativa
  unsure (1)..(251): unsure at all n locations
  Clone ID: PAT_MRT4530_44915C.1
ggtacactaacattacctagcacgggctaaaggtcacatgtgtaacatgccaaatggcaaaacagaattgaaagacatacacgcctaatggcacaccatagctgtacgacagtagtatgattgtattagtatatgttactctatccgttttgcctatgatgcatctncnaagaacggaggtgagaagcttaccttaaaattaatggcctggcttacggagacaagacatacatgagtgcttggcctgctct

SEQ ID NO: 41583 - DNA, 356 bp, Oryza sativa
  unsure (1)..(356): unsure at all n locations
  Clone ID: PAT_MRT4530_44916C.1
tgaaacctataggctactagctagtgctctcactctcactcactcacactgtcacttccacattttctttgctctctcactgtccgtacgtcgtcggcttgatcaccaacccttgctgacggtggntcggtcgcccggagttcgagggagaagaaggcagtagaggtgtggtggtgatattgcaggcggcgaccatgtcgagccgccgtggtggtggtggtggaggagggaggatcaccgacgaggagatcaacgagctcatctccaagcttcaggccctcctcccggagtcctcccgcagccgcggcgcaagccggtcgtcggcgtcgaagctgctcaaggagacgtgcagctac

SEQ ID NO: 41584 - DNA, 1363 bp, Oryza sativa
  Clone ID: PAT_MRT4530_44917C.1
gaaacaatagcttcccattaaactagttttacaaataaagttggattttgcacaagcacaagctctccaaacatagccatgccttaacataatgtctaagataatgtaacgcttattcacaataaaagataatataatttaacaagacacttgatccatggtggccactatgtgatctgcaatattcttagcatccatggcaatgccggccaatcctctccttgcaaacccagcacaatatagtccattttcacctttccaatgatttggaaagaatttcttagggaaaccatcatctttaaacatgctttcaccattctttagccatgtatttactgtgcttttgtagcctgttgcaaatacaatggcatcaaaaggaatttgcttcccaccatgaaattcaatactatttgtttttatcttcgatattccttggaacactttgataactcctcctttgattaatcttgcagtccctacatctatgacggcggaccggccagtttgtgatttcagtaaaagaggaccaattttaggcctcgtaataccatgttttgacaagtctccaaaataaaaatttgcagccatcacaagaagagaatccgctgttgtcactgttagccctagattttggaccactgtcatcccaaatcgtattagttctttggtcatgatgtgtatcgggctacgaacaactatggaggtgtgggctccatgcgtggcaagatcataggcgatctccatgccagaattcccggcaccgaccacaagcacattcttcccggtataggctctcccagacttgtaagccgacgagtgaatggcttctccctcaaacctagtgagaccaggaactggtggaatgcttgccgcactgttctcgccagtggccacgacaaggaactgtgcggtgagccttgtcacaacactagtgtccgtgtcccgtgctagcacagcccaacggttcttacctccatcatatattgctgactcgatagcagtgtggtaccttggtcgtatcccaaactggtcagtgtagctatctaggtactccacaaacatatccctagggatgtatgttggcgtgcctacaggatacgccatgtgtggcagctcacagaactccttggcgaggtgcagcttgagtcggtcataggcacggtggcgccacagcgacgcggtgcaggactcacgctcgacaatgacatagggcacatggcgctgtgcgaggcacgctgctgttgccaggcctgctggccccgcaccgacgatgagaacgaccacctcctccacagcctccattgctaataatcacgtaacagaatgtaactagtgagcagaagtagcgagaagtataggtaat

SEQ ID NO: 41585 - DNA, 626 bp, Oryza sativa
  Clone ID: PAT_MRT4530_44918C.1
ggatccccgggctgcagggtacggcctcttatcatttagttcttgaagtctctgctgttcaattttccttggacaaacttggatcaggttaggtggttcattctttggccactccaggttttctgtaccataaacaaggtcatttacagtcttgtcctgtggtgagtggaatacattaatcacatccccatatgtcgaataaaatcatcgccatgtagtaacataattgtgacttttttcttgaattatcaattgtcgatgaattttcgcattattaatcttctggtcacggcttgtacatattcaatcaaataggggaggaggagaattatgctatctatcgacaatcgacatccggtgcattcatgactttgattctgcgctactgattggcacaggaacctctcttttggtatgtatgctacacctttctattgcagtgcaacctccaagttttgagttttgacagcgtttattcgtcagtgctgctcttgttgtgctactcgccgttttggatcatttccaagttccatgatagtgatttgctagtggtacattggtacttgcaccaccaatgtattatgtatattctgttcttttgtccccatatccttctgtctaatcct

SEQ ID NO: 41586 - DNA, 484 bp, Oryza sativa
  unsure (1)..(484): unsure at all n locations
  Clone ID: PAT_MRT4530_44919C.1
gctccatctccaatcctccattatccaaaacttcctttcccaataaacaggtcccaggttgggtacttcgagcaatcagcaaaggcaagggcaactacactggtggtatttatactacaacaaagaggaatttaagaactgggttccatgtttgtgccgtcaatggaggtcagggcactcgcaatgtgtctggggcagagttcccaagcgattacactgaacttctagcgcaggtgacagtgaaggtggaattgagatgactggaagcatgcttcttataagagaattctgtgatcgctttgtccctgctgagaaagctacaagaaccagaatcttcttccctgaggcaaatgaagtttcatttgcaagacaatctgcctttgaaggatgttccctgaagctagattatctaacaaaaccatccctatttgaagattttggttntacaacaaaggtcaaaatgtcagaccgtgtgcgtccagaa

SEQ ID NO: 41587 - DNA, 2013 bp, Oryza sativa
  Clone ID: PAT_MRT4530_4491C.1
atgtcaacgtggtcgggtgctgcatcaatgcctctccgttcagcagcgggagtgttcagtgctgccgacaacagattgaaggagattgataccttggtaggggagatccagatggattttcggagcttacatacgcctaactgtgtgttcaatggggaagaaatagaggatgacgacgatgtcgttgatccagaatacctcgagattatgacactcgccgggcagatcagatgtggagttcgggaacttcagactgctctagaccgtaagcgtatctacgatagcagctacggtgatgaggacagatcaatggaggaaactcaggggcaagcatgttggttcccttctgcctcgcagctggagcttgtcattcactcactagatgctcagttgaggcactgcctcctctgccttgcaatgttcccggctgatgagctcatcaagaagaagatgctcatccactactggattggcgaggggatcgtccagtccgttactgctgggaaggactgctttacggatctcctctccagaggcctgatacagcctgcttgccagcgacaacactgcagcaaggtgcactactgcaagattccccccattgttagcaactttcttgttaagacggcacatcgcatggggttctatcagtttgatggtgaaggcaaacctatggaggattttgacagcgagaggtcccgccgtgcatgtctctgggaaaggcagatcggtggaagaggcgatgatgtcaatgaactctatgggccgtctagctgcaaggatctgctcacactttacaacttcaaccggcagtatgtcaacatggataagacttggttgtctaaacaagcagagatgagcactctccagctcgggcagtggaagccgtcatggagacaccgcattgaaattgtgagccccgagaccctggaggcggcaaccatgtgcgagagcctaaagtacctcagcctccgaggcatctctctcattgagtatatcccagactctatcggcaatctccagaatctcgtggtgatggacctcagtgcgtgccacaacttggagaagttgtcagattctatcggctcacttcgcaagctgcagtttttggatgtttcggagtgctatctcctggatgaaatgcctgaagggataggaagcctggaggaactccaggttctgaagggttttcttgtgggtggcgccaccagcaaaagtaacccatgtcgtctagcagatctagctagcttgcccaagctgaggaagctgagcattagcactgggcggcgagcattagtggtacaggaagatgagctgaacaaattgcaagggtgcacagcccttgagtccttgactataacatggggagcagcagcagctgcacaagggccgaagcgtcaactgatatctggtgttgaaggaagcatcaaaggaacctccatgggatcagagctgttgcttcctccaagacttgagaagctggacctgcggcgcacccccatggagaacttgatgcatttgcttcatccaggaaatgctgagaacttgaagagactgtatattcgaggagggaagctgaagagctttggtgatgtggaaggttggaatgtcgagacgcttcgtgtgaggttcctgaaagtcttggagtgtgattgggagcgactcagagcttcatttggcaagctacgttttctggagatgcgtgaatgtcccaatctaacttcatgggaatgcgacggcgaaggtgtttggagggaggacgatgacaatggtaccacgcatagcagctgcagtagcttgaatggcggaagcggtggcggctggtcggggtgtggggtgttgatgctgtgctacgccgccggcaagtgcaggggcaacttccacgccaagcagctgagccagcgcggcgagctgctcaccgtggtgtggctgctcgtggcgcacttcggcatgggtaaccagtacagagttgaggccggccacgcccgcgccaagctcatcaccgagaactag

SEQ ID NO: 41588 - DNA, 1171 bp, Oryza sativa
  Clone ID: PAT_MRT4530_44920C.1
cccacgcgtccgcccacgcgtccgcccacgcgtccgctggaaacaagcttgccatgcaggagttcatgatccttcctactggggccgcttcattcaaggaggccatgaagatgggtgttgaagtgtaccacaacctgaagtctgttatcaagaagaagtatggtcaggatgccaccaatgttggtgatgaaggtggttttgctcctaacattcaggaaaacaaggagggtcttgagctcttgaagactgcaattgaaaaggctggacgtccgggcaaggttgtcattgggatggatgttgctgcttcagagttctacactgaggaccaaacctatgatcttaacttcaaggaagagaacaatgatggttcccagaagatatctggagatagcctgaagaatgtgtacaagtcatttgttagtgaatacccaattgtctcgatcgaagacccatttgatcaggatgactgggttcactatgctaagatgaccgaagaaattggagatcaagtgcagattgttggagatgatctccttgtcaccaacccaactagggtagccaaggcaattaaggacaaggcctgcaatgctcttctccttaaggttaaccaaattggatctgttactgagagcattgaggctgtcaagatgtcaaaacgtgctggctggggtgtgatgaccagtcacaggagtggtgaaactgaggatacattcattgctgatctggcagttggtttatccacgggccagatcaagactggagctccttgcagatctgagcgccttgccaagtacaaccagcttcttaggatcgaggaggagcttggtgctgctgccgtctatgccggagccaaattccgtgcaccagtggagccctactagatgggaatagaaccacttcgtttccgtaaattttgtgaagattgtgagggtttgagcaataattccccacggtcagatgtgggtggacatgctcccacaaaacgcttaattttgatgttgcgtggcgcaagcgtgatttgaaggaacacaaatgattatattaaacgttataagcaaagttcaacaccatgtttggatctgacaaaaaaaaaaaaaggaagggcgacccgatagaaagcatgctagcgtacgcgtgcgtgcatcgtcagatgctagtacatagtgtggcc

SEQ ID NO: 41589 - DNA, 1304 bp, Oryza sativa
  Clone ID: PAT_MRT4530_44921C.1
ccccggcgcccggctcccgtccccagtgttccccgaccatggccaccagtccctgccccagtgttcagtgaccatggcaaccagttattgctccatctccaatcctccattatccaaaacttcctttcccaataaacaggtcccaggttgggtacttcgagcaatcagcaaaggcaagggcaactacactggtggtatttatactacaacaaagaggaatttaagaactgggttccatgtttgtgccgtcaatggaggtcagggcactcgcaatgtgtctggggcagagttcccaagcgattacactgaacttctagcgcaggcaaaagaagctgctgagtcagcttttaaggatgggaagcagctattggaaattgagttccctacagcaggactacaatctgtaccaggtgacagtgaaggtggaattgagatgactggaagcatgcttcttataagagaattctgtgatcgctttgtccctgctgagaaagctacaagaaccagaatcttcttccctgaggcaaatgaagtttcatttgcaagacaatctgcctttgaaggatgttccctgaagctagattatctaacaaaaccatccctatttgaagattttggttttacaacaaaggtcaaaatgtcagaccgtgtgcgtccagaagacgagatattcctcgtggcttatccctatttcaatgtcaatgaaatgcttgtggttgaagagctttacaaggaagcaattgttagcacagaccgaaaactgataatattcaacggggaactagatcgaataagaatgctagtggctttcctcaacaaaagagaagctgcgctgatgatgtttgaaaataactaccctcctttcttctacccaaagctagcggaactttccaaaacatttcttccaaagctggagacagtttattatattcacaattttaagggactcaaaggaggaacacttttcaggtgttatcctgggccttggaaggttctgagaaacataggtggcagtttcttctgcttgcatgaacaagaagagatgccatcactgaaggaagtggccctcgacatccttccttctgcctagaacttttcatgagtcattccaagcataagccaagaaaatggagaagggaaaaagcctaaaagactacaggttatttctccctatatgttgatggactttcgttgtacataaggagagctaggaacggatgtattgctctgatgtgtacatgcatctgtgcatcaaagtgaatgcatggtttggtgccttgatggcgatcaatatttgtcctgcc

SEQ ID NO: 41590 - DNA, 468 bp, Oryza sativa
  Clone ID: PAT_MRT4530_44922C.1
atggcggatgtattgtccgctttcggatttgaagtaattgcacaaagtgaatttggcttagtttcaccgccagaaacaggcttaacttttgttgaaaatgccttattaaaagcacgttatgcctcaaaaatgaccggtttacccgccattgcagatgattctggattggcagttgatgcattagcaggggctccaggcctttattcagcacgttatgccggaattgaggacgatgatacagccaatcgacggaagttattagctgaaatgcaaaacgtaccagatggacaacgtgcggcaaaatttgtcagttgtattgttatgctcaagcatgaacggatccaacgcctaagattgcatttggcgaatgttttggtgaaattctacgtgaagaacgtggccaaaatggttttggctatgacgcattattcttttatccagctaaacagtgcacctttgcggaattag

SEQ ID NO: 41591 - DNA, 454 bp, Oryza sativa
  Clone ID: PAT_MRT4530_44923C.1
atgcacccctccttcatcttggatcctttgtgcggccgccctcctttttctgtgtttttttaacttgggggggacaactttatttagtcattagggcctgtaattccttccagagatgaacaacagcttttagggggctactacaggtataactggttacatgcatatacagacgggaacacccaataattaacctcaactccttaatgaacatccagggataaaacaaacactaggacaacaattacgctggggatgctctgaatggaagaaaatccacattttattatgacccccaacgcctccgtgtcaccaccacgtcttgcagattttattttaccctgttctattcggtcatgcatacacgatctcaccgtcgtccttcgacgccaggatcagctccgggtgcgccgccgccgccgtcgccttcttgatcgtgccgtcgatggcgttc

SEQ ID NO: 41592 - DNA, 480 bp, Oryza sativa
  Clone ID: PAT_MRT4530_44924C.1
ttttgtttttttgattttttttgttttttttttttttttttttttttttttttttttttttttttttttttacccccccccaaaaacaaaatactggttattattcccggacaaggaaaggcccaaacaaaaaaatcctcccccctggattcagaaaaaaaagaaagaaagaaaagggggaaataccttttttttccccaccaatcctggggggtttggacaggccccccccccataacaaacctgggggggggataaccgcggtaacggccatgggggagccccccaaaggtaaaacatttttggcggggctccactgggggcacgttcgggcccggaaacccttccaggggggtctttattatatttacaaagggggcaaccatttcaagggatgggttcaacccggggggggggaaggtttttgaggaacgaacaggttcgggaacctcaaaaaacctcagggaagggcccccgggg

SEQ ID NO: 41593 - DNA, 204 bp, Oryza sativa
  Clone ID: PAT_MRT4530_44925C.1
atggcgtcagctccgaccgcctcttctgcagtgctcgtcatcgtggtccttgtggcgaccctcgccgccggcggcgccaacgcggcgaccttcaccatcaccaaccggtgctcgttcacagtttttggcgtgttctcccacatgtattccgtggggaccactgtcaccagccacgtcgcggcaggaggcatcctatggtcctaa

SEQ ID NO: 41594 - DNA, 810 bp, Oryza sativa
  Clone ID: PAT_MRT4530_44926C.1
atgaggctgttcgaggagccaccggcgaagctcacccactgggctcacccggagcacgagctgacgctggccgccaccgccggggcgccgttccggtgcgacgggtgccaggagcccggcggcgacgggccgaggtacaggtgcgcgccgtgcaacttcgacctccacaccgactgcgccctcccgccggccaccctgcagcacccgctcctcttcaagggcggcggctgcaccttcgtcttcctccgcgagccccccgcgcccgccgccgccagccggcagtgcgacgcgtgcggcgacgacgtgcgcgggttcgtcttccactgcgccgaccgcgacctcgacctccacccgtgctgcgcgagcttggaggaccgcatcgtcacgggcgggggcggcgacggcgacggccgcgtcttcgagctcaccaaggcggcgtcgtcgtcgtcgtcgcggcgccgctgcggcgtctgcggggacaagtcgcgcaggacgttctggttctaccgcggccgcttcgacggcgaggacgtgttcatccacgtggcgtgcgtgaaggagctcgccgtgcggaggtgggaggcgagctaccgccgccgcagcggcgccggccagatcgcgctcgccggcgcgccgctcatggagggcgccctgcagagcctgccaaggaggacgcggcggagcggcgggttcgagcggttcagcaagatcgtgggtgtcatcgtgagcgccataatcgccgtcatcttcgggaatccgatggggttgatcgccgcggtggccggccctgacggtcttctccgcgggtag

SEQ ID NO: 41595 - DNA, 891 bp, Oryza sativa
  Clone ID: PAT_MRT4530_44927C.1
atggcgtccatgtacaggcttccaaggaacgccatctgcgctgcgtgctatgaaggtgccaaggccatcatcgccttcttcaacgacgacgacgacgagcacgccgatgctgatcaaggctcggtgaagcccagcagattgacaaagctcaatagcacaaccaagggattgagagatgcgtgggaggaggtgaagcagatgcgatgcagagaggaggagaccaagcagagggcatcgtttctccagcaaggcttcgcggcggcgtggaaagacggcatccacaccgacatcgccgtcaggcctggaactgggcccccaatccaagcccataaggccatccttgcgaccaggtcggaggtgttccgccacatcctcgccggcgacgacgactgcaaggcccccgccggcgactctctgtcgctaccggagctgacccacgacgagctctcccacctcctcgccttcctctacacgggctccctggcgacgtgcacggaggagcggcacctgcacgcgctgctggtcgccggcgacaagtacgacgtgccgttcctccggcgagcgtgcgaggcgcggctggcggcgggggtggaggcgggcaacgtgctgcggacgctggaggtggcggagctgagctcgagcgcggcgctcaaggagcgcgccatgggggcggtggtggagcacgcggaggaggtggtgttctcgccggagtacgaggagttcgccgtcaggaacgccgccctttgcgtccagatcacccgcgctctgctcgccaataaagcatttcccgccaagacgccttaatattctttttttttccttcgttgatttagaatttagttagacgacgtgcgatgtatacgtgtaaatgatagtacatgcatctctttt

SEQ ID NO: 41596 - DNA, 442 bp, Oryza sativa
  unsure (1)..(442): unsure at all n locations
  Clone ID: PAT_MRT4530_44928C.1
tctgatacgagccgcccgggacgccaaaaacgaggnggagtgcattcagaaccccatacgatccctcccaccaccagangancnggcancagcgccccacccnggaagccaacggngcccccagcacaaaagaaccccacgngccagacccgagccccgaccaccaacccacgcgcccggggaagcgccaccgggcnacccaagncaccccacacaagccccaaccggaggacgccccagacacccaagagaagcngaccagggaaacccagccacaacaacgcgaaccacggagcaaggacgaaacccagagaagccacaccgcagaacccggcaccccagcagaacggaagcaagacgccccggcaccnacaaagaaaaccanggagaccagcaaagcgcaccggagaaacaaaccccgcggggcaaccggaagaaagcc

SEQ ID NO: 41597 - DNA, 275 bp, Oryza sativa
  Clone ID: PAT_MRT4530_44929C.1
ttctattagggataatttctaagtagttcactttgctttcctaccatgatatgatatgatatcttctgcctaggatttaggatacatgtacagcttcccccttacaaaaccaaacccctctcccccaataaataaataaataaataaatcggaggcagtaatacatccaaattgatgtttcatcaactgcaccagcatcccaagctgtggtttgtaacattcttttctactcatatgtgttatccagtagtttgagtatttcttctattcacatg

SEQ ID NO: 41598 - DNA, 454 bp, Oryza sativa
  Clone ID: PAT_MRT4530_4492C.1
ggacatggttctagaatactatactcaatgatgctgatttaatcatgtctgtagcctagactttttatccccacataatctagaaagcatggtcaaccaagcattaatctatcctccatccatccccccacaagaaacaatgggtacagatccacgatagctgaattcttcatgctggctcttggctctgagtgctctgcagaggtggaggagatggattcagctgtaacggctgacttgccaaaactgctagcctgataagtgatgtggagaagtgctgccttcgtaggttcatcttgttgcctatgaacgcactgatcttctgcagatatggacaggagatagagattgagttcacaggcaagcactatgtatgtgagggtagaaaaggagttctttttccaaagatgtttaatagtcccttgacttaagggaagacaaaaatgaactgatg

SEQ ID NO: 41599 - DNA, 819 bp, Oryza sativa
  Clone ID: PAT_MRT4530_44930C.1
atggaggcagctattttgagcggtttgttgaaaatactcgcgtcgaggatgctctctctggtagatcagaagtacaatctgtacaagggattcaaaggcgacgcagaatttctgttgaaggagctccgcatgatcgccggagccattgacgagcagctcttgcggacggtgagccgtggaagcgtgctgctgctgtccatcgaagagcttcgcgacctggctcgcgacatagaggactgcgtagatcgcatcatgtatcagaaaactcgggatcagcaagcttctcttttcagtatcaattccgtcacgggaacgtcgaagcttcagttggccaaagagatgaagaagctgaggaagagagcagacgaagcgaaagagcggcgagaaagatacacggtggtcgtcggtcatcagtcctcccctgtcagctcggatgagcaacgctgctccggtgcatctgacgggagaaacctccaggctgatctcgtcggcatcgacctgccccgagaagaacttctggagcatctgaaagaagccgagccgaagaagcttaaggtgatatcgattgttgggttctgcggcttggggaagactgcacttgcaagggagttgtacaacaacagcggtctcggccggagtttcagtaaacaggcctgggtttctgcggcacatggtgatccgagcaaggtgttgagggagataatcggacaactggtatctaacccgccatcggatgcctccgttgtcgacctggaccagcttattgtaaatctcactgatcagctgaccaacttgaggtatcaacaattcttcttctaa

SEQ ID NO: 41600 - DNA, 391 bp, Oryza sativa
  Clone ID: PAT_MRT4530_44931C.1
gtgagatgggaggagagctagctagccgccggggctgagctcgcctccccgcctcccgatccccgcgacccctcgcagccacacccccaccggataacgcaacgccttccccctcccccatcaaaacccctctgcccggtcgcgcgccaactgatgtgctcctccgacgccgacgccgcaaccaaccagccagctcagccatgcagcccgactccgccttccaccgcatcgcccgcgttgccgcccacctcagcccgacgccgtgcccccagatggaggaggggatgaggccggcgccctgcagggccaacggcggcaccccggggatcaaggcggccgtcatgcgcgcggaggaagggaacgggcaggcgttggaggtggtcatgaagat

SEQ ID NO: 41601 - DNA, 316 bp, Oryza sativa
  Clone ID: PAT_MRT4530_44932C.1
gggggactgcaacggatacctgtgacccacccggaacctaaccctatcccttctgcggcggagcaaggacgactacaatactactgcgccaccgcctccgccaccgccgccgtcgtcgagcccgactccaagggtggagcgggtggcggagccccgaagccggaaaggaagggggcgatagacttcaagtggatccgggagaacacggacggcggagccgccaacatccgcgagccgcactacggccccaacctggacctcgtacataaggtctacgacaaggacctcgccttgcagaaggaagatgaacggctcc

SEQ ID NO: 41602 - DNA, 333 bp, Oryza sativa
  Clone ID: PAT_MRT4530_44933C.1
gaatacggaaagcaacacttcggtttacagtaagggcagcatagtatgacccaaaactggaggcatgaccagacccaaccaaccaccatggtacagccaggtatcgttgtaggctgagacggacataaaaccgtacaggaattaaaatgcattcttgctagaggtatgcatgtactattctttggggcaaaacacaactccggtcgatatagcagcctgcgtgaggagggttcaggctagtacgagctgtgcatgtgacggatcaaggagaacacacgggtgctgtatccacattaagtgcctagccaagacacaatctacatgcactggtga

SEQ ID NO: 41603 - DNA, 456 bp, Oryza sativa
  Clone ID: PAT_MRT4530_44934C.1
atggttgcctccgacgagttcaggcgcgtctttggatcgttcgaccaggacggcgacggcaagatctccgccaccgagctgcggctctgcgtgaaggcgtccctcggcgaggacatgccggacgaggaggtgcaggcgctcatggcgttggcggacaccgacggcgacgggttgctggacgaagaggagttcgtgaggctggtgacagaaatggaggcggatggtgatgaggaagaagacgacgacgacgagacgtgcaggtgcctaagggaggcgtttgcgatgtacgagatggaagggagaggatgcatcacgccgctgagcctgaagctgatgctgagcaagctgggcacgcacctggacgttgcagagtgccaggccatgatctgcaggttcgacatgaacggagacggggtgctcaccttcgacgagttcaagactatgatgatggcctga

SEQ ID NO: 41604 - DNA, 128 bp, Oryza sativa
  unsure (1)..(128): unsure at all n locations
  Clone ID: PAT_MRT4530_44935C.1
gagaactaagtccctcacctacnacgaggaatgcggctgcttcactgaggaatccctcnccggactgttgaggtcggnagctcctgacatgnnccagnnnagaacgtataccaggccaggtgaactta

SEQ ID NO: 41605 - DNA, 660 bp, Oryza sativa
  Clone ID: PAT_MRT4530_44936C.1
ggccgccccttttttttttttttttttgcgttatataaatcaattgggtttaaaaactatatctataaaactcacaccctcgctcagtcaacacacacaagcatgtccttgatcttctccaagacgatcttctgtctcgcagcatcagctgtggtcttatcggcagcatctccaacactaatagaagcataacagccactcttgagagcaatctcagtctcagtaggaagacggtcctcgccacaccactcagtatcacgttcggacagcaggccactgttgatgcgggtcagcacccactggaacttggatgcatcagtgcatttgccctcaaccttagggaagttgacgttgaggtaaacatccttgggcaggtaaggctttccggagtcggtaatcttcttgacgaacgtggttgcaagctcggcgtagacaagctacgctcgggaacgggtttggcgttgaaggcagtgttgccgccagaagctccagagaaggcaatggcgggaataccgacttcgggggcggcatagcaagcagcgccaacagtgccggagaagggaacttggagccagatgttgctgccgacattggggccggtaacggcaagctcaggggtagcgccatcccacaggctggggccaaaggtgtcgataccgt

SEQ ID NO: 41606 - DNA, 304 bp, Oryza sativa
  Clone ID: PAT_MRT4530_44937C.1
gttgggtgtccgactgacctatccatcttgtcgttgcgctcgtttgttagatctccttctcctatcgatcgttggctaggcgaactgtgagatcggtaatcaacagaatggggaccttctgtgatctacgacacagcttgcggttctggacgcgcatcctgccttaccagatcgacgacgcgcaagtcgagagaggcaacggtaatagcatatgggacgattcgacagatatcaaaagacggacttttgattgttgtatggtgaaggcacggggtgatcattactatagctacagagcaaacat

SEQ ID NO: 41607 - DNA, 342 bp, Oryza sativa
  Clone ID: PAT_MRT4530_44938C.1
atgaggcccgtgcaacatggggcggttgtcaaccactcggtgatctttggatgtctcagcagatggctggcgacagctgtcctagcgttggagtcatgtatccactgcggcatcgatgagattgtcaagcaacatgacagctgtgacaacattcttctatggtgtggcaaagacattggtgtcgtctatgcgactttgaatgatgttgttcttccttgcaatgcgggcttcttcaccttcgtctggagcaccggccatgaaaacttcgaagatctgagtctagtcgttagtgtacttggagctatggttgctttcgatatcgaagtctatgtagccgtctga

SEQ ID NO: 41608 - DNA, 251 bp, Oryza sativa
  Clone ID: PAT_MRT4530_44939C.1
aaatctagtaccggagtgtgacacattctagtactataaatctagacaacaaaacgtagtgtctcagattcgctattttataggacggagggcagtagatctacatcactctatcttcatagaattatgaacaggtacgaactacgtaggaattgttgctggtaatgacttgacagggaaaaatatcgacaatagagctggaaagataaattggatgtaaaaaaaaaaaaaaaaacaaaaaaaaaaaaaaa

SEQ ID NO: 41609 - DNA, 479 bp, Oryza sativa
  Clone ID: PAT_MRT4530_4493C.1
cccacgcgtccgcccacgcgtccgtcctcttcaccaccaccaccaccaccagcagcagcagagagcaccatctccatccaataatccccatgcttgcgcaccactcccggccacatcccgcgcgaggaggaggaggaggaggagggtgtgcttgatccgcgctcccgcctggttggtggtggtggggtgaggggggagggatgctatgccttgacatgaccgaacttaccgtgatgggggctaccaatctccacctccaattgcgccgacgaaggcatccagggcgatgacggtttcttccggggaaagatcttggacctcttctactgaactcgctgcatgtctggcgagaacataagatcgggcgtgagacttccgcctataaatcgccagaagcctgcgcctcaccagctccctcttatacatgttgatgcgacgcctcggcgccatttgagacgactgaggcggcaagggcttac

SEQ ID NO: 41610 - DNA, 244 bp, Oryza sativa
  unsure (1)..(244): unsure at all n locations
  Clone ID: PAT_MRT4530_44940C.1
ctcgtcttctcgccgccgccggagcggaatccccctctctccgtctaaacctcgccgccgagggaagaaaagcacctccctcttcgccgccgcccgccggcaatggcggggctgtcgctgcggtgcggcgactgcgggcgtgctgctgcggaggtggaggaggcgcaggcgcacgcgaggncaccaaccacggcacttnttcgagtccacgaggtggacttcacaccaagcgacgggcacacgg

SEQ ID NO: 41611 - DNA, 165 bp, Oryza sativa
  unsure (1)..(165): unsure at all n locations
  Clone ID: PAT_MRT4530_44941C.1
aatatacaattttcacattcatccatcattcttccccacacctgaggacggataccaatgacttgccatttccaatatgttaatttagaattaccacgactgaaacgtatctcagattacatatatantgtcacactgtacagtctgccttccaaaaaaaaaaaa

SEQ ID NO: 41612 - DNA, 1345 bp, Oryza sativa
  unsure (1)..(1345): unsure at all n locations
  Clone ID: PAT_MRT4530_44942C.1
tgngttagtgcccatccgcccactccactccactccactcccctctcccgcacttccatccccaaccccgcccccgccgcggcgccaccttccccctctcctcttctctctctctctctctcatatggtccccctcctcgtgcccctcgtcttggcatccttgcgcggaggcgcaactgtcacaaacgtcgatggccgccgccgccgcagcaccccggttcttgcccgtccgcccgctctttctcctcctcctcctcctcgtcctggccggcgtcgcaagcggcaagacggtcaagagggacgttacagcattaaatgagatcaaatctttgttagaatggagagtcgactacttatgggtaggcgatgaccctggcgcgcatggtgaaatccccccctagtctgaagggacctgttttcaccaaggcgattacagaggtgtcaccgcactttaagtctatacgatagcagagctccgaccgttctacatctcctcagcaaaccttaaggatattgtatgaatgtattttggatatctacggtatatttatcagtagtacagacactgtctttctcacagcactgttcgaggacaagttcacacacacaaagggccacttgcaaaccacaaaaaaaaaaaactgaggtggaacaagcttcaggatgtgctcccacctgaaattggtgaactgaagaaactgacacatttatatttgagcttcaataacttcaaaggtgaaattcctgtggagcttgcaaacctaccagaactgcgctatctgtatcttcatgagaaccgctttactgggaggatccctcctgaacttggaactctcaagaaccttcgtcacctggatgttggtaacaaccacttgataggcaccctcagggatttaattggcaatgggaatggtttcccctccctcagaaatctgtatcttaacaataatgatttgactggcgttctgccagaccagattgcaaatttgacaaacctcgagatactatacttggacaataacaacttcattgggaggattcctgaaggattatacaaacatccatttttgaaggagctgtacattgaaggaaaccaatttagaccaggaagcaaatcaaaaggaacgcacaaggtgcttgaattacctgatgctgacatcttagtttaacanctgtttattctgtgacgataacaaaacggctaccgttccccatctcctcagcatgcaccaacaaaaatgtatgcatgtttttaggatatatacgatatatgtatcagtagtacagacactgtttctcacagcactgttcgaggacaagttcacacacacaaaaggccacttgc

SEQ ID NO: 41613 - DNA, 1262 bp, Oryza sativa
  unsure (1)..(1262): unsure at all n locations
  Clone ID: PAT_MRT4530_44943C.1
gacccacgcgnnccgaggtctttcgcggcgcgccccggtgggggctgctagcgcggagccgcagctnccccaggcgggcatggccgccgccgccgccgccccccggctcttgcccgtccgcccgctctttctcctcctcctcctcctcgtcctggccggcgtcgcaagcggcaagacggtcaagagggacgtgggacagtagggagatcaaatcttctttaggatggagagttgtctactcatgggttggtgatgacccttgcgggcatggagatctgccccccctggtctggtgtgacctgttctcagcaaggagattacagagttgtcaccgaacttgaagtctatgctgtatcaatagtcggtcctttccctacagcagttacaaaccttttggatttaaaaagattggatctacacaataacaagctgacagggcccattcccccacagattggacggctgaaacacctcaggatattgaacctgaggtggaacaagcttcaggatgtgctcccacctgaaattggtgaactgaagaaactgacacatttatatttgagcttcaataacttcaaaggtgaaattcctgtggagcttgcaaacctaccagaactgcgctatctgtatcttcatgaagaccgctttactgggaggatccctcctgaacttggaactctcaagaaccttcgtcacctggatgttggtaacaaccacttgataggcaccctcagggatttaattggcaatgggaatggtttcccctccctcagaaatctgtatcttaacaataatgatttgactggcgttctgccagaccagattgcaaatttgacaaacctcgagatactgcacttgtctaataataggctgattggatcgatatcaccaaagctagttcatattccaagattgacctatttatacttggacaataacaacttcattgggaggattcctgaaggattatacaaacatccatttttgaaggagctgtacattgaaggaaaccaatttagaccaggaagcaaatcaaaaggaacgcacaaggtgcttgaattacctgatgctgacatcttagtttaacaactgtttattctgtgacgatagcagagcggctaccgttctacatctcctcagcatgcaccaacaaaaatgtatgcatgtttttaggatatatacgatatatgtatcagtagtacagacactgtttctcacagcactgttcgaggacaagttcacacacacaaaaggccacttgc

SEQ ID NO: 41614 - DNA, 1847 bp, Oryza sativa
  Clone ID: PAT_MRT4530_44944C.1
gccggcgacgatggatctcccgccgctctcccaccaggcgctcttcgccgccgtccgatccgcggacgccgccgccgtcgccggcctcctggccgacgccggggcgtccgggcccaccacccaggcgctcgccgccgcgcagacggacgccggggagacggcgctgtacgtcgcggcggaggccggctccgaggagatcgtccgcctcctcatcccgctctacgacctcgaggccgccaccgtccgctcccgcctcgacctcgacgccttccacgtcgccgccaagcaaggccacaccggggctgtgaaggagttcttggggcggtggccggagctatgttcaatctgtgactcttccaatactagccctctttactctgcagcagtaaaagatcacttggatgtagttaacgccatactggacactgatgacagctgcataaggattgtgcggaaaaatgggaagacatcactacacactgctgcaagaatcggttaccatcgtattgtcaaagcacttatagaaagggatccggggattgttccaatcagagataggaagggacagactgcacttcacatggctgtaaaaggtaaaaatacagatgtagttgaagagttactgatggctgatgtttccatactcgatgtgcgtgacaagaaggcaaatacagctttgcacatagctacacgaaaatggaggccccagatggtacaacttctgcttagctacgaggcgcttgaagtcaatgctatcaataatcagaatgaaacagctatggatttggctgagaaagttccttatggtgagtctaaaatggaaataattgagtggctgacagaagctggcgcaaagaatgcacggaatgtggggaaaattgatgaggcatcagagcttaggagaaccgtgagtgatatcaagcacaatgttcaagcacagctcaatgagaatgccaagacaaataaaagagtgacaggaatagccaaagagctccggaaactacacagagaagctgttcagaacaccatcaattcagttactatggtagcaaccctgattgcctccatcgcattcgtagccatattcaatttgccaggccagtactatgttgatagggatagtgggggagacattggtgaagcccacatagccaaccttactggtttccgagttttttgtctgctgaatgctaccgcccttttcatttcccttgcagtggtcgtagttcagatcaccttggttgcctgggaaaccggtgctcaaaagcgggttatcaagattgtaaataagctgatgtggtcagcatgccttagtacatgtgcggcttttatctcattggcctatgtggtagttggcccccagaatgcctggatggctttcaccatatcagccatcggagggccaatcatgattggtactctcttgttcctggcctatctgttgttgcgccctcgcttcaagtttggtgaagatagacagcggcgcatcaaaagggcaagtggcagcaagtccttctcctggtctatccatgaggggatatcagacctggaagcattctctgatcatgagaagagaatttatgccctgtagattgtaaaaggtcttgctttagctgcatgtaacacttaagaacatgtaattggatgaaaacaatcatccctgtatatagttgctcagctgttttaggtctgtggtgaggtggcccaagcagacctttttctgcaccatcttgatggtttgtgtacttggatacttggtacctgctaatgtgtactagtattagcacttaacaatgaagagcacctatgcagtttgaagctaaaaaaaaaaaaaaagaaaggcccgt

SEQ ID NO: 41615 - DNA, 183 bp, Oryza sativa
  Clone ID: PAT_MRT4530_44945C.1
aggcagggaaaagatttgatttactataagtaatacacaattttgtggaatacaatgtacaggctgaactttttttaccctatgatatatgggacaaatcacatgtacatacatttttgctagaagagtgttagtcggacccgtgggcggacccgtgggcggacccgtgggcggacccgtggg

SEQ ID NO: 41616 - DNA, 687 bp, Oryza sativa
  Clone ID: PAT_MRT4530_44946C.1
atataagagatagaagagagagataaactctcccgctaccgccgctactggacggatctttggtccgacgattccggcgacattgacagaagaatgaccgagctgaaaggtattctacgctggccaatagatgtgtttggtctcatctccgttcgtgactctctggaccggaaccgcaactatatctttgagcgcaccaggaacaactgccagactctcactgcaaaggattcatctctggttcttactggtccaagccgtgcaatcctattgatggaccctattgaatttgaaattgagctaagagtcaaggggacaagtccctccgaagataagatcttgagcgctgaagcatttgggtataatggcaccgctcagagacacagatgtggctcactccgcagtatgttgttatcaggagcacgcagcacattggagttcaagtatgctcacattcctgtggcattggaggctacaatcaaggtcaggattacaggaggtttaactgatttctgtggaaagttcattgcacatactgctagtatcaaggaagatgtcgtattgctggactctggagaagaaatggtggctatctcccatgatggagccattcatttctcccgcagtgtggttgcagttgaaggaaatggtgtgctgactgttggtgttcatgcaaggcagagtggt

SEQ ID NO: 41617 - DNA, 1279 bp, Oryza sativa
  Clone ID: PAT_MRT4530_44947C.1
aaatttcctcgctccgagaaagttcaggctagggcaaaagccggagggggatggcggcgggggagggggaggcaacgacttgccacaagagatcggcggcggggcaggaggaggaggaggagtcgaagaggccacgcgatggcagcgaggaggaggaagagctgctcaccgacctctcccgctaccgccgctactggacggatctgtggtccgacgtttccggcgacatcgccaaaagaactgagtttggtcccatgcggtacacggaggaaccggtgcccccgttcgcaaagctccaagatttactagaggttttttcttttgaggtgactgagctgaaaggtattctaagctggccaatagatgtgtttggcctcatctctgtccgtgactcgctggaccggaatcgcaactatatctttgagcgcaccaggaactactgccagactctcactgcaaaggattcatctctggttctcactggtccaagccgtgcagtccaattgattgaccctgttgaatttgaaattgagctaagagtcaaggggacaagtccctccaaagataagatcttgagcgctgaagcatttgggtataactgcattgctcagagactcagatgtggctcactccgcagtatgatgttatcaggagcacgcagcacattggagttcaagtatgcacacattcctttggcattggaggctacaatcaaggtcaggattactaggggttcaactgatttctgtggaaagttcattgcacatactgctagtatcaaggaagatgtcatattgctggactctggagaagaaatggtggctatctcccatgatggagccattaatttctcccgcagtgtagttgcagttgaaggaaatggcggagttctgactgttggtgttcatgcaaggcagagtggtggtgagaatatgagatgttcttataaagagtttatcccggtaagatgtggacggagtcatgacacacttgatgttggattttgccagatgagcgttgaagttgcttggtcgctcatcttttaatattgaaaaaagtctaggccctgataatatttttcttgcatatgacaatacttaatattcggtattagtagtggaagtaatagatgtgctccgtggcattgtaatacactaatatgacagtactgagtttggaccgggggcctcacgatccatgccattgtaaatttgctactctatatcataaaaatgctattattattcccctatttgtagataaaaaaaaaaaaaaaaaa

SEQ ID NO: 41618 - DNA, 1239 bp, Oryza sativa
  Clone ID: PAT_MRT4530_44948C.1
gggccaagccggagcggagggatggcggcggcggcgaagccggaggcgggggagggggaggcgacgaattgccacaggagatcggcggcggggcaggaggaggaggaggaggagtcgaagaggccacgcgatggcaacgatgaggaggaagagctgctcaccgagctctcccgctaccgccgctactggacggatctttggtccgacgattccggcgacattgacagaagaactgagattggtcccatgcggtacacggaggaatcgccccggttcgcaatgctcctggatttacttgaggttttttcttttgaggtgaccgagctgaaaggtattctacgctggccaatagatgtgtttggtctcatctccgttcgtgactctctggaccggaaccgcaactatatctttgagcgcaccaggaacaactgccagactctcactgcaaaggattcatctctggttcttactggtccaagccgtgcaatcctattgatggaccctattgaatttgaaattgagctaagagtcaaggggacaagtccctccgaagataagatcttgagcgctgaagcatttgggtataatggcaccgctcagagacacagatgtggctcactccgcagtatgttgttatcaggagcacgcagcacattggagttcaagtatgctcacattcctgtggcattggaggctacaatcaaggtcaggattacaggaggtttaactgatttctgtggaaagttcattgcacatactgctagtatcaaggaagatgtcgtattgctggactctggagaagaaatggtggctatctcccatgatggagccattcatttctcccgcagtgtggttgcagttgaaggaaatggtgtgctgactgttggtgttcatgcaaggcagagtggtgatgagaataacagctgtgattacaagaattttatcccggtaagatgtggacggagtcatgacacacttgatgttggattttgccagatgagtgttgaagttgcttggtcgctcatgctttcatattgaaaaaacataggcccgataatattatattttgccaagtctaggccctgataattttgcttgctgtgacacaagctgtttgctcgatggcattgtaatatactgatatgacaatacttaatattcggtgttagtagttcatttttttaaagaaggctatacggccctgcttttttaaaaaaaaaaaaaaaaaaaaaaaaacaa

SEQ ID NO: 41619 - DNA, 465 bp, Oryza sativa
  unsure (1)..(465): unsure at all n locations
  Clone ID: PAT_MRT4530_44949C.1
cgttgtcaggctggnaatgggcttacccgatgtactggggtgccacgcctgccggcggnntggtgaagcgccagtgcgtgggccacggcgcacccggcggcgcctttttctagcaactccaacaaaactggtgggggcgtggggggcncnnncnaccacanctnntncatctcctcnncgctggaccacatggttggaggcatctacagggagctcggcgccgccgatgttgggcaccccatggccgttgtgttccccggctgccggagaggggacttggatcgcgcggcggcgagcctgcgggcgttcttgctcgtggacattcttttttggacaggtggtgtctgcttctggcttggttttcttggaccccgggaactggtcacttggcttcttatgctggctgngtggttgacttctgtgggggttgctcagttccttgtgcctttcatttggcagggggct

SEQ ID NO: 41620 - DNA, 1123 bp, Oryza sativa
  Clone ID: PAT_MRT4530_4494C.1
cttgctagcgcgcggcacaagagcagtaagcgaggcgcgcatggcggcgcgcgccggcgacaccggcctgagcaaggtcaggcgctactggcccgggagggcgccggactgggcgtgggcgggcgccgctgtcgctcacgacgaggacgacgcacgtctcgtctcgacgcttgacgagatcaagcacgtggaggaggaggcgctgaggtcgccgcgccgccgccgccgccgtgtacggcagcctcccgagatcgtctcggcggcgccggcggttgactgctggcatgagcccgatcagatcgaggaggaagaagaagatgacgatgatgcccgggaggagcgcagagcgaggataagggagagggcgctgctcctgaggcagcatgaggaggagcagcttcttcttcatcatcatcaccagcggcatcaggaggatgaggcggcgtctgagtccgacgagacggcggcggaatcggactcggacgacgagcagatggccgtcgtctacatggccgcgcccctgttcgtccccaagtcacagcgcgacaccatccggctcagggaggaagaacagcatcggcagcgccggcggcttgagctggagctggacaagaagaggctcgaggacaggaaggctcagacgaggcggatcctgctccaagagatcatcaaagaagagctcctcgccgccaccacagcttcggccgaagccgaagccgccatcgacggcgtggacaccgacgacgaggtggaccaagccgaggagcacgagtcgtggcggcgccgggaggcggcgagggtcaagaggagcagggaggagagcggcatcgacgagaacccggtcgctgatgatcgtcccaagaagatgacgatcaagaagcagatgaggttcatgcggaggtactaccacaagggttgcttcttccaagacgacgccgacggcgcggcgcagacggccgccggagcatgcgaaatctaccggcgagatttctccgggccgactgggttggacaagatggacgtgagcgtcttgcccaaggtgatgcaggttgaaacacgtgtggcctgcaaatggcagaatgaagatgagcgaggtttagatttaggtgcccacgaaaactag

SEQ ID NO: 41621 - DNA, 327 bp, Oryza sativa
  Clone ID: PAT_MRT4530_44950C.1
atggctgatggtgtagcgcacgggttgggagggtgcgaacagagtgaaacttgccagaggacggctagcggcttggcgatgcccaagcttgactcagcggaggtgcttgggggacgtcaggttgggttagccaaagtggaacatgtcatagacaaccgatggcatggcaatgcccgcctgggttctcactggatatactgcatgggtgtgttcggggagagcagtggcggcgcatcagcgcccaccgtagggatggaaggcaacgcacaaagagaattttcctcccccgcgcaccaaaaaaataagccgaagcggaacatgtcatag

SEQ ID NO: 41622 - DNA, 798 bp, Oryza sativa
  Clone ID: PAT_MRT4530_44951C.1
atgggaagaatcaagagagtgcacctccaaccagtcatggacaagctcggatcccgacttgcaggttggaaagggaagttgttgcaacaggcaggaaggaagacccctgtcacttcggtactaacctctataccaacatacttcctcacagcactaaaaccccccaaaaatttcctacatgacatggacaaaattaggaagaggttcctttgggcaggcgaccaagagattagtgggggcaaatgcaaagtaaattggccaacggtgactataggtgatggtcggaaagcgagcttttgggaatcaaattggattggagaacaaccactgaaggagttagccccggccttatacaaccatgccaaaaggaaaggtagaacggtccaagaagggttagcaaatgaccaatggataatagacatcaggcacagcctcacagtcgagcttgtcaatgaattctttgaggtgttctaccatgtgtggaagacattgttcctacagaagatctgggagagggttctaagtagcctatactgccacgacatagaccacccacatgatgaaaatgaagctcggttggaatggtggattaaaagaacatctcaagttggaaaaagcaaggctaaagcactcaagtcaatccacttgttggtggcatgggaaatatggtgtgaacataacaggagggtgtttcgaagtcaagaaaaaacaatgctgcagctacttgccaaaatacaagacgaaatcaagctatggagcatgtgtggagcaaaagacatcgcgagaatatccacttag

SEQ ID NO: 41623 - DNA, 279 bp, Oryza sativa
  Clone ID: PAT_MRT4530_44952C.1
atgttgcatactgaactgagctgggctgcatttctatgtctgaaacagtcgctggcattggttcacgccgacgtcgacgacgacaaggttctcttcgtgccgtgggtcaaaattcacttctatgatcagcttgtagctataagtccgctgtaccctataagaaaacgctgctgcagagaaggcggcgaggccaggggaggcgacggcgctggaggggacggaggcagcgagggagaaggaccagcgacaaagacgggtatggagaggaacgggcgatga

SEQ ID NO: 41624 - DNA, 129 bp, Oryza sativa
  Clone ID: PAT_MRT4530_44953C.1
cttcatgttccgaccaccacatataaccacgccgtggatgggaactgatcttatccggattgtgacgccgtcgttgccgtgccacgtcggccggtcgggccgttcttactcgcatcggttcatttttag

SEQ ID NO: 41625 - DNA, 1438 bp, Oryza sativa
  unsure (1)..(1438): unsure at all n locations
  Clone ID: PAT_MRT4530_44954C.1
atggcgcggttggaagatatggtggaggcaaggttgagtgttctaagaggagtccaatcgagaacgaatcagacgttcaccatcttccgcgtccccgcctttcttcgcgagagcagccggacctcctacgagccgcgcttggtgtccatcggcccctactaccacggcgccgccgcgctccgcgccatggaggaccacaagtggcgctacctccacgacctgctgtctccgcaaggaccgccggaacccaaccatcgcgttccacttccaccccttgtctccggactctccgcatccgccttggttgagaagatgcggtctctcgaggccgaggcgcgcgcctgctacagcgagcaacccgtcgacctcagctccgacgacttcgtccagatgctcctcctggacggatgcttcatcctcgagttcttccgtaagtggcgcagaaatcagcccgatgtgctatgcgacgttggttggggcctcacgttcgtcatctccgatttgctccttatggagaatcagctcccgttcttcgtcctcaagaagttatatgttaccgcctttggcgaacaggatggccaggccggaaataacctcctccagcttctccttcagtacatcgccggccgtcaagttccaatcagatggccgaacgggcaggtcaatcacatcctacacctgtactacgagagcttcgtgccccagagccagcggacgccgcagcaagaacagagtaccacggcgccgcgagtgctaccgtgcgccgtcgagatgagcgaagccggggtgactttcgccgtgcggcggaactcagacaacggctacgacgtggtgttcgactcccttaggggcgtcatggagatacccaccatattgatcgacgacgcgaagacgccgctgctcgcgaacctgatcgcgttcgagcagagcctgggcaacgacgaggccatcctcctcagcagctacgtggcgctgatgggccagctcatcgtcacggcgcgcgacgtcgcgctgctccgccggcgcggcgtgctggagaacatgctggccaacgacgacgatgccgcccggttcttcaaccacctcggcgactgtggcgccgtcaaccacgacagccacgccttcgtcgggctctacaaggacgtggaccgctactgcgggacatggtggcggaggaagacggcggcgctccggcgcgactacttcgccagcccgtggtcggccatctccttcgtcgccgccgcagtcgccgtcgtgctcgcagttatgcagacctacttcaccatgtttccattgaaaaaagggtgaatttggtaattaagcacaatcacacagttgagagttgtaaaatctctactcccattgtttcagggtataagacattttgactatggttaaagtcaaactgctttaattttgaaaaaaaaaaaaaaaanaa

SEQ ID NO: 41626 - DNA, 315 bp, Oryza sativa
  Clone ID: PAT_MRT4530_44955C.1
ttttcattcattgttggaaggaagcaaacaggtgcatacacctgcaggggctggggcgtaaatcacatacagtggaccataataggcacaagcaaagggagaagactgtcctatgtgaagcaatggctattccttctgcctagctaatcgcgaaggggaactgctggacaagggtgagcatcagcatatattcaacttcgacatggatatcatgagcttatatggcaaagagagggtaacatctggtggctcacccgatgttcatcactgtgacgacactagcatgatcatatatttgactagaggacctttact

SEQ ID NO: 41627 - DNA, 300 bp, Oryza sativa
  Clone ID: PAT_MRT4530_44956C.1
atggtggtggcggtgggcaggcaagtcgattcgtgggcatgcacgctgccgccaccattgctcctcgcgatcgctgacgagtacgccgccgcctgcaccactgtcgactcgacggggacggtcaacgtgcccaccgccgacgaggttgccgacgtgctctcgtcacccggcgggcatcgcgaaggcctcgagaggaaggtgaagttcatgacaccgctcgtgcgggcctgcatggcgacagtctccggcagcggcatgtggggctacatgacatggaggatagagagaagaggggagtag

SEQ ID NO: 41628 - DNA, 255 bp, Oryza sativa
  Clone ID: PAT_MRT4530_44957C.1
ctcaattatcagaactcctgaatcattactttgtcaagagctacatttctaaccattgtaattaagcagtacaagatcgctgattgcacatatgacacatcaacgcattatgttatcagacacatgagatgtgctatgacaagtttatgccgcctaaccttcaatccttcagttctttccttcaagctggaaagcaggccttccatcaccatccgccacaacaggctgtatgtcttgttggtcgtgaatcttgtc

SEQ ID NO: 41629 - DNA, 324 bp, Oryza sativa
  Clone ID: PAT_MRT4530_44958C.1
atgcgggggtggagacggaaggttgaggggcaactgaggagtagggatatggctgttggatctatcctactcatcaactctgactccgactcgaaagcgagggcggaggtgaaaggcgaggggaaggagccgatcagtcctgctcatcaactccgagttcgattcgggaagcaggggtggaggcagaaggcgagggcgcggcaccgcgccgtcggcgctattcgagtaaaaaagacggcgtctttagcggagatcaagatcacatatagaacggccatgaaaggagacaaggattataaatgtgtatgtgacagcgttgagtag

SEQ ID NO: 41630 - DNA, 666 bp, Oryza sativa
  Clone ID: PAT_MRT4530_44959C.1
atggccacaatcagaggcaaatttgggatcatcatggttgcgatgatcttggtcgtgcgcatcatcgccttcgcatctgccagtgacaacgacgagctgccggcgttgttcaacatcctgcaacagaagcccgggaaggctgcacaggtcggctccgactgcttcgacgaatgctggagagactgcatcctagggacaccgtttacgagctaccaagatgacaatggtgtcaaagcatctcctatttgctttgtcaaccttcttcctagcgtcgcaccaccactcaatgaagcaagcattgttggaggggaagtaaaggggctgtcaaatggtgtggagcttggatttggggcagtcgagaaggatgtggtcgatgctatcccatttctttcaaaatgcccccggcaaccggcgcttatgcctgtcgccgtctactccgacggccgcctcgtcgccgccatgaccatggggatggaagcgccagatctaccggcccctccgaggattgaggtggagaactgcttctccctctctgaaaatacagggtccatggtggacatgatcaatgtcgcggcacgatgtgcctttttactttgtgcaacttccagtgacaatgatgagctggtggcaccgttcgacacatccaatggcctgagaacgctgtga

SEQ ID NO: 41631 - DNA, 547 bp, Oryza sativa
  Clone ID: PAT_MRT4530_4495C.1
cggaccggtccgaattcctggttttatcacgcgtgcgctcaacactcccaagccgacggcgagcgtcacattcaaggttacggtgatggggtcgtcgtctgcgccgtccgtcgcgttcttctcgtcccgggggccgaacaaggccagcccgggcgttctgaagcctgacatcaccgggcccggcatgaacatcctcgccgcgtgggcccctggcgagatgcacaccgagttcgccgacggcgtcagcctctccttcttcatggagtccggcacgtcgatgtccaccccgcacctgagcggcatcgccgccatcatcaagagccttcacccgacatggtccccggcggcgatcaagtcggcgatcatgacgtcgtccgacgtcgccgaccacgacggcgtgccgatcaaggacgagcagtaccgcagcgcgagcttctacaccatgggcgccggctacgtcaacccgtcccgcgccgtcgacccgggcctcgtctacgacctccacaccaacgactacatcgcctacctctgcggcctcggcatcggc

SEQ ID NO: 41632 - DNA, 496 bp, Oryza sativa
  Clone ID: PAT_MRT4530_44960C.1
ggcacgaggacgccaacgggcacgagggtgtcggctccgtcatgggcgacatgtgggcctcccccgccgacgccatcttttacatgcaccacacctttaccgaccgctacttcacggcctggcagaacgccgaccccgtgaggcgcacctatgccatcggcgggcccaacgccaccgtcggccccgtctcgcccagcaccaacgactcgcccatccgcttcctcggcctcttccccgacaccaccatccgcgagatccaggacgcccagtgcggctcgcccttctgctacaagtacgactactagacgggacggggtgctgctgttttcgaggttgcaactagcagactcgggtttgatgacgatgttgtaaactgctggcgacccgtcggcatgacgaggagatgttatggttactatttctgctatttcttctttgtatatatttatcaagtaaatacctccccaacgagtctggcaacagtctcttcaatccc

SEQ ID NO: 41633 - DNA, 435 bp, Oryza sativa
  Clone ID: PAT_MRT4530_44961C.1
atggccacaatcagaggcaaatttgggatcatcatggttgcgatgatcttggtcgtgcgcatcatcgccttcgcatctgccagtgacaacgacgagctgccggcgttgttcaacatcctgcaacagaagcccgggaaggctgcacagccgtcatggtactacctctactatgctgatatcgagcctgttcactttgatatcattttcaaccatactatttttggctaccaagatgacaatggtgtcaaagcatctcctatttgctttgtcaaccttcttcctagcgtcgcaccaccactcaatgaagcaagcattgttggaggggaagtaaaggggctgtcaaatggtgtggagcttggatttggggcagtcgagaaggatgtggtcgatggtttctttttgttagtcacagaagacgtaggaggtagggtgtga

SEQ ID NO: 41634 - DNA, 366 bp, Oryza sativa
  Clone ID: PAT_MRT4530_44962C.1
atggagcagcccagcactcactctctgggtgatatgccccaaagcgggaggtggagggccgtgcccatgttggcgatggcgaggtcaagctccgtcgaggcggggtctggcttgtcccactaccacggccggacgacggagcggaagagcgcccctgcatgtctagaagtagttgttgccatacgcgacacagccggcgtgctgcagcgcgtcgacaccggcgggaagcctgcgttggagaagcgttggggggattgtggcgcctgcgagaggatgggtggcatggagtccaggatgattcccatcgtgcccttggaaattggacggttagattcaatctggtaccaccaggtactagtaccttga

SEQ ID NO: 41635 - DNA, 535 bp, Oryza sativa
  Clone ID: PAT_MRT4530_44963C.1
gtattttaccctggaagaactggtttcaaagagccaacatggtgtgccacctctcccatcaggggtggtggccacaaccttgtacaaggataagtcagatttccacactagcaatccaaccactttgtgaatcagtgccatctccgatgttcttgttggagttcataatccatctcctctgcaggtgtacagtttcagatgccacgtcgaaaaccttcatactgtaaattactagcacacgatcaccggttgtaatcaccaaacgtggccaccccggagcgggtggaagttttgttgactccttgcttaggatttggctagagagagagggtcacagggagcttggctcggtggctcttgtacataaatttggtggtgattactgagtagtgccaatgtaaatatctcttgttctcggttttccatttacgtttttgttggtttgagaaactgctcactgtaactctcactctacaaggtgtaaatatcatcaggttttgtgctgctgcaatgagaaaaaaaaaaaaaaaaaaaa

SEQ ID NO: 41636 - DNA, 362 bp, Oryza sativa
  unsure (1)..(362): unsure at all n locations
  Clone ID: PAT_MRT4530_44964C.1
acagcgcccgnccttttttttnttttttttttttaccccatatcgccatgctatattattaaaaacaaaaactcctcattcccanctatggctttggctcgatctgatacacagaacaaacagaaaacataaaaaataacaaattttaattgcaagcgtcaagcccacctacttaaaaagtgtaaaaacatctgccgtcttcgctcctcaccgttgagtcaaaattcttggcaacaaggtctatgcaaccttccggcacaagcaggttacctgcttgctgtgctccttgccctcctcctcctatgcaagccccctacgattcatcaatgggatgccaatttctagagatcttttattcaact

SEQ ID NO: 41637 - DNA, 975 bp, Oryza sativa
  Clone ID: PAT_MRT4530_44965C.1
atgaagtgggggcttagaagtagtagacacaaccagagagagaagcagcagcgcacacaagaggaagagcacaagcacgagcagcaagaggacaagggcaacaagagcagggcggccttcctgtccttctcgccgctcgcgtggctctcgaagctcacggccaagaacaatgctgctgccgctaaaccgaagcctgccgcgccggccgacaagagcgccgtcgccgccactggcggattcccttcttgcttcttcaagggcgcgagctcgagcacgagcacgagcgtgagcttgagctcgagcgcggcgtcgcagagcagcctggcggattcctcgcccgctgaccaccaggcgccgcgccgcctctcggttggcaacgacggcgacaccgccgaggctgcggccgcgcggcagctgtaccaccgccgccgccattactcggtcggcggcgaccgggacctccaaaccctccgcaacctcatcccgttctcccgggccgcttctccgatcccggtgcctgctccgttcgtcccggcgctgaagacgacgccgccgctgctgccgtccgacacggacgaggagaagcggccgcggagccgccggcgccggcgccgcagcggcggcggcgggcggcggtcgttctccgggaggaccccgggcgcgcgggtggctgccaccgtgcgcgtgcggtccccgcgtcgcgtggcgtcggcggcggcggcggcggtgtcggagctggagcggttcgcggtggtgcgccggacgagcgacccgcagcgggagttccgcgcgtcgatggtggagatgatcgcgagcaagcgcatcggccggccggaagagctggagacgctcctggcgtgctacctctcgctcaacgccgacgagcaccacgactgcatcgtcaaggtgttccggcaggtctggttcgagctcaaccccgcccgcgtcgccgccgttgcgccgccgcgcagctga

SEQ ID NO: 41638 - DNA, 439 bp, Oryza sativa
  Clone ID: PAT_MRT4530_44966C.1
ttcccaccgttgtttctgctcctcccacccgccgccgccgccgcctcctcctccctccccttgactcgcgacgacgacggcgcacgcgagctcgccggagggtcgccgcctccccttccccttcgcggtagccgcgcgcggcttcctcctcccgcgtcgccgcctcgcacattggggatctcccgttccccgttcccccgcgcaccgctggaaggctattttgccgcggccgcaaaccctagcttccgccgccgtggtgaggggcggtggcgggaaggggatcgagcggtgcggaagttattggacattgattatctttggtggatgacgtcctcgcaataaagtgggtcagtgtttcgaaagattctgcaagatgttcagagagggtttagaaactattaccctagaagattattactgatgccagtacgtgaacgga

SEQ ID NO: 41639 - DNA, 1673 bp, Oryza sativa
  Clone ID: PAT_MRT4530_44967C.1
gagcaaaaaacaggggaaatccactaatgaagtagtatatccttttcaacattgcaacaggcaactaatgcaaaaaaagcaaaacctgaaaactatgctcgtatgcttacatcagtacaagcactttggagccgtgactgaaggtaagtgagctcaagacattcccctcagcaccatggccaccactgtgagaaagagcaacaaagctcactcatcacgccgccgcacaaaaaaaattcactccattcttccattgcatacaataagcccaagttaaaaacggtaggctattgtctacactacactatctacagctctaatcctctaatgtagagcaactttggtcgagtgcacaaactcactttcacttctgagaactaatcaccttctcttgctgaaatcctttgggataaatcagcactgaatcgacgcagagaccacctttcgtatgggtgcagtcgatctgtgccagggagaacttgagcttgatgggttgttcagtcgtcgatgcgacgaaatcaccaacatggtaaagaatccagcttcctggctcgtccaggtagcactgggacaaggcgtgctggccgtctgacgttgagagctggaagcgcacaggcttcttgtcccagccatggatctgctccgagctgcagacgcggcgaccgaaacgtgtggatgccttcccaagatggagcctgaagtagaggctgtaggtccctgccgggaagcagaattcgagctctccaaccacctcaaaccaccatatctgctgcaggtatgcaaccgaatggaacctagattccgtggttggcatgtgagaccagtatctcctgtcatcaattcccgttatcaccagtgatttcgacgacaaggctatgcaaacaccgcctttgctcttctccaaccataattccttcttgccaccgtcaaatggcacagccttggcgagcctcgcgtagacttccttcttccccatcacgctcctctctcttcctcctcctccgccctccatggcgccatcgacgaagtccaggagatacccgtaattctccggcagcttcgcttcccacacgaagtccgccgccgcggcgccgcggaacgcgcggttgagccgcgcgagccggcatatctccggcgcgtccaggtgcagcagcacctcggcggcgcacagctccggcagctcgcccagcccggcgccgcccgcgaccttgccgacggcctccatccccgccgcgaggtctgacacgcccgcgcccatatgctccctctcgccgcctccggtcgccgcagcttatctacgagcacaaaagccgcgcctattattggattccacgcgcgcacggcgcagcaatggggaaccagcttccaaagaactcgatcccgaatcgagttctcgcggaatcaatcctcacgacgaataggtgtcagtgattccagcgttcccgattcgaataaccggcgggaaaaatccagttcttgcaacaaaagcctcccaataaccgcacttgctatgctttaagctgcaacttttggagagataaagcatcagatgccaaggactcagcgcggggcaagagtgcaagactatcgcgtcgcggaatagaatttgtgcgagctcgcgctattcgtgaggtaaaaacgcgagctccgatctccggagatgggcctcgtgc

SEQ ID NO: 41640 - DNA, 2614 bp, Oryza sativa
  Clone ID: PAT_MRT4530_44968C.1
ctagaatctgtgggacaagctctgcgtatctctatcccaggcaattctcctcaccacataggactgcggtttaccatcaaccatgatctgttaatctttttgagtcgggctgttctgatgcttgagattgacaactatcaaagcgatacctctcataaaataactacagggggcttaaacgcaattcatgacaacaaccaggcccccatcagcctagcttgagatcaagttaaaccaaggattaaactcataattataagtaaagaataaaataactcttaggtgattggtagtgggaaatggagtagaaaatggttagatcctaacatgggtcatagaagtcgtcgaatgcgggtgaggatgtatagactagtatgttgcatacaagatgcacgggatcccatattccctgaaccactcccctcgccatggggcgatcggctcttctctaccatactcttccaatacagctgttccccattccgttgctgaccgctggccagaaggcctgtccatatccacagcccagcgtcacgtgacgagttagaaaaacacaatccctaaacagcaatcaccggccctctcggttgtatacccacgctgagcatattcagctgacagataaccaaatgtgtcaattggtcttgttcagacacccatgtctccatctcgctgccatctagccaacccaaaatctccgacctgcacacgatatgacgatacttcaccctcattatgtggaaggaagttgaggctaaagaccacatagagatgggaatccagcgatccattgcaaatgtactcgtaaactagcaaacgcctcttgtcttcgacacagaaaccaatcagcattacaacattccggtgctgtgcacagcttagaacttccacctctgagcaaaactcaacatcaccttgggagctagcaagtttgtattgcttaacagctattgcctggccatcaggtaggacacctctgtgaacagacccaaacccaccctcagccaagaaatttgcttgggagaagccaccagttgcaagttccagttccgcgtagctgaaccaccgtggaggtttcccaaatacaggtgttttatgctgacaaattgaacacagaggcggtggtccaggaggtgcactccttgacaatgaaacaacatctctcacatttcctctgaagttcaagtcagacctgcttctgattgcactgatttcagccaagagatctagcttcgagatcttctcgagcaaagcatctgcggtaggagtacgagttcttctaggacggtttcctgctaatcttgaggacgcagatccttttaaaatgtcagccatccatggctgaagggatgatgctgctggaggagttgaagcttcactctcagaatcagatacattgacatcagagtgctggaagttatccttggttgcctctttcttgaatgtgctattcgtttctgaagcagaatatggagatgtgccagggtctgagcttgaaacggaggatgttccaacatcagtgctaccaaaagctgtttctgactctggactgctacttggtgtcacagccggttcacgaatcggacatcgctgttcgttgatactgctttcggtttcaccaactgaatcactcaactcaggaagtggcgggagaggtgattttgattcttttgggggagacctcaccagattcagacgaagaactttgggccgagagcgcttcatagcaacaatgttgcattgaagttcttccatgcaacgtttctcttcatgtttcaactccttgtctagcacaacccagcttgcttgggcacgctttgattcagtagccacaccaccaggagatgcagggataaccttaagttttgtaattatcttgttcggatcataaaaatcacgaagtttcagcatcatttgattacacaaatcagcgacatccgaattctgagtcaacacgctcctgtgggcgctcgcacaaccccctgcaaagagcgggaagccccagaacttcttgccagagttgtgcggcggcggcatgacggcgaggagcaggatggtgtcgccgtgctggacgacgtgcgtgagagcccagacgagggcggccttggagatgtccctggcggcggcccgcacggccaccacaaccaccgcctccgctccccggcccttgtccggaccggagaccaccgccatgtccgagagctcgagcagcctcctagtgcaatccaaattaaacaccgtcgttcaactgtaagtacagggaacgaacgcggtgccaccgccgcagctagcacgccgacgaccacctcctcctcgccggaatgcccctcactggcgtttcagccggcagcgattgtatgcctcgattatcgtggaagaagagacgagacggccattggcccatgaaacggaaacccgatgtactctcctattactacggtgcggcacggatgggccccgtctcgtcaccagacggctcagatgtgcccacacgacagagccttactttgtggacccacggccgtgtcctgtttggacgtggacggacagcaaaactaggccgtccgtccgtcgccgtcgatgggcacgggctgacggcgtcagcacggcatcg

SEQ ID NO: 41641 - DNA, 741 bp, Oryza sativa
  Clone ID: PAT_MRT4530_44969C.1
cccacgcgtccgcattctcccacgcgtccgcccacgcgtccgcggacgcgtgggttcctagatagagaaccaccgtgaggaacatggccgcgctacaaagatcttcgcagacatttagaaggtccggttcatctggcttggtctgggatgagaggcttatgttagatggtcatagcgagagagatcaagaagatggagccttagagctgagacactcccgtagtgttgggttgattgggctgcagcgtaggcatggcgatggtgcagggcacaccaggtgcaacaacagccaggcgttccatactcgccgtgtgcccccagcacaggatcctccttcacccaaggttcccggatgcatcttctgtggaatttttaggaagccggtactttcagagccatctaaaccaagaaggttctagccttttgtgctcttctcaactatctgtgcagagctatcagtttcttttttctttgtggctttgtagtcaggtccatcatgtatagatgtaagtagtaagtcatatagttgcagttgctgtcagctttcttctttttatgctactgttctgtttttttttttactggtttccctcttgttagctcaacactagttagcagctgtattctagaatgcccgcctctgccatcatgtacttgatagagtatgtgcatatcgttgtatcatatgtataagccctttgtacatataaatacataatatgatgtatggcgttttctatc

SEQ ID NO: 41642 - DNA, 438 bp, Oryza sativa
  unsure (1)..(438): unsure at all n locations
  Clone ID: PAT_MRT4530_4496C.1
accacggtgattttatattttggggtatccttatggaaatctaatagcaagacccaccgactctatgttcgagaatgacctgacccttacccaatttgtggagaggaactttcccgatcatatattacatatccttgatgttcatctccnggaagaatcacagggattcatccatcccaccagtaaaccgaaaatcccccatacccatgcttggtttctcttccaccattacccctttcttgtacgtgtcggatccccccaaacgtatgaacctgagagaagtacccttagattcatgcgattccaacttcatatccgatcccattagccagagagctagtcctggttcgctaaagtgatttatagcgtccctggacatgtgtaccacccaggtttgtcgataaatgccccaagatgatgattttcgcatgaaaaaaa

SEQ ID NO: 41643 - DNA, 1656 bp, Oryza sativa
  Clone ID: PAT_MRT4530_44971C.1
atgctaagcaactcagtgcatctaacacgcatccaccatgaaacaatcatcagccccatccgaagccaagaacttgcccgatttgcagcaataaataccagaaaatccctcggaaatccgtataattgctccacgttgactaatcgccgacacaaattagagaccccccaaaaagaatccacgcgcttgggagaacggcgaactcgcgttgtaatcgcctcaaaccacaaacaagaagaagaagaagaagaagaagaagaagaagaagaagaagaagaagaagaagaagaagcaaaccaaatcgaagcagcaagaacgaacaaaccgcaacgcacctctcctcctccaacgcctccttcctccctccctcctctccacagggatggatctcccggctgtcccacctcttcttctcccctctctctcgctcgctcgctagccgcggcctcctcctcttgcttttgcttgtcgggacgcagcgcaatactacataagccgaaggaaaaaaaaatcctctctctctctctccgaaaccgaaatgatttccgcctgagggaggggaggggtgcagtcaaagcacccaccaccaccacaggacgcggggcccacgcccacagacaggtggggcccacctgctgccgccttggggtttggttcgtggccacgccttttgaccggtcaaatcgcccggaccggggactgcgtcgcggtgcagcccccgtccgtgtcgctgtcgagtggggcccatactccgcgatggcccacgcgtcagtggggtgctacggtgctcggtacaggatcgtcatccatgtgccgccgccgccgccccatcgccatccgccgccgccaccgagagccatccgccgccgctgccgccgccccatcgccatccgccgccgccgccgctcgggccgagctcgcatggacgcggggtggccaattggcacgggcggcgaacacgacggcaggagcgagatgacggcgtcctctaccatatgccgcaccggccgaatccgccggggcatggcgatgacgacgacaggcgacgatgacctcggctggcgacgaatctggcgacggcgtcgacgacggctagcgacggcgcggcgtcgggcaacgacgacctcggagacgacggttgacaacagcgccgacgacggctggcgacggcgcaacgacgacctctcggatctggcaatggcacgacgacggcggcgtccggcaatagtggatctggcgccggcgcgacgacggcgggcgacggcggcgtccggcaacgacaacctcgacagcaccagcgatggcatcttgacgacgacagttggcggagagagaaaggggagagggatgctgtcggcgcaacggctttcctctgcgctagatgcaagtctacatggtgaagaaggccactccttagagcatcgcgttgtaaagtggtcgacagaaaatcctaaaagatcttgcgtaggccatgggcatttaccatggttgtctgtctacttcaatcgtcgacagatggatcacattcatgtaaaaacttactacactcccggttttcaaaccgggactaccaatccgggacgatctttagtcccaggtgaaaaaaccgggagtaaaaatacatctttagtcccggttggtgttaccaaccgggac

SEQ ID NO: 41644 - DNA, 272 bp, Oryza sativa
  Clone ID: PAT_MRT4530_44972C.1
atgtcggacgtagggggagatgacgcgagtaatggaaatgaagatggagcgacaagcaagggaacacctgcatctaagggagtcactataccttttgattacagtaaaattaccattccctcacataactttgtctctgtgccttccgggcgtgctcctccatttgatgggacacattatgccgcttggaagcacaagatgaagttacatttaatctctttgcatcctagcatttggaaggttgtgtgtacaggtgttggtgctccaaatga

SEQ ID NO: 41645 - DNA, 1578 bp, Oryza sativa
  Clone ID: PAT_MRT4530_44973C.1
ttttcacaaggaaagaatttaattactgaactactaatatacgttcactggtgctacaagatgccatgacatcacaaaattttctatctgatccaaaggcttaaactaatctaccttctcaaactacacagtacacacattcttctcctacctaccctaaaatactggtactattcacagtctacacccagaaaagttaaaacatcatcttgcggtccaatctcgatccaacggccgaagccaacgcggaggtcttctcctggagcgcgcgcaccacgtcggccatggacggcctcagcccggggctgtcgccgatgcactgcatggcgagctccgccatgacagccgcctctgcgccgtcgtgctcgcctccgagcctccggtcgacaacgtcggccaccttcccttcgctgagcatgggacctacggcggcagtgagacgccgcccggtgtcgcggcagacggcctccttccccgtcacgagctcgagcagcagcaccccgaagctgtacacgtcgctcttcttcgtggccacgccggagcggatgaggtgtgggtctacgtatcccggggagcccatgacggcgcgcgccgacggcctgcaccccaccgtggccgagaagccgacgtgggcgaagccgaagtcgcagagcttggcgttcatgttggcgtcgaggaggacgttggacgccttgatgtccccgtggatgaccgccgggtggcggctctcgtggagatactccagcgccatggccacctggaacgcaatcgccacgcgccgcgcccagggcagcaccgacgccacgccgcccgcgacctcgctgcagtggagccgttcgtggaggtcaccattcggcgcgtactcgaacaccagcacaccttcatctcgttcgtcgcagtagccgagcaggcggacgatgtgcgggtggcggagggagaggagcacctcgagctcctggcggaaggcgcggtgcaggcgctcgctgctgcagtggaccttgacggcgccgaggcgggaggacgagagcgacgcgaggtacaccgtgctgaacccgccgtgcccgatcacccgggacgagaacccccccgtgacggactccacgtccgcccacgcgagctgcctcgccgacgcggcggcgacgttcttgcagctcccttcctcctccacgccggccggatcggccgccacccgcgagctcattgcacctgcctccccgcgcttcctgacgtcgccgccatcgcaccggcgcacgcaggcgaagagaccacatccggtgaacattgtgctagcgcgcgcccgccccgaagtgagagatccacgagctctggagggcgacgaaacgggagagaatcgaagggtacaagtgaggcgaggcgaggcgaggagtgtgagtggagggagaataagttctccctcgttgatctgtgtagctttcagctttgttgctgttagttgtagctacgttcttggctttgccttactggataagaaggggacaggttgtgcagaggatccagatcaaagaattgctagtggctggcttcctggctcttgcctcagcccggggatccactagt

SEQ ID NO: 41646 - DNA, 331 bp, Oryza sativa
  Clone ID: PAT_MRT4530_44974C.1
aaaaaaaggggggtattaacatacccaaaaattttagggtccaagccagtgcagtacataacaaacctccattttaaacaaaaaaaaaagataacattgcaaacctatcaacatggcaatgggtatttacacgcaatttaaaaatggtaactcaaaacgtttatttacaacaaaaagcctttccttactatcaaaacattttgaagaattggctaaaccatggcatgagaatgtttttaacaccggatggataaaaaggcctggctccaccaaaagaattcgggtgggaagaaaacctttggaataatttgttggccaggaggcgtgttcg

SEQ ID NO: 41647 - DNA, 311 bp, Oryza sativa
  Clone ID: PAT_MRT4530_44975C.1
ggggggaaaggcccctgggcccccccctccgaaccttggggtcaaaattctgattaagccccctcgaaagttcggggccctagtttcccaaaaaacccccgattggggggcccaaaaaaaaaagtttcaaacaaaccagggcccttctggggccaaacattttcccaaacaggggttgtgtttttgccaaacccccaaaaaaaaaatttccccccaaaaatagggcggggccaccctatttccttatcctccccccggggggggaaaagggggtgtaacttgggtccccccaatttttgggaaagagaccc

SEQ ID NO: 41648 - DNA, 564 bp, Oryza sativa
  Clone ID: PAT_MRT4530_44976C.1
atggcttcatcaatggaggacaaccattccaactcctcacagtccttatggcggcttagtctcttctacccttatcttgaaagcgtcatagcggatgtgcagtccagcgtcctagtagaccctgtctacatatgcgtagagtgcagcgaggtgcacagaaaccagcagaccatggctgcacattgcaggtctcacatccgttcagatggcatggagaagggcactgtcaggcacatcaagtacaaccctgaccataccttctccctgctgtgccatcaatcgtcgaacaagatctactaccaggtgacagtcccaaattatcccaataaccctaactcttctgagataggagtagtttgggcgtcagatatactgaagaaatgcgtagatcttggctatcttcagcacccagcatcagtcaatgccagtagcgctgtttttgttccagctgctacaccaacagcgcttgatctgacacttaggttgggtcctagatctactgctggtagcacgaatcggcagatcgtagaagccctttttgctgggtctggaggttcagcgtga

SEQ ID NO: 41649 - DNA, 1803 bp, Oryza sativa
  Clone ID: PAT_MRT4530_44977C.1
atgactgagctcgcgtctggcgccgtgagctcactgctggcgatcatccgcaacgaggcggctcttctcggtggcgtccgggacgacgtgcagttcatcaaggaggagatgaagagcatgaacagctttttggcgcacttggcgaagagcgctccgcagggtggagagcacgacgagttgcggggaggcaaacctgataagaatcaagcaacatgtgaacctgatgttccacctgataagaatcaagcaacaggtgaacatgcaggtgtaatggatcacaatggagaggcttattttacagaaatagagcagaagattgacgaaatcaagcaggaatttaaaaaacagctgaaaatcaaagggattatggacaagatcaaacatcacttgatcgagtacaagatcaaacatgacttaccgaatgagtgccccctcattatcctaaaatttgatgatatgatggatggatccagatgggaggagttcaaccttgattggacaatgggttgcagaaggcaaagatttgatgccctcatccatcggtatcttgtttgtcctgttgatattggtggcacaggaaaggtgaagagctgtgtggtaaatgatccagttcatgggttcattaccacaattgccagaaaacaacatattgtggagacacgcctatcacatcatttggctcgccacttctccattttcaatgatcttcgactccgcagctctgatggaattcacacattcttccaaagcctctcacgatcatctcgagtatccctactaaaggtgctagatctagaaggttctcagtgctttggtgttaagaaccagcggtacctcaaggacatctgcagcaagatgttactgctcaagtatctgagcctaaagaaaacagaaattacccaactgcccagtgaaatcaactgcctccgtgagctagaggtattggatatccgagaaactaaggtgcctgcaaatgcaacggttaatgttctgctcttgaagctaaagcgtctacttgctggtcacattgattcaagtccaagaaattctggcactagcgttcagattcctcacaggatagacaagatggtaaacatagaggtactatctaatgtcaaggcccaacgccgtgatgatttggaagatactggaaagctatggcagctaaggaagctaggtgtggttgttgatgataagagaggtcaccttgggaatttgcttaaagcaatcagcaacctacatgagtgcatccgttctctgacaatcactatttccacaaccacacacaaggatactccttcaaacccagagttaccagatcatattggctctgaccttccccatcccaagaaacttgagagtctaagcatcagtggagccaggcatctttttccattgttgatcaaaagtgataataacaagcttgccaaggtaactctaagtagcacaccactgaaccaagatgatctggaggtcctcgccaagctacccaagttacagtgtgttaggctccaacacatttcatgcatagtgagtgagctcatcttcaaggaagaaaatttcaaatgtctcaagtacctacttattgagggctttaacttgactaatatcacttttgaggatggatcagcctgtgagctcgagaaaatggttttatcttccaccagcatagagtctgtctctggagttgatgtgcttccgaaattcaaagagcttgagttgaacaacagccatgtcccgaatgagttgaaagaagccgttgaaaacaataaaaggataattcttaaatgtaatgaaccatga

SEQ ID NO: 41650 - DNA, 144 bp, Oryza sativa
  Clone ID: PAT_MRT4530_44978C.1
atgcctttaagagtgtggaggaggaaatcactagcaccgattgtggggttcaaccgcttcaccgaagtggctgacatggagatagtgaataccctctcagaaatgcacccaatcagtaacatcatataccagtcaagattcaag

SEQ ID NO: 41651 - DNA, 3888 bp, Oryza sativa
  Clone ID: PAT_MRT4530_44979C.1
atgactgagctcgcgcctggcgccgtgagcgcactgctggtggtcatccgcaacgaggcggtgctgcttcgcggcgtccgggacgacgtgcagaccatcaaggaggagatggagagcatggacagcttcctggcgcacctggccaggagcgccccgcccggcggcgagcacaacgagcaggtgcgcacgtggatgaaccaggtacggctgctcgcccaggactgcaaaaattgcatcgacctctacctctactacagcgggaacaaggacatctaccgtgccaagggcagactccagcgcggcctttggtgggtttactggtccatgcgcaagatggtcgcgcagcaccgcgcggccgtccagctaagccagctcaaggaccgggcgcggggcgtcggcgaccgacggctgaggtacggcgtggaggttccagccacgaccaaggctgcagctgcacctgatgcagcaggtggctttgctgctggagacgatggaggagaagactgtgaagatcaacttgctgtggcaacggtgatccatcattctgctcgaagggccgtctttgaggcccctactttggacgactacctgaaggcaaaactattggagtggatagaagaaattcctggaggagccaccgagacgttgtccatggccattgttgtaccaaatgcacataataaggaagtcattgctcttgcacatgaaactttggttgctccaaactactaccgtcgcagtatcattgtcaacgtaccggccatgcacctggattctttacctctacgacccaaggaggttctctactacatcttgcaggagctcatgcgtgccaaagtggccggatcacagaagcaggccactgatcaaggacaatgggaggaggatcctgacccttggaaagattacgtgaaaaaatgtggtaatcaccgtagcaaaaaaaggatgctccgtaaaattaaaaggaaaatagaaaagatgaaaatttatgaaaagtttgagaagattaagagtgatattcaagatggacagcagaagggcgataagacgctgctgcttcagctacagaagaagggtgtgcatcgggtggacctgcatgtactccttcagctgttgctgttccagtctcagcaagaccaagcgtcagcagtagacatgtataaattatcagagtggaacggcagcatcatcatgaaaatagccaggaagcttaagagacatatggaagcagatgaaaagactaaggagtttaacaagcaaattggagtagtagaagaaataaccaagcaaggaggagagaggaaggaggaggagaaaaatgaaggggaagaagaaaacggagaagaagaggggaaggagaaggaactcaaggggaggaaggacaaggagaaaaaggagaaaggaggacgagaagagaggaaggaggaggagcatcacgagaagcaggaaaaggagaaagaagaagagaggaaggaggaggggcaaaacgaggagaaagaaggaagaaaagaagtaggagaggaggaaaaagaagacgatgatgatgattatgatgatgatgatgactacgacgatgatgattatgatgataatgaagaagaaaaaaaatatgatgatgatgatgatgacgacgacgacgacgatgaccctattcatcttcatacagctcaatacatgcaaatcctacaagaagtgttcctaaagaccatcagctgcaaggcccagcagcaagaaagattggcggccaagcaagctacaaagactgcaacgactacattggacgaggaacgaatcaaacaaatgatcaacgaggcaaaacaagatatcttaagggagctgcagggaggcaaacctgataagaatcaagcaacaggtgagcatacaagtgtttcagatcaaaacgaacaggcttattttgaagagatagagcagatgatcgaagaattcaagcgaaaacttaaagatcagctgaaaataaaaggggtcgtggacaagatcaaacatcacttacagggtgagtgcccccttattattctaaaagttgacaagatgatggatggatccagatgggaggagataagaaaggctttgagcctgttagaatgcagtgccgatgcactgatcttcaccacagagagcaccgaacaggctaaaggatattgctatccaccaagagaacctatagactattctcttgttggtttataccattatacagtgcttgagataactagcaagcagataaatgaagacaactataacccccagatttttcgtgacatcttggagaagtgtgaggggcatgaattctgcatgaagatcttcactcatgctctctatgctaaccccaagaggagcaataaagagttaagcaagctacacagcaccttgcaggcttcacataaatcacttgacgccatagctaagacgatgttcatgtactcttacaatgatctgcctaaagaatacaagtcctgcttgttgtacctagctatcttccccaagggtgagaagattaggcggtcaaccttggttggacggtgggttgcagaagggttgacattcagggaagattggcccagttcagtgcgtcaggctaaccgatgttttgatgccctcatctgtcgatggcttgtttgtcctgctgatattggtgccacaggaaagatcaagagctgtgtggtaggtgatccagttcatgggttcattaccacaattgccaaaaaacaacacattatgcatacacgcctatcacatcacttggctcgtcatttctccattttcaatgatctccaagtccgtagctctgatagaattgacacattcttccaaaacctctcacgatcatctcaagtatccctacttaaggtgctagatctagaaagttgtcagtgctttggtggcaagaaccagcggtacctcaaggacatctgcagcaagatgttactgctcaagtatctgagcctaaagggaacagatattacccagctgcccagtgaaatcaactatctcagtgagctagaggtattggatatccgagaaaccaaggtgcctgcaaatgcaacagttaaagtcctgctcttgaagttgaagcgtctacttgctggtcacattgatccaagtccaagtaattttggcagtagtgttcggattcctcgcaggatagacaagatgataaacatagaggtattatctaatgtcaaggcccaacgccatgatgatttggaagatattggaaagctatggcagctgaagaagctaggtgtggttattgataagaaaagtcaccttgtgaatttgcttaaagcaatcagtgacctacatgagtgcctgctttctctgtcaatcactattcccacagccacacccgagggttctccttcaatcctagagttaccagatgatattggctcttgcctaagacaccatgccaatattcttgagagtctaagcatcagcggagccatgcatctttttccattattgaccaaaggtggcaataacaagcttgccaaggtaactctatgtagcacaccactgaaccaagatgatctggaggtcctcgccaagctacccaagttacagtgtgttaggctccaacacatttcatgcacagggagcgtgctcatcttcaaggaagatgatttcaaatgtctcaagtaccttcttattgagggttttaacttgactaatgtcacttttgaggatggatcagcctgtgagctcgagaagatggttttatcttccaccaccatagagtctatctctggagttgatgggcttccaaaattcgaagagcttgagttgaacaacagccctgtcccgaatgaggtgaaagaagccattgaaaacaataaacggataaatcttaaatgtaatgaaccatga

SEQ ID NO: 41652 - DNA, 255 bp, Oryza sativa
  Clone ID: PAT_MRT4530_4497C.1
ttttaccctgtgagcttgggtttttagtacttgcttgatgaattcaagattcaatgaaagatgttcagcagagaggaaaccaattcagtactagtactcggctatgctaatattcagaactcacaaccgagagaagaaaacaaactcaagagtaaggcaaaccagtaacacaactgtgatagaccactagttaccaagggagaagatctccaaagaacacaaatggaaattacccaacccaaaggaccagatgac

SEQ ID NO: 41653 - DNA, 1666 bp, Oryza sativa
  Clone ID: PAT_MRT4530_44980C.1
gtggatccccgggctgcaggaatcggcacgagggctttcctctagcagttttttttttccaaacacgtagcctagccaggcaagagctgaggatccaaacatgctttgctctcaccctgtcactccctccgatgtactcctactagaataggtagccactcgcgtgttagctcgacgcacaatgttgagctgtagtggcaacatgctgcgcgccgtccatgtcctcgccatcgccgccgccgtgctgaccctcgcgcccctcgccgcctcgtacccatggcaggcctgcaacgggagcagcaactacacggcgaacagcgcgttccagcgaaacctcggcgtcctggccgccgccctgcccggcaacgcctccacctcgccggacctcctcgccaacgccaccgtcggcggcgcgcccgacacggtctacgccctcgcgttctgcccgccgatcgacaaccagaacgcctccggctgccgcgcctgcgtcgccagcgccttcgcggacgcgcggagcctgtgcccgaacaacaggggcgcacacatcatctacgacggctgcgtcctcaccttctccggccgggacttcctcggcgccgccacccaacccggggacattgagaggaagctccggaacaccgagaacgtcaccgtctccgacgtcggcgagttcaacggggccatctacgaggtcctcaacgccacggcggactacaccgccgccgcggcgaggaggttcggcaccggcgagatcagcttcgacccgacctacccggtcatctacagcatggcgtggtgcacgccggacatggcgccggggcgctgccgggcgtgcctggcggacaccatcgcccagatgcacgcctacttcaacccgaacgcgcagggcgccaggctcgtcggcgtgcggtgcgccgcgcggtacgagatttacccgttctacaccggccgcggcatggtgcaggtgccggtgagccggccgccggcggtgccgggaactcccgggaaaaagagtaaaactgaccctgagaaacgcaaacaaatcgattgggcaaagaggttcatgataataaaaggaatcactggaggattgcaatatctgcatgaagattctcaattgaagataattcaccgtgatctaaaagcaagcaacgttctactggacgcaaatatgaaccctaagatttcagactttggcttggcaaggctttttggagatgatcagtcacaagaaacaactaaccgcgttgttggaacttacttcggtgtgttgcttttggagatcatcacaggaagaaaaaacagtgactcctacaactctgaacaagctgttgatcttctgagcctcgtatgggaacattgggcaatgaaaactatcacggagatggttgacccatatttgaggagtgattcttcctctctagatgagattttgagggcggaggatggatggagaggggtggagtcaatcgcgcacaaggtgttcgaccgacgggcgatggtgaaggagcggatgagctcgggcaccgtcatcgccatggatgagctcgggatttggatgaggcaaaggtggcaggggctgagagagggcgggcaagatcaaattgagtggcgggaggccacgtttgaatacttaccggcgaaggattggcttgaccgcgtgtga

SEQ ID NO: 41654 - DNA, 1518 bp, Oryza sativa
  Clone ID: PAT_MRT4530_44981C.1
atggtcgaaaccactaaagatcacgaagaccatcaagagtggcaaatcccaccagagagatcagagacatgtatgcaggagagggccgagaagttgaaaggggacatccggacattgtttgggacctgcaatgacatttcggcgaggatgaacttagtggattccattcaacatcttggaatcgttcacctcttccaagagcagatagaagatgctctaatgagcatccatgagagtgaattcacaagctctagtctctatgaggttgctcttcggtttcgcctgcttagggagcatgggttttgggtgcctccagatgcattcaacaaatttaagggagatgatgggaggtttcgaaatgagatagcgaatgacccaagggggctactaagtttatacaacgcggctcacctcctcattcatggcgagccagagcttgaagaagcaatcactttcgcacgggagcaccttaaattgatgagtcaagacaatgttctcaaccctcctttagcttgccaagtcaggcgtgcacttaccttaccactgccaaggactttcaagagagttgagactatttgctacatgttggagtaccaactagaggaaggaaatatcccaattcttcttgatctcgcaaggctggattttaacctcctgcaacatattcacttgaaagaactcaaagcaatttctgaatggtggaaagatctttatggatacatggggctaagttacattagggatcgtacaatagaggggtacacttggtcctacatgatgttctatgaggaaggctttgcattcacgagaatgtttgttgccaaattaattgcactgtgcagatgggacaagagtgctatttctattctgccggagtacctcaaaaagtattatagtaaattgctgatcaactttaaggagtttcaggatcaagtgacagacaatgaaaaatacatggttgcttgcacaaaagaagagtttcaaaagcagtccacttattatctgcaagaagctgaatggtcgaaccagaaatacaagcctggcttcaaagaccaggtggttttgtctaccaaatcctcagctgtgcaattattgtgtgtggctgctatggttggctggggtgggacaatgacgacagaagcattcgagtgggtagctagtggcaacgctgcagtcatagcatgtgctaagattgggcgtttcatgaatgatattgctgcatttaagcgtggaaagaataagagagatgtcgcgagctccgtagagtgctacatgaatgagaatggggtcacaagtgaggctgcctttgcgaagattaatgcactagtcgaagacgaatggagatccacgaaccagacccgacttgagcatcgtacactgctacccatggtgcagcgaattgtgaactttaccgtttccatggcactcttctacgatgacaagaaggatgcatacacatttggcacacttcttagggagatcgttgagtctctctttgtcaagcctgttcccatctag

SEQ ID NO: 41655 - DNA, 3873 bp, Oryza sativa
  Clone ID: PAT_MRT4530_44982C.1
atgactgagctcgcttctggcgccgtgagctcactgctggtggtcatccgcaacgaggcggctcttctcggcggtgtccgggacgacgtgcagttcatcaaggaggagatggagagcatgcacagcttcctggggcacctggccaggagcgctccacagggtggcgagcacgatgagcaggtgtgtacatggatgaaacaggtgcggctgctcgcccaggactgcaacaattgcatcgacctctacctgtactctgggaatccagagattcaccgcgccaagggcagactccggcgacacctctggtgggcttactggtacctgcgcaagatggtcgcgcagcaccgcgcggccatccagctatgccagctcaaggaccgggcgcgggacgtcggcgagcgacggatgaggtacggcgtggaggttccagccacgacaaaggctgctgcacctgacgcagaaggtggctatgctgctggagatgatgaagactatgaggatcattctgctcgaagggccgtctatgagccccccgctctggaagactacgtgaacgcaaaactattggagtgggcagaagaaattcctccagacgccattgagacgttgtccatcgccattgtggcaccggatacagataacaaggaagtccttgatcttgcacgcgatactttggttgttccaggcaactactaccatcgcagtatcacggtcaacgtcccggcggtgcacgccgattttttaccgctacgacctaaggagattctctactacatcttacgggagctcgagcccggatcccagaagcacgtcacatatcaaggtgacccttggcaagattactacaatatttactgtggcaaaaaaagggtgcttcataaaatcaaaaggaatatagaaaagatgaatgtttacaagaagcttgagaagatcaagagtgatattaaagatggacaacataagagtgacaagcagctgctgcttcaactacaaaagaagggtgtggatcaggtggatctacatgtactcgttcagctattgctgctccagtctcaacaagaccaagcaaacaacaaagcagtagacatgtataaattaccagagtggaactacgataacatcatgaaaatagcaaggaagcttaagaagcatatggaagcagacgaggagcttaatgagcaaattagtgtagaaaagagaacaactaagcaaggaggaggaggagagaacaaggaggagaaagacaaaggagatggagacagagaagaggggaaggaggagaacgagaaagacaaaggagaagcagacggagaaggagagcaggaggaggagatgaaggacaaggaaaaaggaggagaagagaggaaggaggagccgcaccacgagaagcaggagcacaagaaggaaaaggaagtgaaagaagaagagaggaaggaggagcagaacaaggagaaagaggagagggaagggacagaagaaaaacaagtaggaggaggggagaaaaaagaagaaaaagaagacggtgatgatgatggcgtcatcgacgacaattacgatgaggaggaggaggaggaggaagaagatgacgacccgattcatcttcatgaagctcaatacgtacaaattctactagaagtgttcccaaagatcaccagcagcaaggcccagcagcaggacaaatcagaggccaagcaagctacaaacaccgcaacgactacattggatgaggtacgaatcaaacaaatgatcaatgacgcaaaacgagatatcttaagggagctgcggggaggcaaatctgataagaatgaagcaacaggagaacctgatgttccacctgataagaatcaaccaacaggtgaacatgcaggtgttccggaccaaaatggagaggcttgttttgaagaattagagctgaagatcgaagaaatcaagcaggaacttaaagagcagctgaagatcaaagggatcgtggacaagatcaaacatcacttacagggtgagtgccccctcattatcctaaaagttgatgacatgatggatggatccagatgggaggagttcagaagggctttgagcctattagaatgcagtgccgatgcactgatcttcaccacagagagcaccgaacaggctaaaggatattgctatccaccgcgagaacctatagatcactgttctcatgttggtctctaccatcatacagtgctcgaacttactagcaagcagaagaataaaagcaactatgacccccggatttttcttgacatcttgaaggagtgtgaggggcatgaattctgcatgaggatcttcacccatgctgtgtatgctaaccccaagaagagcactgaagagttaagcaagctgcacagcaccctgcaggattcacaaaaatcatttgacgcaatagctaagaatatgctcatgtactcttacaatgatctgcctaaagaatacaaatcctgcttgttgtacctagctatcttccccaagggacagaagatcaggcggtcaaccttgattggacggtgggttacagaagggttgacattcaaggaagattggcccagttctgtgcgtcaggcaaatcaatgttttgatgccctcatccgtcggtggcttgtttatcctgctgatattggtgccacaggaaagatcaagagctgtgaagtaggtgatctagttcatgggttcattaccacaattgctagaaaacaacacattgtggagacacgcctatcacatcacttggctcgccacttctccattttcaatgatctccgactccgcagttccgatagaattcaaacgttcttccaaagcctctcacaatcatctcgagtatccctactgaaggttctagatctagaaggttgtcagtgctttggtgttaagaatcagaggtacctcaaggacatctgcaacaagatgttactgctcaagtatctgagcctaaagggaacaaatattacccaactgcccagagaaatcaactgcctccgtgagctagaggtattggatatccgagaaaccatggtgccagcaaatgcaacggttaatgtcctgctcttgaagctgaagcgtctacttgctggtcacattgacccaagtctaagaaattttcgcactagcgttcatattcctcacaggatagacaagatggtaaacatagaggtactatctaatgtcaaggcccagcgcagtgatgatttggaagatattggaaagctatggcagctgaggaagctaggtgtggttattaatgctaagaaaagtcacctcgagaagttgcttaaagcaatcagcgacctacatgagtgcatccgttctctgacaatcactattcccacaaccacactcgagggtactccttcaaacccagagttaccagatcatattgactctaaccttccccatcccaagaaacttgagagtctaagcatcagtggagccaggtatctttttccattgttgatcaaaagtgataataacaagcttgccaaggtaactctaagtagcacacaactgaaccaagatgatctggaggtcctcgccaagctacccaagttacagtgtgttaggctccgacacatttcatgcacagagagcatgctcatcttcaagaaagatgatttcaaatgtctcaagtaccttcttattgagggctttaacttgactaatatcacttttgagaatagatcagcctgtgagctcgagaagatggttttatcttccaccagcatagagtctatctctggagttgataggcttccaaaattcaaagagcttgagttgaacaacagccctgtcccgaatgaggtgaaagaagccattgaaaacaataaaaggataaatcttaaatgtaatgaaccatga

SEQ ID NO: 41656 - DNA, 319 bp, Oryza sativa
  Clone ID: PAT_MRT4530_44983C.1
aatccagttcggcctccagagacatcactgacttcaaacggacctatcgccttcatgccaactacgatttgcgtgatcttggaatggaaatattatctcgtcatctttcaaatgcatccagtctcatatccaaattcatctcgaagatcctcaaccacgtgccacggttgatacgacatcgtttatggtgtagcgattgcatggcgatctagacttgttctgattggtagccatgtcgtacacgtcacactcgataaaagcgagagttatcccctaccagaagatcaggccacgagagagagcacgtcatcaagatacg

SEQ ID NO: 41657 - DNA, 5527 bp, Oryza sativa
  Clone ID: PAT_MRT4530_44984C.1
ggcatgggatcaccatgatattatttcagttaaaccagagtacaatgacagcagcagatgctcaactagtgctcgtttggcatcaattgctccttacagtggcaggaaggaaacttctgtctatgccactgatattattagtggaatcacaatacattgcaaagtttttgttgacagaatctctcggatcaggattttccatcatgctgtaaaaattgacctagatgaagttgccaccttgcgtgttcatgcctttgatgatgaagacaatgtgttctcatcattggtggggttacaattcctgtggcagcttaccccgaggtgggttgatactaatagccatcatctggttcatattccattgaaagaaacacatttaagtgactgcagtggcttttgtggtgatatgaatatacgatttgagcttgaagacaggaatcttggttcagatttatttgtggtcaagggcattgagattggccaagaggttgttaatgcccagttatttgaacctcagtttgaacatgtgaatgatacaatcactttaactgttgctgaagctatgtcactagagcccccttcaccagtccttgtgaccgtcggtgctatggtaaagttcaaactcaaggtttttcgacaaaaagttccccaagacacaagggtttctggccatgcacaagtatcatctctacatgttgttattccacaagcactcttcctttatctagttccggttgtggacgactctgctcattttcatgggataacaagtattccatcttcagaagtttggtatgtctttcctggacgaaaatatgtggtccttgctaaagcttttgctgagggatttgatttcaaggagatgtttattactgaggaaaatgagcttaaattggcgagcagtactgtggagttctggaacttatcacaggttccagacagttctgcaggttcctacgaagtgcaaacatctagattactaactccaatttccaagggaaaaggatacttagatgcttttttaacttaccgaacagaggcatctggaccagcaaaggttctcaagcttcaacaagaagttaatgtatgcagtaaagtgaaagccatatgggatgaagaaatggataattccagaactatctatcttccctgggttcctggagcttatcaggaagttgaactgaaggcagttggaggttgtggcaagatgccggaggactacaagctatcttcctctgatgaaagtgttgcttctgtgtccgactcactgattgtgcgcacaaaaaggcctggtcgagctgtcatcaaagtagtttctgtttttgatgccttaaattttgatgaggtcactgttgaagtatccactccttctgcacaggctatcttgccaaactttcctgttgaagtgcctgtcgggacacaacttcaagctgctgtgacgttgaaaacatctaatgctgatgctttgagcaccgaaaccttaaagcattatgctggttcttgggcacaatatggcaatccttgtgcttgggtatctctaaatgcgtcggctgctggtcaagccacactagttgcaacattttcctttgattcagagtcctattctgagatttttagtggacctatttttcttaagtccacttctaaaatatctgcatactatcctcttgtggtacttcaagcaggaagtgggaaccgatttggtggctattgggttgacttatctagaatacatagtggaattcagaatatggttaacaattctcccaaagagctgtacttagttcctggatcaaccatggatgtatttctctctggagggccggaacaatgggatcaactggtcgattttgttgaaactgttgatgttattggtgaatcaaaaaattatgttgttagctctactgctgtacaaaaattatccagtaggctataccgagtatcctgcccaagcaaagggaactttaaactgctgttctcacgtggaaacatgattggaaaagatcatcctgtgcctgctaaagccgacttgttattttggaagctgcaagcagagctgaactgcactgtccgtgctacagtcattggcttttcttcaagagtggatggccggacccgtgaagaagagcacatgtttcttcaaagcgcacgtgatactctcaccgatgctattcagttgcagattgtttcttccttacgagtcactccggattatgtcttgatagtttttcatccagaagcacaggaaaccttagctgttagtggtggaacatgtttcctagatgcctctagcaatgacacgcaggtggtgcaaatacttcaacatccaggaaaggcactatgttctcagttgattcttggtgctagaggcttgggcactgctacagttacaatccaggacattggcctttctcctagagcattaactgattctttggttcgagttgcaaatgttgactggattaagataaactcagaagagcacatcagccttatggaaggaagcacagaagattttcatatttctgctggaacgcaagatggacaagtctttagagattctcaggtccctcccatgcctccatgctcttgtatttcagatctttacacattaattgcatgtattagtgttgtctttgtattccttattgtgaaaattttattttctttccatttggtcatcctttatgataatttcctgtacaaatacatgggaattgaagtgcatcttggtgatgagactttggaacttattaattcacatgagttgctggacggaccaaaattttcagttaaagctgcgaaaattggcacaacatctctatattggcttatttggcctgcatcatttactacgtttactcttcaggtcactgctaagcaatactctggtcaaagagttttgagtcaggttgtcaaggtggaagtgtacaaaccactgcaaatacatccagagtatatctacctcacaccgggtgcctcttttgtgctttctgtaaaaggtggtccaaaagttggagttgtcattgagtacacaagtcttaatgtggaaactgtagaagttcaaaattctactggcaagctgtctgcaaagactgttggaaactctactatgcgtgcagttgctttttcaaatgaaggcaccttcatctgtgaagcttttggaagagttgaagtggatatccctgtggctatgatattgagtactcaaagtgaccgtctttgtgttggttgcagcatgcccatctacccttctctgcccaagggagatctattttccttttatgaaacttgccaaagttacacttgggttatagaagatgacaaggtggctatgtttcaattagctagatcttggcagtatggacttgatcaagggctatattcggaaggaaagaactatccatggttttcgaatggaagtagcaatgcttttattaatcatgtgattggaagatctgctgggaaaaccaaaatttctgtgtcaattacttgtgatttcttgatgactggcagttctgggtccatagcttacagtgcatccaagacaattcttgttgtgccagatcctcctctcgcacttggacttcctataacatggttattcccacccttttatactactacggaccttttacctagatcagttgacccagactcagatgacctggagagtactattggatattctctgctaaggaacattggtaaaagtgatcttgttttgcaaaatgctaacattattgatggaagtaaaattaggactggagaaagcaatgcgattgattgcattcaggcaaaggatcactcaactggtagaacagaaattgcatcgtgcctacgagttgctgaggttgcacaagcacagatagcagctgcagaatcatcaatccatatagcctatctttctgtacatgataaagttgagttggatataaaatacagtgatgaattaggttataccttcagtgaagcacttggaatagtccctgtaaagattgagacgaatcatcctgatgtcgtgtcaattcttatgccaaaagaaggcaatggtacacatggtacccatgaacgttttgtgttacaggcaagaagtcatggaactgctcttgtaaggttgcaaatcagccatattcccaagaaagccgatttcataatggtatctgttggtgcacagatgtatcccagggatgtggtccttcgttctgggcagcaactgaacttcaccattattggagaccggatggatgtgcgtggatccagtcagtggttaagtagcaatgaaaaagttgtgcatattaatagaataaccggtgaagcacaagcacgtggtgaaggtatagcagaagtaatattcaaaggtccaaatacaaaactgcacacaactgtcaccgtgctgaaggtgaaccagatagtagttaatgctcctgcggagacgctgacaaatgctgctggaccacctggtggatacaagttctctgtaaaattaagattcaggttcacagctggagattgtgacctgaaactggtgaatatacttcagcatacatcagttcttagcaacattagagaacaggatggtggagggaggcgtataattgtagcaggaactggacaaatagtcctgtacttcctccgtcccaaaatgaagccatttttgagaagtgattcaactggacacagcgcagactcctctatcaatcacattaacgtcccatttgactgcaaggttgaaccttcttttgttgggtttgttgagccgtggagtgatgatgctgctaaaaaatcttactgcttatttcatccatattcacctgcgcaactgttgcctgttaagttaaacctgaaggaaggatttttacacattgttgttcatgcaaatctaaaagaagatccaaaggtgacaggatctgctcacgccctctttgtcaaagggttctacattaaagaacctaggaagttaaatctgactccaagctgcaaccatagcatcatcactattggtgggaatactgatgttgagttattctggaatgctaaagatttactgtcagccagtcgtgttgatacaaatggaagaggtgttccaagtcaaattagttatcaggttgaagcacttaaaaggcaatcattctatgacaagatcactataattcttccagccaccggccagactgaagaaatagaagttatctatgacactggagaaagaagagagccatcgacatcaggcttgacaacattggctgcaatcgtgacatgcattgttgttccaatcgctacgattgcgctcttcatgaagttgctggagaagaaaccgatcagagaggcaccaccaagacacgcgactcctgcgcctgcgtcagcaccagcagccgcgatggctgacccagcgtccccagctactggtgagttgtcacctcgtacgcctcagccgttcatggagtacgtgaggaggaccatcgacgacacgccctactacaagcgcgacgccaggaggcgattcaacccccagaacacgtactga

SEQ ID NO: 41658 - DNA, 333 bp, Oryza sativa
  Clone ID: PAT_MRT4530_44985C.1
aattcggcacgagtctactctgagaggctgatgactctctccggtgtctacggtttctggaagtatgtcatctatcttcgacaggcgtgagacacgcgctacctgagatgctgacgcctcaggtacggcaagatggcaccaccgttcattggcattgagggagaggcctcacaaatgatctggcctacccggtgaaagaatggcatgggtctcatgtgcagtgctgatcagggtgagaaaacagaatcgaggacgatgcatcattagttctagggttagtgattcagggcagtctgtgggtttcatagagaattgtgtagcctgcatttcatg

SEQ ID NO: 41659 - DNA, 1363 bp, Oryza sativa
  Clone ID: PAT_MRT4530_44986C.1
cgccatggcgccaccatgcatataaactcgagctccctctcctcctcttcttcctcctctccactctccaccatcgtcttcgtcgtcgtcttcctcagctcggagcgatggggaggtcgccgtgctgcgagaaggcgcacacgaacaagggcgcgtggaccaaggaggaggaccagcgcctcatcgcccacatcaaccagcacggcgagggctgctggaggtcgctccccaaggccgccgggttgctgcgttgcgggaagagctgccgcctccggtggatcaactacctccgccccgacctcaagcgcggcaacttcaccgacgaggaagacgagctcatcatcaagctccacgagctcctcggcaacaagtggtcgctgatcgccgggaggctgccggggaggacggacaacgagatcaagaactactggaacacccacatcaagcgcaagctcctcgcccgcggcctcgacccgctcacgcaccgcccgctcaatgccgccgccgccgtcgccggccaccaccacctcgccgccggcggctccagctgctcgcccgacgcaacaagcggccacagcagctgcagcgacggcgacgagtaccgcggcggcatcgacctcaacctgtccataagcccgccgtcgtcgtcgtcccagccgtcttccccgccgccgccgccgcacgaagcagaggcgagacgcgccggagcgacggcgagctacacctaccaccaccactactcggagacgagggagaagatatgcctgtgcttgaaccacctcgggctgcacggcggcgacgagtgcagctgcggcggctcgtcggcctcttcctcctcctcgccgccgccggcgacggcgagctcgcgagcgttcacattcgccaatgcatcgtcgtcaacagtgtaaaacacagagaaattcagcgattttcagactaagagaattaatgagaggtagagcacatgcatgctgaattaattgaattaactcaatccaagcttgagctaggcatctagctaactttgtgatttgatcatgatcagctagcaaaatcatcataatcatcatcctaggcatggccggccaagatcggagggtgatcccaagtcgaggcctttgctcttcggaaaaccaatcaacggttgggattgatgcatttgaaagagggtatgcgtaaatggtgcatgttgttgtgaattttccccttaagattaattcgggggtttgtgccattaactagaagtgttattacttctccaaatggaaatacttagatctttgttttttttttggagaaatagaactatttgttggtgtagtacctatacatgttttcaataaaagatgtgggtgggtaatgt

SEQ ID NO: 41660 - DNA, 385 bp, Oryza sativa
  Clone ID: PAT_MRT4530_44987C.1
ccaaatctgcagttatacgctcttccatatttgttgttataattcgacagatcgccttacaaaaccgtttgggaatgccacatatctacactctaaaaaaatattaaatctgccattatacgggactcgggggggggaattaaattgttgtgaaaagaaaagggaatctcgctacgattatctacattagatgcgcggcccccacccactttgtgttcaccgcttaaaggaccaagtgcaaggttgggactgaaaaataatacatgagctcattctgttaatggcgccccctcagaaaaagttgccctgccagatgggtgttgtgaccgaacggttactaaacagatttgattggaggggggacaactccttgggcgaccccgag

SEQ ID NO: 41661 - DNA, 150 bp, Oryza sativa
  Clone ID: PAT_MRT4530_44988C.1
aaaaatcaaaattccttggaagctaagctaaagccggttaaacaagcgcatacaaagaccggtaaccggagacagctcaagaccggcagaacaatgctgttcagtttcctcgctctaagatgccgctacgaacgggcggttggcaagtaa

SEQ ID NO: 41662 - DNA, 541 bp, Oryza sativa
  unsure (1)..(541): unsure at all n locations
  Clone ID: PAT_MRT4530_44989C.1
ccnggcaggnncaaaatttgatagcgggcggngaacttaaggcagntaaggtggnntgtcaattcaacaccatngnttacttcttcttgcctgcatctccagnctttgncttnttcacaccacggatcttctttgctctgtccttnttntccttcatgttgcttgncagacttntcaaccttggtggcnaggccattcctgannagcctgtncacngcatcttcaccgtgactacaatttcaccnagctcatggctgagacagcncccagatcgttacacnattcgcngcaggtcggaacttacccgacaaggaattttgataccttaggaccgatatagatacngccgacgnttactggggctncaagnncaacgcttanccttgcgactaacgncccncttaacctttccagcaccgngcaggtgtcaggccttatactncatcttgcgatttancaaagccatgtgttntnngttaaacagtcgtntgggccatttctctgcggnccacattgctgagggcaccccttnccngnagct

SEQ ID NO: 41663 - DNA, 322 bp, Oryza sativa
  Clone ID: PAT_MRT4530_4498C.1
ttttggaaattgccttcccccataagtgggaattttaaaaaaaattcccaaggttttaaatttggggggacctttgcccccttggggccccaaaagttggtttgttttaataatgggccccaggggagaatgcatgcgcaatgtcttcctcaattaggaatgctttgttcaatagatcagatacatttgtccagctaaacacaatattacatggccttgatgaatcaacccttctttaaatcttcattgtaaaccactgaccattcatccagtccatcaagtaggccttcattcccttttgtataaaaaaaaaaaaaaaaaa

SEQ ID NO: 41664 - DNA, 759 bp, Oryza sativa
  Clone ID: PAT_MRT4530_44990C.1
atggctaggaacgtaattgtgattattggacaggacttaatcccccctgatttccaaggttgtgaaggcagatatgcggacatgggtactaaaattggcgggagtaaagctttctttgtgcccacctggtttcaggtcaggttaggtgacagtccaactagcaccaggctacaggtactgctacacatatatagaccaactaccagtggaggaaatggaagcccgattgagcacgggggagaagacgaagaagatggcgacgacttctcggccgtcgtcgccgctgccgccggaggaggagacggcggcggagacgacgacgagcgaggaggaagagcagcagcagatggagaggttctacgcgctcgtggccacgttcgggccctgagagccatgttcaaggaggcagcgctgcccagctgccgcgaagacgacgttagcggtggcggtggcggggagcagcgccagaagaggccgagggcggcgccgtggcggccggcgttcgagatggcggtcttcgagtgcggcggcggcggcggcactaccaccgacgacatcgaggcggcgacgaccaagggccaggacggcaactgcaagaaggggaagaggagcgaggcgaacgcagctgcagaggaggacaaaggcgaagttatcgaggggaaaccagtcgccatcgccatcgtcgctgacgggcctgatcaaccctattcctgcaaggaaatcgaagaaacaagcaagaacaagataaaagcaatctga

SEQ ID NO: 41665 - DNA, 179 bp, Oryza sativa
  Clone ID: PAT_MRT4530_44991C.1
tgggaggtggcggctgtgcagatggaggccacgatgctcgatgaccgagcaattttatgtgaagctcacatcccaaagagccgcagaaatagcattcgcattcacatggcagctccccatggtttccctgacgtcaggcgcacatgccccttctccgacccacctcccacccctgctag

SEQ ID NO: 41666 - DNA, 521 bp, Oryza sativa
  Clone ID: PAT_MRT4530_44992C.1
cttcttcaccacgcctcggctcggaaacttcttcaacagcctgctcgtcaccgccgtcgaccgcgccaccaggggcgcggcgccggcaagagctggatcggcgacaacctcaacgactcgcacctcgactactactacgccttcctgctgctgctcgcggtgatcaacctgccggtgttcgtgtgggtggcgacgaggtacgagtacaagaaggagtacttgtcggacggcggggacgtcgtcgccgggatggcgtcgcgggagacggagatggccggcggcggcaaggggaaggtggtggagaggagcaaggtgatcgacgcgccattggtggtggtggaagaagtgcgtgccgtataatttgcggttcatactgagtaacttggtatagaactatagatcatcagcatatacgtacggaatacacgtaaaactatatatatacgtatataatggaccatacatgggttgaaattcgggttaagccatatggaaatgctacaaaaaaaaaaaaaaaaaaa

SEQ ID NO: 41667 - DNA, 943 bp, Oryza sativa
  Clone ID: PAT_MRT4530_44993C.1
gcacgaggtctctctctctctatctgcagaaatggtgtagccagttcttcttcctgctgtctcggggttcctctcttttctgtgtgcacaaactcgtgtagtcttgtgcacgatctcaagctctcgactcgatctcgccgccttcttcttgatatctgaatctcctctgttctttctctctctcttgttcatgtcctggttggtggttctggcctgatagcaatcgtagaatagctcagctagctagtctctgaagatctctttgctgcaaactgaaaccctcttattaatcccggaggaaaaggcttgtcgagggaagttttcggattgccagacatcataacagttaccaacttaaacatcaccaccacctcatcccctgtttgtttggttcgcctggatgggaaggccgaggggtgggaaaggcaggaaatccaccgaagctgcgaaagccgacgatggcagcagcagcggcggcggcggcgaggaggtgatcccggcgtacaagaggaggggaaggccacaacaacagaagcatcaccacctcaaggacgaccacgccgccggcgacgacgaggacgaagacgacgacagcgtcgccaagaccgaggaggaggaggaggaggaagaacacgacgacatcgccaagatcgacgacgacgccgcgaagacgacggcggcggcggcggcggcgccacaagccagcaaggcggggtcgtccaaggccgcagctcagaacccggggaggaagaggcggcggcagctgaagcgcggctccgacaacagcaacagcaacagcgcctccgccattgagcggcgccggaggaaggacggcggcgagccgtcgtcgtcgcggcagcagaacgggttccggcaacacgggagccggcggaagaactccacgccgcggagagccgccgaggccggagtggggtgcaagtga

SEQ ID NO: 41668 - DNA, 241 bp, Oryza sativa
  Clone ID: PAT_MRT4530_44994C.1
atcacaagctgatatgagtttggtttcataaaagattactccaccctcaaaaactgaaaacccatctcactatttacacatataacatgtccacccacacacaccataattaatttattccttaacccttaaaaaaaaccaacaataaatctaacccttacctctatctcgtactactaacagaactagctctcttctattcacacattactcattattacatattaccatactaaataat

SEQ ID NO: 41669 - DNA, 402 bp, Oryza sativa
  Clone ID: PAT_MRT4530_44995C.1
atggctcccaattgctcggatccaattgctgataagccacctagttggccgtcagtctccagatccttctgccacgccgacgtgcgctgccggccgctaacgctcatctgcgtgctcggctcggcgatgagtggccgggacgtcggttgtgtcggagtaggcgctcaagtgcggcggtggcggcccggtgctcgtctccctcccggcgtcgtcgttcttcgccggcaacctcgccgaggtcttccttctcacgacgctcgccgaaactcatctgcggacctggaggccggcaccggtggcttgcgcctcgccgccgagctgtcctccttcttcgcgtcatgcacgaccacacgctcatctggggcaagggcggcgaccacgccgacaacggcaagccactag

SEQ ID NO: 41670 - DNA, 367 bp, Oryza sativa
  Clone ID: PAT_MRT4530_44996C.1
gcaagtccgaaaaagaatgtgataatattacgcggaaagaacactgagtgttagcacactatttgcagctacagacactggaatgcatacacgactattactgatggacaaagccagacattggccgagaatacacagaagacccgtgtcttatcattcacccaaggcaggctgatcaagctgtccaatattattacccaacaccataatccactgaaaaacctcagttctccatgcggatgatgcaacggatgccctcacccttgcgcatgaagtctaacgccgagttgatctccgaaaacggtacgctggatgtgaagaacttgtccacctacacatgcttgttgatgtacagatgcacgacgtt

SEQ ID NO: 41671 - DNA, 354 bp, Oryza sativa
  Clone ID: PAT_MRT4530_44997C.1
atgcacggctggcggtcgtccttgctgcgcgtctcgtaccatggcatggtcctggcctggggcatcgtgccctcgttctgcatcgacggccagcggctgcgaccgggcggcggcgccgccagtaacgtggccgcggtgtatgccgtagcggcagagagcgcggtgctacgtgaggaggagctgcacggtatggtgcggaccgagcaacacgtgacggggaaggtggatttcgacgtggagggtcatgtggcggggctcggatatctgaagtgcaagaccccgttcttcgagggagagcacaagagtgttgtgtattcatgtggagtctatcaactcctggaaaaatgtacatag

SEQ ID NO: 41672 - DNA, 1046 bp, Oryza sativa
  Clone ID: PAT_MRT4530_44998C.1
gccgccgttcctcgcctctctcctctctcctctctccgccactccgcctctcccccatcccatcgtccacccggcccgagctgcggaggcgcagacctccgccgctgcgcccgcatcggcacagctacagaccaacgcggccgccggcgctgggagctcgggacgcgaggacagcggtacagccggacccccggctgactgacgcagtgccgcctgcctctgcccgtcgcggcgtcgccgttagcctcttctcttgctctctgccctctgcgctacggctgccggctcgtgtgactcagtggctgtgaagtccttcccagcgggcgagacggcgacccggctcctgcagttgagttgccatggatattgagcgacaagttcaagagacatttagtaaccactataaaagcgtggtgctaatcagaaggggatcagatggcatcggcactggctttattattggtaaaacaaggaaaagttatgttgcgatgacatgctaccatgtcatctcaggtaacccctctggtgctttaaaggtcagactacctagggacacaaaggattatgttgctgagctgctatatgagcatcagggttatgatcttgcaattattaaagttaatggagtgagtggagaatgcccaattcttcaatttggtgatttagaaggtgtggcgcatagggccaatgtcgttcagcttggatatatccttgggtcacagtttgctttaaacttggacccctcagtatctcctggatcagtcataagaccggcaaaccaaaatggaatgatgggcagccaggatgttgtctacagtgccgctgcaagacatggcgcctcaggatctgcagtgatgtttgatgataaagttattggagtactatattcaatgtctacaaatagccaagttgcgtatgctcgatcaagtactactgttcacatggccttgaagaattggttgcatccaaatgatgctgcaataaccactgagaagatgatagaacttgtagtaaaacctctaaatgattcagagttagacgattga

SEQ ID NO: 41673 - DNA, 227 bp, Oryza sativa
  Clone ID: PAT_MRT4530_44999C.1
ggtttttctatgcaacgaacggggacacagaacaagcaacgctggcacacacacacaaacccaacatggccaaaagaggacctgtaccacaatcaagggcgcaacatcaacgacacacaacaacgagacggagaaaaaaaaccagcctttgacctagacaagcaagccaggaagcaagggcgagcaaaaacaccccaaaggcactcaccgacaaggaacaacacaag

SEQ ID NO: 41674 - DNA, 486 bp, Oryza sativa
  Clone ID: PAT_MRT4530_4499C.1
ctcgctttctgtacctacctatatacgctgttgtctgtcaggtacggggtctagccgaccgcgccgtcgacgacgatcccgtgtcgcgagcgcgctctgtctaggaagcacagatgggaattgcccgccaacaccttgcatacagtgaatggggcttgctttcttctgcgggagcggaactatgatgcctttgcagcatttattgctgagcagaaccctgagatatgatgctatagcgtgaccatacccctgagacatttgctgcaaacatgacctacatgcggctcactatgaataaccctgctgagactgctgtcatggaaaatcctgaaggtggtgtttttgatagaccagccaacacgcgctatgttgctggcttgaatgacacccacaatggttgtagctcatttgttatacagtattctaacattaaacaaagaatggacttttaaggaccttatgatgatgccagtattggtacgaggg

SEQ ID NO: 41675 - DNA, 898 bp, Oryza sativa
  Clone ID: PAT_MRT4530_449C.1
gtaagctttctaagggagggattaactttgttggatcattatctggctggacggccacacttctcttcatgtggatgccagttgcgcagatgtggacaaattacctcaacccaagtaacatcaaagggttgtcagctttcactatgttgcttgcaatgattggaaatggacttatgattcctcgtgctgtatttatcagagatctcatgtggttcactggttctgcctgggcatctttcctacagggttggggtaacttggcctgcatgtactgcttcgatagcatcagcagagaatctttcttggcaacaacatttggacttcttctgtggctaggatttactctctggagagataccattgcccatggcaacagctcacccgtgacttctttgaaggaacttcttttcggaaagtgaatagaactccattatgtccatattcagcagcaaactgctgccaggcaggaagctctcctacaataattaatggtgaccggcaagaacctgttcgacattggcattattgaggtgaagcactctggtcgacaacctattgtcgtggtgaaactggaacctcccagcttgctgcttgcagaaagtggcatgtgctcctacagaaattaccaggtggccagcttgtgcatctggcagagaagggtacagtgtgtagcttttcttcttttttttttttgtaagaaagaactttatgtttctcctcttgaataagactgtcaggtcatgctggtatgggaaaatgcaaaccactggccattgggtcattggtgatgtccagcagcttcagccgattcgattcctggtgatttatgctttcttgattattttttatggtgcaatgttgaactgttggtctttgtatcattgaattattattgctt

SEQ ID NO: 41676 - DNA, 240 bp, Oryza sativa
  Clone ID: PAT_MRT4530_44C.1
atggaggaggtcgtcgggaagccgccctgccggagcgcgccgaggatcggcggagctgccgccgactgccaagacttctatcagttctcatgccggaggtacactggcacgcccacacatatatgtatctctaaacaaacgagatctcagatgttattttccaccctaaacaccaccgtagctccgcttggatccgagtccatcgccgggaacgctccaacaccacgtgcaacatttaca

SEQ ID NO: 41677 - DNA, 3015 bp, Oryza sativa
  Clone ID: PAT_MRT4530_45000C.1
atggcccacctgcagctctcggcggtcgccggcggcggccggccggcggcggcgggtgggggaggggacgagatggaggacgtccggctgctggactcgtacgacgaggagatggggggcggcgccgccgcggcggcggcgggggaggaggaggaggcgcacgtgcgggtcaccggaatgacgtgctcggcgtgcacgagcgccgtcgagggcgccgtctcggcccgccgcggcgtgcggcgcgtcgccgtgtccctgctccagaaccgcgcccacgtcgtcttcgacccggcgctcctcaaggttgaggatataatagaagctatagaagatgccggatttgacgcagaaattatcccagatactgctatctctcagccaaaggcacaaaagactctgtcagcacaatttagaataggaggaatgacatgtgctaattgtgtgaactcagttgaggggatcttgaaaaggctatctggtgtaaaaggagctgttgttgccttagcaacctcactaggggaagttgagtatgatccttctgtcattaacaaggatgaaattgttgaggctattgaggatgctggttttgaagctgcattcttacagagcagcgaacaagataagattttgctaggcctgactggattgcacacagagcgggatgttaatgtgttacatgatatcctcaagaagatgattggtttgcgacagtttgatgtaaatgctacggtctcagaagtagaaattatatttgatccggaagcagttggtctgagatcaattgtggatgcaattgagacaggaagcaatggaagattgaaagctcatgtgcagaatccatatgcacgaggggcttcaaatgacgcacatgaggccgccaaaatgcttcatcttctccgctcgagcttattcttaagtattcctgtattttttatacgcatggtctgccctcatatacctttcattcgttcaatactaatgatgcactgtggaccatttcatatgggagatttgctgaagtggatattgtatcttgaggtgcttgcaaaagggaaaacttctgatgctatcaagaagcttgtagaattggtccctgctactgctcttttgcttctgaaagacaaagaaggaaaatatactgaggagagagaaattgatgcgctattagtccaacctggagacatcttaaaagtgcttcctggttcaaaggttcctgctgatggtgttgttgtgtggggaacaagccatgtcaatgaaagtatgataactggtgaatctgcaccaattcccaaagaagtatctagtgcagtaatcggagggacaatgaacttgcatggtgtccttcatatacaagcaaacaaagtaggatccgagacagttctgagtcagatcatatctctggttgaaactgctcagatgtccaaagcccccattcagaaatttgctgattatgttgctagcatttttgttccaattgtcatcaccttgtccatgattacattccttgtatggtttttatgtggatgggtgggagcatacccaaattcatggatttctggaactagcaactgctttgttttctctctcatgtttgcaatagctgtagttgtgattgcttgcccttgcgcccttggtctggcaacacctactgctgtgatggtggcaactggagttggagctaatcatggagtacttgtgaaggggggagatgcattagagagggctcaaaatgtaaattacgtgatttttgacaaaacaggcacactaacacaaggaaaagcagttgtgacaacagcgaaggttttctcaggaatggatcttggggatttcctcacattagtagcatctgcagaggcaagcagtgagcatcctctggcaaaagcaattgtggaatatgcattccatttccatttctttggcaagctccctacatcaaaagatggcattgaacaaagaaaagaagacagattatctcagttgctccttcaagttgaagacttctctgccttgcctggcaaaggagttcaatgcttgattaatgggaagagagttctggttggaaatcgtactttggttactgaaaatggtgtgaatgttcccccagaagctgaaaatttcttggtagacctggaactgaatgctaaaacaggcattcttgtgtcctatgacgatgattttgtgggtttaatggggataactgatcccctgaaaagagaggctgctgtagttgtggaaggactaaagaagatgggtgttcatcccgtgatgctcacaggtgacaactggagaaccgcaaaagccgttgcaaaggaggttggcattgaggacgtgagagccgaagtcatgcctgccggaaaagccgacgtggtccgctctctccaaaaggacgggagcatcgtcgccatggtcggggacggcatcaacgactcccctgcgctggcagcggccgacgtcgggatggccataggcggcggcaccgacatcgccatcgaggccgcggactacgtgctggtgaggaacaacctggaggacgtcatcacggcgatcgacctgtccaggaagacgttcagccggatccggtggaactacttcttcgccatggcgtacaacgtggtcgccatcccggtcgccgccggcgcgctgttccccttcacgaggctgcagatgccgccgtggctcgccggcgcctgcatggcgttctcctccgtcagcgtggtgtgctcctcgctgttgttgagaaggtacaggaaaccaaggctgaccaccgtgttgcagataactgtagagtgacattgacattgctcctgtatacgtacatagattccccctcttcaccgtttcatcacagaaatgaaatgagatgagaaaaggaaggccgatggcgtctcttgtaatttgtggatcgctctggacgctgtttgctttacaggttttttcgattttggtcgggttcttttattcttttattttccattttatctctcctggtgaattaccagctgtcaaaaaaaaaaa

SEQ ID NO: 41678 - DNA, 506 bp, Oryza sativa
  Clone ID: PAT_MRT4530_45001C.1
gtctttgcaccagattcctgtattttttatacgcatggtctgtcctcatatacctttcattcgttcaatactaatgatgcactgtggaccatttcatatgggagatttgctgaagtggatattggtaagcattgtacagtttgttgtcggcaaacggttctacattgcggcttatagggccctgagacacggctctacaaatatggatgtgttagttgttcttggcaccactgcatcatatgtatactctgtttgtgcactcctatacggagcattcactgggtttcaccctcccatatattttgagacaagtgcaatgataattacatttgtgttgtttgggaagtatcttgaggtgcttgcaaaagggaaaacttctgatgctatcaagaagcttgtagaattggtccctgctactgctcttttgcttctgaaagacaaagaagggaaatatactgaggagagagaaattgatgcgctattagttcaacctggagacatcttaa

SEQ ID NO: 41679 - DNA, 174 bp, Oryza sativa
  Clone ID: PAT_MRT4530_45002C.1
ggatccgcagagaccaatgtgtccgggtgatgtcgatggaatgaataaggcgcccgtgctcaggtggggtgaaaacccacgcccacggctcccccaaaatcagcctgttgtcgtcgccgcccacgccaggagacgagatgccaacctgcgacgccgccattgcgccggcgagag

SEQ ID NO: 41680 - DNA, 264 bp, Oryza sativa
  Clone ID: PAT_MRT4530_45003C.1
cccgtggtcccaccggttatggaatggggtgaactaatacatccggattgttgacaccatcctccccagctcccgcggcgtcaccacgcatcccaccgcgtagcccccagtctccgcatcgtcaactgcctccgctcctatgtgagtcatcaatcgcctccactccacctcgtcaaccgcctccgcgcgtccacttgtcttggcctcttcaacaacgtctcccgcctcgacctgattcaccggaagatccatcgccgtcatctg

SEQ ID NO: 41681 - DNA, 300 bp, Oryza sativa
  Clone ID: PAT_MRT4530_45004C.1
tagcaagcaaggaagagaattagtcaagcggatcattagacggaggaaacaagacatgggatgtccacaacagcctaaacaggcagccaacaaggagcgctgtctcctataggacgagagaaaaagtaaaacataacggtgagaagtgaaactgattaatgatagtatacaatgatgatgatggataggttgcataggacgcccggcgtcattagtgtcttgctgatgccatcttggccactggtaagggtacactcggatctgtattagcctcttagctgcccttgtggctattctcat

SEQ ID NO: 41682 - DNA, 148 bp, Oryza sativa
  Clone ID: PAT_MRT4530_45005C.1
tacaattaacaaaaaaaaaaaaaaaaaaaaaaaagcaaagctaaataggatgattgcataatatactctatctattactgaagcaccaatggcgccgggggcgttctccacggtcaacccaagggtgttccttgacatccccatcggc

SEQ ID NO: 41683 - DNA, 982 bp, Oryza sativa
  Clone ID: PAT_MRT4530_45006C.1
cccgtccctcgccgtgcccggcggcgcgggggcccgctgcctcgcggcgcgtcgccgcccgcgccgatgaatgccgccgccccggcggccaacaactcaagtaccgctccatgcattccggtttcaggcaatttaccatcctctacactctccactgccgcagctggcaggccccgggccgctgagctcgcgtccatccatcgatctcctcctcttcacaagcaagcgcgagaggagacacctccatcgatccatggccgccaccgcgaccgccgttgcggcgtctctgtccgtggccggggggctcgggaggccgctggctcgcgtctcgtcgccggcggcgccgatgaaagccgcctccccggcggcggcacggcgggccgtcgtcgtccgggcgtcgtcgtcgggggagccggtgaggagggagaaggcctcagctgctgccgcggcggcggggatagccgcggtggcggccgtggcggcggcgctggcggtgcccgaggtggcggaggcggcgccggcgctgtcgccgtcgctcaagaacttcctgctcagcatcgcgtccggcggcgtcgtgctcgtcgccatcgtcggcgccgtcgtcgccgtctccaacttcgaccccgtcaagcggacctgatcgatatagctgcttctttgcgtagctgtgacgtatgacatgagatccatggcttcaaattctgtatgctacaagagaacggtagtgcagctgcatgaaacttttgctgcacgtgtacgtacgtgtttgtgttggcttaattaattcgatttcatgatgcgtatgtgcaattgtaaacttgtaattgagtttttccattagtagtaaagcgcccctatcttctttgttcaaaaaaaaaaaaaaaagcatcggtgacatatattggacaagtacatcattcattcattcagacctaattaaggtatgacgcgtgggcggacgcgtgggcggacgcgtgggcgc

SEQ ID NO: 41684 - DNA, 482 bp, Oryza sativa
  Clone ID: PAT_MRT4530_45007C.1
gtggtgattcttttttcgttttttttcttttttttttgtgtttttggggaggtgaggtcggcaggttcggttttcttgtggtgaggagtatctgtcaaaaggctggatttttatatattgccaaaaaaaaatgtgttcttcaattttatttgtggctgtcttgccaaatgatactagctggctgtttggctgaataaagtgagaatttgatgcaaatcctttgttagattgtgtgtgcatttgtgcttctgatttctgaggcggcttctttgatggagttagttgcaggaaaattgcccctgcttttgattagtttgtttctggtttacctatttgatgatccaattaggatattttttaaatatttttggtgttcttcgtgtttcatttgaaaagttcttggctaggagaattggagcaaagactaaagatccaggccttatgctgtcctgaaggagtggaatgctcgtcggtgattagta

SEQ ID NO: 41685 - DNA, 445 bp, Oryza sativa
  Clone ID: PAT_MRT4530_45008C.1
tatgccggtatcggctaaatcgctttaccagattatattagctaaggtatctaccaccctgaaaatcagccaaaggctttattgtctagatattatcttagaaccgtaatctttagcctacttcttgattgccaataagggtttcatcggggtttcagccgatgagttatctagacattacatcggcttacaaggattgcatccgattggtttctactggatattattatcgttttattacattaccattatccgattgtctttatattgttatctacattggacatatagttgattgctcaaaaccctattgacatcggggagatcaaactgactggcatgctcgcatctcaacaacttttggacctgcactagagctaaacagatctcccaggccgttgtgttcgtcgacttagttcgcgccaacacagacctagcaccatca

SEQ ID NO: 41686 - DNA, 467 bp, Oryza sativa
  Clone ID: PAT_MRT4530_45009C.1
aacacatgtcggaccgggtttactgttacatataagtttccgctttcgacgactcgcaccatacaatccttacaaatagtgtgtgcatcctatggtgcctgaggagtgatctaactaaccttgcttgcgaacctctgtctgtccattcttatgtacatgaaaccacacgtgcctgctgccctaacgaatatgaacaaaacacactgagacgccgaactgggaaaggggaaacctttcctagggggcccacttacaaccttcaaagcttccaaaaccgagtagataacgggatcctccccttgataaggctcacaactgaactcgctggcttgccaaataactcaggatacaccctctgaccaaattgttggcctcaagggcgcaaccccctatagggaggctggttaaagtcgtaaccttgcttcgcccgcctcccgagcgaaacagaaatccgctctcaattccaa

SEQ ID NO: 41687 - DNA, 2019 bp, Oryza sativa
  Clone ID: PAT_MRT4530_4500C.1
atggaggcggtcgccggcggcggaggcggaggcggaggggagtcggtcggggagctgctgctccgcgcggcggcgatggtgccagcggagcactacgcgctcgcggcgctcgccgtggtgtcggtcctcgcgtacgggttcctggagctgcacttcctcggggacctcctccgcgggttccgcggcggccgcgtcgagctcaccttccacccggcctccgagatctaccaccgcgtagcctccaagtgccgctccctccacggcaggtatctggcgacgccttggctcgccagcccacatttgcagacactgttcctgggtatctccgggaggccaccttcgttcacatacaaaagaggatttgtggcatcaagattgctcatgcttgcaaaaggagtggaggtgcagtatgtaaaacacatggcttattccatggcaacgaaggggtgtaacactgttgtaagcaatcacaggggtcttggtggtgtgtccattacttcagattgcctctacaatgctggatggacagaagatctccgagaagtcattaattatctccatcacaaatatccaaaggctccaatgctctgtgttggtacaagcataggggccaacattgtggtcaaatatcttggagaagaaggtgagaatactcctgtggctggtgctgcatctatttgttctccctgggatctggtggtgggcgaccgatttatttcccgcaagcttgtgcagcggttttacgacaaagcccttgcctttggtcttaagggatatgcaaagctgcatgaacctgtgttggttcgacttgcaaattgggaaggtattaaaaagtcacgctctatccgggaatttgaccaccatgccacttgcatggttgcaaaatatgagacagtagatacctactaccgccgttgcagcagtgccagttatgttggtaatgtgtcagttcccttgctatgtgtcaatgctttggatgaccccctctgcacaagggaggccatcccttgggatgagtgcagggccaacaagaacattgttttggctactactccgaatggcggtcatcttgcattctttcaaggactaactgctggaagactatggtgggtcggagctgtttctgagttcctcttcgctctgcttgacagtaaatacatgcatcagcaaaaggcacaagaccatattttgcgttcttccttggagtcgtccatcgataagagcccatatgtcaacgtcatggaagatggaatgatagctccggtgacagatgatggcccttgtgatgatatcaccccttctcaccaggttaatgacataaaacaagataatggggattttacgcaacagaatgaacacaccagggaagtagatgataaaaatatcacagaagtaaatgcaatgccttcccaaagccctgaacagtctgcaggacagcaagtagaggaacactacgttggtaagtttcatgaggccattgctccagttaagagatccataaaccaactcactcggtaccagggtaagtcagtctggttgcttgcttatattgcttttgtaacatcatggccactccttggttccttagcttttatcgcatttaggaaaaagttcaggaataatttgctagctaagtggctgagaagataaataagttgtgttccaacagtttttttttcatttgcatcatgtaaaactcagaattgtttaaaggcttgaaaagccattcgatctcaaaacaaaaaaaaaaaaaaaaaaaaaaaaaaaaaaaaaaaaaaaaaaaaaaaaaaaaaaaaaaaaaaaaaaaaaaaaaaaaaaaaaaaaaaaaaaaaaaaaaaaaaaaaaaaaaaactacttcaaaaaaaaaaaaaaaaatataaaaggggggcgccctttaaaaaaacaaaattttaatacccgggcgtgtcaaaattaaatttttttttttgggccccaaaaataaattccaggggccggcgttttaaaaaagcggaaatgagaaaaaccctggggctcccc

SEQ ID NO: 41688 - DNA, 513 bp, Oryza sativa
  Clone ID: PAT_MRT4530_45010C.1
tactctaatgccttttcttcttcctgtgaagtatccaaacgactaatttgacaaatgtctttattttctgtttttgtctgttttcatggagcgtgtcgtctgtttcctctgttcggtgttccgttgtcccgttcgtggttcgcacgtcccgatgcgtgcgagagccgccccaacggacgcagggccgccctcgcccgctgccccatccgcgtcggcgagccgattggcttccctcctgcaggtgccgcctagtccttcctctggccgactgttttagcgggctcccggtcgtcggggccaacgtcgaacggcagctctcgtccacaagagaggcaagattttcgtccatcctgtgtcatctgacgccgacgagtcgacgaacttcagtatcttgtattcttgtccgctcatcatagcagggaattttttgcctcttattttccagcccagacatcaccaaaaaaaaaaaaaaaaaaaaaaaaaaaaaaaaaaaaaaaaaaaaaaaaaaaaaaa

SEQ ID NO: 41689 - DNA, 903 bp, Oryza sativa
  Clone ID: PAT_MRT4530_45011C.1
tcggtccgtggaccatggccgccgcttcccctccgcaacggcgcagaatcgtttctgcagctgctggagctccgcgaggcgatctcgggagagatcgctcccgtgccctcggcactccgccactcccgtctcctcgcgatttcgcccgcccgctgcccgcgccaatctccatcccgcgagcagctgcggcggcggcggcggcggcgacctgtctcccttccgccgcatcctcgccgaacaacacggtgaactagtaatctagcatcacccatgcccttaagcagcaatatttctactcagaaaacccactatgaagttctttctgtgaatgaaggtgctacatatgatgaggtccgagctggatacagggctgctatcctaaacgcgcatcctgacaagtctcaggcaaaactggattcacttgtgtcatctgttgagcatggggaattcttcagcgtgcagaaagcttgggaggtcctacgtgatcccaaatccagaacagagtatgacaagcagctgcaaacatcaaggcagaactctgcaaacattgcttatgaaatcgagatcgaggaaatgactgttgaaagcactggtgatgctatggagttgatgtatccatgtagatgtggagatcatttttcgatcttgtcatctgaccttgcggagatgggcattctggtcgacgatgatggggaaatatattttcagtcatctgactgtgtatcagcttctgttgttttgagctgtggttcttgttcacttaaaacacggctggttataaatagaacttcttgacagttgtgtagaaattgtactcttcatctggaacagttttgaacatgtttactcctcaaccgctgcttatgagaaaaatataaaatataaaatttcagctaaacaaac

SEQ ID NO: 41690 - DNA, 451 bp, Oryza sativa
  Clone ID: PAT_MRT4530_45012C.1
gtgtattttcagccatctcccttcttctttcttacactttatgctttgataaaatcttctaaactctctcttcctcctcccttgcggtccactgatcgtagtgacccgaggcgcgcgctatcttccacagccggaggacacatagcgtatgcgcttgtgcgcatgattgctatgggagcgatgctgggggtggagcacccagtggtgcttcacctgctggatattacgccatctactggatgtattgatggtcttattatggagctgggggaggctgcattgcctcttttgaagggaattgtcgtatcgactgatgtttgggtggcctgcactggcgtgactggcggggtcttggatcttggtggtcccgcagctgggtggatcctacggtgtgtggttgtggtgcacgccgctgcttgttgctcttgcatgcttgtgcgtgtggctgtcc

SEQ ID NO: 41691 - DNA, 267 bp, Oryza sativa
  Clone ID: PAT_MRT4530_45013C.1
gtctgcagcaagtctgcggcaggtctgcagcaagtctgcggcaggtctgccgcagactcttcatcatactgaaagagtatgcggcaagcctgcggcagacctgccgcagactcttcatcatactgaaagagtatgcggcaggtctgcagcaagtctgcggcaggtctgccgcagactcttcatcatactgaaagagtatgcggcaagtctgcggcaagtctgcggcaaaactaatttgcatgtgaaaaagatgactgtctgcggcag

SEQ ID NO: 41692 - DNA, 300 bp, Oryza sativa
  Clone ID: PAT_MRT4530_45014C.1
gagcgggcaacttagctttttttaggcgaaagccaaaggggcttaatccaaggccaggccagagcaccgactcaaaacctggcacaaaaagtttcaattggacaccattagacccgattggcaaaccgccgcgggtttttttgggaaacggaaaaggcccccttaacccaacacaaggggttgaaaaaagcttgccctaaccaccgggaggcgctgctgccagggtcgagttaccctctggcaaaaaggccataccccccgagggagaatcaacatacccttgtgagaggacgcaccggg

SEQ ID NO: 41693 - DNA, 741 bp, Oryza sativa
  Clone ID: PAT_MRT4530_45015C.1
caacatcatctccaaacccctcttgctcgcttctcccctcgctccccccgccgcacgcttcgcatgccctccctccccctctccggcgcgccgccactgccgctgcccactctcgccacgccttcctctcgctaccgcaggtccagacctaggcagtgcccgctgaatagggcagccacgacctccccacgggtggatccagttgcccagaggcgagggcagggcggctcatcggtggtgttgacgacggtcgtttctccacggcagcgagctccacggggaagggttatgctccccaaccctcttctttattctctctctccctctccctctctcttatctagatccagagacggtggggaggttggatgtgacagatccagggctgccggacctatttatctcagtggtgccggcgggggcagcagctcggcgatgatggcaacaacgtctcagacacatcctcccaatatcgtgcagcaagaccggcggccctgccatggtcgccggccactcctcccgtcttaccagctagaaacatggcaacatttccatggtcatcatctctgcacaactgggagacagatgaagcagtggtcaacgaacttcaaatctttaaatctctatgagtgaacaaacatggatggcgatggtattctgatgtctcattgtgaaccagtcaaccagagtcggatcactaatccatgtcatggactctgtaagctcggtgtgatgcttact

SEQ ID NO: 41694 - DNA, 397 bp, Oryza sativa
  Clone ID: PAT_MRT4530_45016C.1
tctctctctgctcgcgcgccatgggcaagtactcacgaccgccaaccgaccaagtcgcaagccatggggagggatctaggtcattaagaacacagggagacagcgtcgtcttcgcaagctgcttggtcaaggaaacggaccttgaggatgttattgctcaaagcagcaattccttagaagactgggaggcgggccgactgcacagtgaagttgcaatcaaagggcaggcagggctgcaaatagcaggttatttggatctgtgaaaagctgagagtacgctgatgtaaaggctgatgcacaacctttgttacacatcaggaacaagcccaaacagagacccggcataccggctatggaccatatcttacatgtctacctgcacgcagctatttgtaga

SEQ ID NO: 41695 - DNA, 316 bp, Oryza sativa
  Clone ID: PAT_MRT4530_45017C.1
atgaagttaagcatgaaacgacccaagtacaactgtacttctcgtttgggtatatccttccccctcgggagcgccagaactcctctcactgcttgaaactttggacgcctagagtgaataaggactaaagttcatggagtgggtactgccaaagtgaggttattgaaatgctttgccgtgacgcgtctcattcgttgggacttcggctcatgtgttgggcaagtcacgaagtatggataaagtgtacatccacttagtgtgagtaaaccaaatctattagaatagccgtgctcgcggttattgagcaccgggacat

SEQ ID NO: 41696 - DNA, 369 bp, Oryza sativa
  unsure (1)..(369): unsure at all n locations
  Clone ID: PAT_MRT4530_45018C.1
aancttaaattgttttgtgttttttttaaattgagcatacattatttttttatttcattttatcacacataaaaaaattttgtacatttttacttttcggttggaaattttaaaatttttaaccctaaaaattaaaaacaaacacttttttcaaaaaaaacttcttcctattgatgaatagattattttaaaaaattttaaaaacaactcattaattctgtaattccaataccaaatggatcaaacatttactaattttgatcccttcccttctacacaattttcaaaattacaacaatctaaccccttttcttaataactaaccatctcccaactttttattactttttttgcccaatttttttattt

SEQ ID NO: 41697 - DNA, 1812 bp, Oryza sativa
  Clone ID: PAT_MRT4530_45019C.1
atggcgacgccagcacctgatgtctcggccatcggcgcggccctccgatccccggcggcgacggtaagcgaggccgacgtcgagaagctccggctcatcgaagaactgacctccgacgtggacgccgtgcaggagcgcgtcctctcggagatcctcggccgcaacgccggcgcggagtacctcaccaggtgcggccacgacgccggcgacaccggccgcgccaccttccgggccaaggtgccggtggtgtcgtacgacgacctgaagccgtacatccagcgcgtcgccgacggggactgctcgcccgtcctatcgacgcaccccatcaccgagttcctcaccagctccggcacgtcggccggcgagtgcaagctgatactcgtcgccatggacgactccggccgccgccaggcactgcacggtctcattggacctgtcttgaaactatatgtccctgggcttgaaaagggtaaggggctctacttcatgttcgtcaagtcagagacgaagacacgaggcggcctcacggcgtggtttgccctgacgagcgtctacaaaagcgagcaattcaagagcatggcaattgcctacacgagccccacggcggccatcctctgcgaggacgcgttccagagcatgtacgcgcagatggtgtgcggcctgtgccagcgccacgacgtggtgcgcttcggagctgtgttcgcggccgcacttgttcgggcgatccgcttcctccagctcaactggggccagctcgccgcggacatcgaggccggcgagctcggcccacacgttgccgatccgtcggtgcgcgaggccgtctccgggatcctccggtcggacgccgagctcgcggagttcgtccgcatcgagtgctccaagggtgactgggccggcatcatcacgcgtatttggccgaacaccaagtacgtggatgccatcgtcaccggcgccatggcacaatacatccggaccctgcagtactacagtggcggcctgccgatcgtgagcacctcgtatgcgtcctccgagtgtttcttcggcatcaacctccgccccgtgtgcgacccgtccgaggtgtcctacaccatcatgcccaacacggcctacttcgagttcctcccggtcggcgaggtcgtcgacgcgaccaacctcgtcgacctcgcccgcgtggaggtcgggcgggagtacgaggtggtgatcaccacctacgccggtctgagccggtaccgcgtcggcgacgtcctccgcgtgacggggttccacaacgcggcaccgcagttccggttcgtgcgccgccaaagcgtgctgctatccgtcgagttagacaagaccgacgaggccgagctgcaccgcgcggtggagcgcgcctcctcggcgctcctccgcccgcgcggcgtgtccgtcgcggagtacaccagccgcgcgtgcaccgaacgcatcccgggacattatgtggtctactgggagctactgaccgagtcacccgtcggcgccggcgacggtgacacggtggacggggagacgctcggcaggtgctgcctcgagatggaggaggcactcagcgcggtgtacaggcagggcagggttgcggacggctcgatcgggccactcgagatccggatcgtccgtcccggcacgttcgaggaggtcatggacttggccgtctcccgcggcacgtccattgggcagtacaaggtgccccagtgcgtgactgtcccatccgtggtggagctgctggactcgcgcgtcgtgtctagccaattcagccctgccctgccgcattggatcccgactccacgatccgactag

SEQ ID NO: 41698 - DNA, 1293 bp, Oryza sativa
  Clone ID: PAT_MRT4530_4501C.1
atggcgtcgccgccggacgccgccctcaccgactacgagcgcctccgggaggagaacatccgccgcaacgacgccatcctcgcctccctccgccgcaaggcctccgagctctccgccgccatccagtcctcctcctcgtcgaagcgccccaagaagcagccgccgccgccgcgcgcgaccccgatccccgtcgtcctccgccgctccctccgcaccaggggcctccccccctccacctccacctcttcctcctccgccgcctccccgcccgcgcccgagtcccctccggaggcgccctgcagcacccggctctcctcctccctcgcctccgccatcctcgcggccgcgtccgcctcgccagccgcgccgcctcccgtccgtgacgacggcttcgatgccggggcggagctggtgctgaggccctcgcacgtgaggagggtggtgccggacaggatactgtcggtgcgggtcctgccgctggtggaccggaccgtggtggcggcggggaacaagctggggaacgttgggttctgggacgtggacggcggcgccgtggcgggtgcagatggggtgttcgagtatttgcctcacaggggccctgtgggggcaatcgtctcacacccagctacgccgcagaaggtgatcctggatgatactgtccgaatttttagtgtggatgacttcggcaactcgagcataatgaagcacaataacaagaccgggagatggctttctactttcaaggcaatctggggctggaatgacactgacctgtttattggaaacatggcgcgggcaatagatatcattttggttgatctgaatggcagtagcctcttagctatgaacaacgcacgtctcgagagcgaacacatgacggccattccgggccggttctctgcacacccatataaagttggccatcttgcttgtgcaagctctggtggcaaggcgggccccaccggcagcagctcaatagggaaagggagagggaggcgccgaccgggctcagctcggcttcatgccggtcggccgaacatggcgagcagtggcgacggcgcgcacgcggccaccggcgacggcaagtggcggcgcgggaggcggcatcgacggccgaaagcgacggcggcggccgaagacgacggtgcgtgcgcggaggacggcggcgcacacaggagggagggaaagagggaggaggggagtttctcaccgaggttggccggcgcgagaggagacgacggcgaacgacgggaggatgacggcgatgggcggacgatctccgggacctcctag

SEQ ID NO: 41699 - DNA, 1107 bp, Oryza sativa
  Clone ID: PAT_MRT4530_45020C.1
ccggccgggacgaatatccacacccaattcccttctcacctttcctcctccaaatccgacctcctcttgttcttcctcctccacccccatcgccgatccgatcccccaaactcgcagtccacttcctcccgcggagatccatccaccaccagccgccagccgccgcggcgcgagattcagattcgtcgttctcttggttgtttgaggaggaggaggaggagggacaagatgggggcgtggatgtcgcgggtgtggttcttgatgttcccggcgaaggagtacaagatcgtcgtcgtggggctcgacaacgccggcaagaccaccacgctctacaagctccacctcggggaggccgtcaccgccgcacccaccatcggcagcaacgtcgaggaggtcgtcttcaagaacatccgattcgaggtgtgggatttaggaggacaagagagtctacggacttcgtgggcaacatactacagaggaacccatgctgtcatcgttgtaattgacagcacagaccgtgctcggatcaacattatcaaggatgagctcttccggctgcttcagcatggggacctcgagggcgcagtagtcctcgtgttcgcaaacaagcaggatctcaaggacgccatgtcgccagctgagatcaccgacgctctctccctccacagcataaagaaccacgattggcacatacaggcctcatgcgcgatcaccggtgagggcctctacgacgggctcggctggatagctcagaaagtcgccggcaaggccacaacaagctgacccatagcgcctgtatttccatggatttgttggagctggcaggttgtgtttgttattgctgctgctgctgctaccacttcagtgtttatttatgtctcacatgtctgaaaaaaaccatgtctgtattccctaccaatctgaaatataaaagatcaaatttgtgcgcaatcgaaaaaaaaaaaaaaaaaagcggccattgctgctgctgctgctaccacttcagtgtttatttatgtctcacatgtctgaaaaaaaccatgtctgtattccctaccaatctgaaatataaaagatcaaatttgtgcgcaaaaaaaaaaaaaaaaa

SEQ ID NO: 41700 - DNA, 138 bp, Oryza sativa
  Clone ID: PAT_MRT4530_45021C.1
ataggtatgcctcttttagtcggccgccctcctttttttttttccattatcaggttaaagcccggcgcaaaagaacgacaagactgaacctgctatgcgccgcgacctctcgctcaccattccactcgctcaacgagg

SEQ ID NO: 41701 - DNA, 385 bp, Oryza sativa
  Clone ID: PAT_MRT4530_45022C.1
cttgaagtaacttatttgtggggggaactccttacagtaagctcttaatgtttatgtaaatcccctccaaaatactattatggcgagatatatttttggtacctaggtttccagtacaccaaataacattgaggctaccagcgaaagagacacctgggattaatttctttgatacacaaataactgggtgaacaccagggtcacatgaaagttgactctagtgtctacagacaggatgttcaagggcaaagttatttaataaactaataaatttccttgttttgccttgcagatccagctaaaggtaagtatggggaagaacaaactggggtgcacctatttgaaagcaaccgtagaccaaccaaactacagtgttttgcacttt

SEQ ID NO: 41702 - DNA, 882 bp, Oryza sativa
  Clone ID: PAT_MRT4530_45023C.1
atgggggcgtggatgtcgcgggtgtggttcttgatgttcccggcgaaggagtacaagatcgtcgtcgtggggctcgacaacgccggcaagaccaccacgctctacaagctccacctcggggaggccgtcaccgccgcacccaccatcggcagcaacgtcgaggaggtcgtcttcaagaacatccgattcgaggtctcacctctcctcccctcccctctctttgctttcttctcctctcttgccaagttcaggcccccgcctgatctaactaatgacagggtagctgtcgccgatctgctgctttgctgctcggtggtggtggtggttgcggcacaatcatacgctgggtgcctcagatcaagatatgtttcaacgtttgtttctcaattcccacctttcgatttcctgaggagattcggtgagtttagtaaccagttgagtgaaccaacacaggaagctatcgaaatgtatccctttgctttaagagtttgcatgctattgttgatacctttcggctttgtgtgggatttaggaggacaagagagtctacggacttcgtgggcaacatactacagaggaacccatgctgtcatcgttgtaattgacagcacagaccgtgctcggatcaacattatcaaggatgagctcttccggctgcttcagcatggggacctcgagggcgcagtagtcctcgtgttcgcaaacaagcaggatctcaaggacgccatgtcgccagctgagatcaccgacgctctctccctccacagcataaagaaccacgattggcacatacaggcctcatgcgcgatcaccggtgagggcctctacgacgggctcggctggatagctcagaaagtcgccggcaaggccacaacaagctga

SEQ ID NO: 41703 - DNA, 439 bp, Oryza sativa
  Clone ID: PAT_MRT4530_45024C.1
cccgggctgcaggaatcggcacgaggccactctgtagatctgtcccctcaaatcccctacattctgtagctctcaaccaactaggggtaactccaatggtggactagaggatgtccccgcgtcgatctgtagctataacccctgtggacttgctctacggccagatctgaagctgcagcccgtccctgcctcggtttcatccagatcgagagtagcccggccatccctgccttggctccatctagatcgggagcaaacccggccgtccctgccttggctccatccagatcgggagcagcccggtcgtccttgcctcgtctccatccagatcgggagctccagcaccggtggactcactcactcctctggaattactttcgacgaatggtttatttagttccaacaagcaagttcaacgtgctgcactaaattcattatc

SEQ ID NO: 41704 - DNA, 1186 bp, Oryza sativa
  Clone ID: PAT_MRT4530_45025C.1
caaccaagggaagatatgataaaagagtactatgctaattttgtgcaaccttaggtttcttgacacttttttaatgggcttgatatgccgatttaggagatgaaagttacatctattcaggaatctgttgatatgtccactttgactttagattcactttacactaaactaaaaactgatgagatgaatattctttctcgtaaagttgattctaaatctagtgctttagtttctccttcgacttattatgttgatggctcttctacatcgacctttactgctttatttgctattaatgccaatgtccgatgatcaactcgagcaattcgaggaggccttggttttggtttctaaaaagttgtctagagctataaacaatgtcaagttcaaaaaaagaggaggccgagtttgatgttttgaatgtggagggctagatcagatccgtttacaccgccccaagcttgagagagccaataaagaaaacaatggagacaagctcaaggacgacaagccaagaagtatgttcaagggaaggaagtccaaagaagctctcaagaatgtgctgaatcaagtatatgtagcatttgaggatgtagatcttaagtgatgaagacaataacaaggaaaagagtatgatggtatgtgcttcatggctcatagtgaatccgatttagagtaggaatacaatgaggtaaatcccccaagagaatttcttgaagaaattattttaacttttagctccaaaatcaaaagatgtgagaagatgattaaaaaacatgagtttactattgaatctcttagttttaaaattgctaaattaaaatctcttattcctaacgttgatgattgtaataattatgagaatttaatgattgagatttcaaaaattagaaagttaaaacaacaaaatggtattttgaattgcttaacatgctcattgaacaacatgaagataaaagatgtcttagttcgtgttgagtacatgaaaacattgtgaaatctgatgaagtgttttcttgctctagatggcgcaaaaacaaaggtgttttgattgattgtgaaaattgtacaaatttgacaaaagaagttttatatttgaaaagttctctggaaagattttctgatgagaaaaacaaactgaacatgatttttgatcaatctaaatccctggaacaaagcaaagagg

SEQ ID NO: 41705 - DNA, 114 bp, Oryza sativa
  Clone ID: PAT_MRT4530_45026C.1
atgtcgttagtcctggacgttgtcgtcctggtggtgagagatcgctacgatctactggtcgaggatcaggtggtgagagatcgctacgatctactggtcgaggaccaagtgtag

SEQ ID NO: 41706 - DNA, 238 bp, Oryza sativa
  Clone ID: PAT_MRT4530_45027C.1
gatcaaattgccacgtaagcgtcatgtcaatgcgacggagggcgaagacctagtcaaaggagctacatccaataaacttgttcggatagagcgtgttgttttgctgggcttttctgaagatgacaaacaggcctgcaaacaagatccgacccaaaacaaaggcaaggggcgcgtggaagaggcaacggagcagtgggatgacgacacgtgcgcgcatcgtatggctataaattgggct

SEQ ID NO: 41707 - DNA, 2586 bp, Oryza sativa
  Clone ID: PAT_MRT4530_45028C.1
atgccggcggcgccgacggtgacgcccaaggcggtgatccaccagaagtacggcgccaaggcgtgctacagcgtggaggaggtgcgggaggccgtcgacggcggctgccccggcctcgcgctgccgcagcagaccaggagcgtctaccgctgctcgctcgacatccccggcctcaccgtcgtcaccccgggcaccttcgtcaggaagaaggacgccgagcaagccgccgcgcagattgccctcgacaagcttggtattcagcccactgcaaatgctcccagtactcctgaagaagcatgggatgaacttattgctcgcatatctggtttttttacagatgagaacttcccctcgtcatctcatcctcttattggccacatgtgtgtgacattcagaagaaccggggaccgctttggtatgattcctatgtcagcaattgctgcatgtgatgtgaaggtcattggactgtgtaaacttattgaccccaaagcggagtttgatcctctcttggttttatcattaatctataatgctgccaaaaaatcccctggtgtctctgtcagtgatagcaacttctggatttggagtcagaagccttattcccctgaggctgttgatttggcacttcagcattggtctggcataacggatcccatagaagtagatgggatttttgttccttgtatgatggaggatgaacctaagacaataagacttactttatcacataatgaacattacatgggtgatatagtgtctaagctctctgcaagtgattcctcccacgctgttgtttcaagaactgttggcaaagcatcttctgagataaggctatatttctcagctccaaatgtgcaatttgtttctgagatatcacacaatgtggtttcttctcttggagatggctatatggagagcctaataaataagcgagcttccttcatttctggtcaaacaatttatggagatgcaattttggctaatgttggatatacaaggagagactcagagcttcatactgaagatgttaccttatccaactattacaggattcttctgggcaaatcaccagatgggaattacaagatatccagggattcaattctggtggcagagcttccatctgtgtattctcgttctagttggaagggtctctctccacgagatcttctctgctcattttgtcgccttcacagactagcagagccctacttcgctgtcaatagggtaagtgcctcttgtaaagtgttaggatcacctgtaagctccgaggagatggacgtgctaaagaatgctgaaaatcagtgtgctagtgatggaaagaatgacaaggaaaacccagatatgttcaaatgtgatgtcaaaatatattcaaagaagcaggagcttttattggagtattcgacagctgatacttggagcaaggaatctgatgccattcacaattcttcattgaaggtgttgatttggttctgtagttatttcaagcaaccgaacaagcatgtactgaagctctctcattctaagagcactgatggcttcacaatatgtccagataattttttgcatgaatttgccatgttcttatctatttatggcaacagaggaggtgatgactcaagtgcatgcagtacagttggatcgctttctatggatacctcaaaacaaaagcttgaaaacaatgcagttttagcacacattgatggtccagattctggtgtttttccatcccatggatcattgacttgcataagctatactgcttccttggtggtgaaggacaaaacaaacagatatacgctagaaagcaacaatgagtttgagtttgagatagggactggggctgttaagaatcagattgaatcatgcgtgagtcagctgtcagttaatcaaagcgcatgtttcatagctgaattgcctcctaaggatttgatccttgctgcagctaatgagttttctcatgacctttccaagatatctagagacaattgcttcttggagttctctgtaaaggtattgcagagccttcatcagaagctgagcaagaaatcgttgatgcagacaagtgttccaacggctgtgctctatgatggttctataacggattttgattctcgcttatacagatttgacattggcacttgtcttgaggtgattgagcacgtagaggaggaccaagcaagtttatgtggcgacgtcgtcttgagttcgttctgccctacggtgctgattgtttcaacacccaactatgaatacaaccctatcctccagagatcagctatgccaaacaaggaagaagaaccagaagaaaacgctggtccttgcaagttccgaaaccatgaccacaagttcgagtggacaagatcccagttccagcactgggctaccggactcgcagaaaagcacaactacagcgtcgagttcagtggcgttggcggatcaggcgatgaaccaggcttcgcttcccagatcgctgtcttcagaagaatggcgtcgggtcaagatgaggtttgccaggagggagagctgcatcaaccttatgagcttctctgggaatggccaaatgcatcgttgccatctcactga

SEQ ID NO: 41708 - DNA, 981 bp, Oryza sativa
  Clone ID: PAT_MRT4530_45029C.1
ggtggcggcgtcgggagctgggcgacgttcttgcagcacggcctggccgcggcggcgctgtcgctggcaatcaggatggcgccggcgcccgcgccggccgtggcgtcggagttcgacgtgctgaacggcgggccgccggaggacacgtacgtggtggacgacgccggcgtgctcagccgcgtgaccaagtccgacgtgaagcggctcgtccgcgacctcgagtcccgcaagaacatcaggatcaacttcatcaccgtgcgcaagctcacgagcaaagctgacgcgttcgagtacgcggaccaagtgctggagaagtggtacccgacggtggaggagggcaacaacaagggcatcgtcgtgctcgtcaccagccagaaggagggcgccatcaccggcggcccggccttcgtgcaggccgtcggcgacgagatcctcgactccaccgtctccgagaacctcccagtgctggcgacggacgagaagtacaacgaggcaatctacacgacggcgaagcggctggcggcggcgatcgacgggctgccggaccccggcgggccgacgttcaaggacaacaagagggagtccaacttcaagacgaaggaggagacggaggagaagcgcggccagttcacgctcgtcgtcggcggcctgctcgtcatcgccttcgtcgtgcccatggcgcagtactacgcctacatctccaagaagtgagcagcagcggctacctgttctttccaacaaaaaaagagagaaaaaatgagcagcatatggtgctgctctgtacagtaaatttgctcaggagatggctaaatctcccggttttctgtcggaattttagaggcgaaacagagaattatgatgaacacaggtgcaccaccgtgccggttaatttttattgtagtagcataactgaggcactgagcaattaggtgcaaatcagcacttcctttaaaaaaaaaaaaaaaaaaaaaaaaaaaaaaa

SEQ ID NO: 41709 - DNA, 384 bp, Oryza sativa
  Clone ID: PAT_MRT4530_4502C.1
atgctgcggcccggcggcgacgccctcccctccgccagatctagcggtaggggaggtggcgtcggcggcgcgacggcggaaggggatgcagcgtcggcgggtcggcggtgtgaggggaggcggcggtggtccgacggcccggcggtggggccctcccctcagccaaatctggtgggaggggagatggcagcggtggaaggggatacgacggcagcgggaggggaggcagtggtggtccgacggcccagcagcggcgacggcggtgccgcggcaacggcgcccttctctccatccgacggcggcagcggcggtggagacgtcagtggcggcagtggcgatggtggtgaaggcaatatgataagtgttcttgatgaatgtgtttga

SEQ ID NO: 41710 - DNA, 272 bp, Oryza sativa
  Clone ID: PAT_MRT4530_45030C.1
atgacagaattgtttggttccctatggtataccatggaaactccccatatgacgcgggaacttgattggtaaaagatccctgtttggaaagcggggagagatgtattgcataagcatccctatcggggaaagattgacagagagggacgccctttgcactgaatttgtactaaatggcatgaagacaaccaaaaggatgctagaggcttagacctaaccaaggtgccacgggaataagtaatgttttttgaggattttctgtgtgttcgtgt

SEQ ID NO: 41711 - DNA, 1977 bp, Oryza sativa
  Clone ID: PAT_MRT4530_45031C.1
atggagggcgacgccgccggagccggtggcggcgaccggtcgagcatcgtgatcggcctcatcgagaaccgagccaaggaggttggtgttgctgcttttgatttgagatcagcctcactgcatctttctcagtatattgagaccagttgctcatatcacaatacgaagacacttctgcatttctatgatcctatggttgcaatagtgcccccaaacaaaacagcagcagacggtatggttggagtttcagagctggttggtaaacatttgccaacaaataaaaagggtgctgttatggtaaaaaatctttcagctagagacccatctgcactcggtttagatacttattgcaagcaatactatctttgtcttgctgctgcctctgcaacaattaagtggattgaatcagaaagaggtgtaattatcactaatcactcattatcagttacattcaatgggtcatttgaccacatgaacattgactcaactaggactagactactgagagccaacttgttgcaaccgttaaaagacattcaaacaatcaatactcgtctggattgcttggatgagctaatgagtaatgaggaattattctttggcttgacacaaggtcttcgtaagtttccaaaagaatcagataaagttctttgccacttctgcttcaaacccaaaaaggatactgatgaagtgctaaagcctgccaatggtagaaagagccaagggctgatttctgacattattgttctaaaaacagctctggatgccataccattcctctccaaggttctaaggggtgcaaaaagtttccttcttcgcaacatttatcagactatatgtgaaaacccaaagtatgcaagcatgagaaagagaattggggatgtcattgatgaagatgttgttcattcaagggctccttttgtaacctgcactcaacaatgttttgctattaaggctggaattgatggactgcttgatgttgctcgtagatctttctgtgataccagcgaagccatacataaccttgccaacaagtacagggaggattttaagcttccaaatttgaagataccatataacaacagactaggattttattttattgtaccccagaaggacattactgaaaggctccctaataaatttatccaggtagttagacatgggaagaatgtccactgctcaagcttggagcttgcttcgcctaacaatctctttctgtctgaagcatctaatatggttcttgtcatggggccaaacatgagtgggaagagcacatatcttcaacagatttgtctaatagtcattcttgcacaaattggctgttatgttccagctcaatttgcatcactaagagtggttgatcgcgtattcacacggattggcactggggacaatgttgaaaataactcaagcacattcatgacagaaatgaaagagacagctttcattatgcagaatgtttcttcgaagagcctgattgttgtggatgagcttggaagagctacgtcttcctctgatgggttggcaattgcatggagctgctgtgaatatctattatctaccaaagcctacacggtgtttgccacgcacatggagagcttgtcagaacttgcaaccatctatccaaacgtgaagatcctccattttgaagtcgacctgagaaacgaccgcctcgatttcaagttccggttgaaggatggtgtccggaaagtaccacactatggtcttttgctggcaaaggtggctggtctcccttcttcagtgatcgacactgcagcaagcatcacttcacggatcacagaacaggaaatggtgaggaaggacgacaactgcgagcagtaccggtcgctccagatggcgtaccaggtcacgcaacggctcatctgcttgaagcaatccaaccaaggcgatgactacatccgggaagcgttgcagaatctcaaggacggctatgctgcaggccgcttgacatga

SEQ ID NO: 41712 - DNA, 218 bp, Oryza sativa
  unsure (1)..(218): unsure at all n locations
  Clone ID: PAT_MRT4530_45032C.1
agtgatgaactaattaatattaattgatcttaataatagtgaacaatagtggtagtaatacatcgagcctctcgggggggggggggggggggggggnnnnaaatgccaaaaaccagaggcgncgggggagctctatctctgtatatagctctctactctccgctgggatctttagtatcacaatcacagctagtttcagggggggggggggggggaaa

SEQ ID NO: 41713 - DNA, 402 bp, Oryza sativa
  Clone ID: PAT_MRT4530_45033C.1
gtacaagagtggagaaataaataaagtgtgtgaacattgtttacaaaaaaaaaaaaaaagggataaaaaaaaaaaaacaaactaatgaaaaaaaaaaaaaaaaaaaaaaaaaaaacgaccaaccccatcgttacatataaactatgctatcgtttctaactattcttagtcttcttgcctttgcttcccatggtcaccccttttttaccccctccgattcccatctaattcgccttgctggtcatcctcttttaccgagatgccccggtaaccccgaggtttttcccgttcgcccgcattaacattctcccataacgccttttgtttttccgcccggaccgatggtccttattttcctatatcgcgatttatatcttttggaaaccgctgtctttttttgtt

SEQ ID NO: 41714 - DNA, 489 bp, Oryza sativa
  Clone ID: PAT_MRT4530_45034C.1
agaaataggtaggattcgggatcacctcgtaatagcaagcctccgacgacgatggagaagaggaagacgaagatggtgcgctttacccaacagcagatcaagaactgcatggcgttcagtgcggacatatccgacgacgacgacgaggaatccctgcccaagctctcggaggtgctcagcaaggatatcctcgatcgggtgccgcccgaggttcttgacagcttgatagagttcgagaacacccggggagagcgcaaggctagatgggagaagctacgggacgatcttcatgaggaacgggatgctatcctcaaacaatactacacgaaaggctacgccgagtacgaggtctatgatgacgaagatgatgatgaagatgaagataataaagttcctgctcgagttgctccccctggccgccgcagaaggttccgcaatggggtagccgtgaagaagaatcggtcaggaggaaacattagaaagatataa

SEQ ID NO: 41715 - DNA, 905 bp, Oryza sativa
  unsure (1)..(905): unsure at all n locations
  Clone ID: PAT_MRT4530_45035C.1
atggcggccaccggcgctggagaaggcaaggagacggccgccgtcgccggcggcggcggcggaggtagcctgcacagtaagaccctcctcaagagcgagccgctctaccagtacgtgctggagtccaccgtgttcccgcgcgagcccgactgcctgcgcgagctccgcctcgccaccgccaatcaccccatggcggtcatggcggcctcgccggatcaggtgcagctgttcggccttctgatcgagctgatcagcgccaagaacgccatcgaggtcggcgtgttcaccgggtactcgctgctcgccaccgccctcgcgctccctgacgacggcaagatcgtggccatcgacgtgagccgggagagctacgacgaggtcggagcgccggtgatcgacaaggccggcgtggcgcacaaggtcgacttccgcgtcggcctcgccatgccggtgctcgacgagctcgtcgccgaggaggggaacaaggggaggttcgacttcgcgttcgtggacgcggacaaggtgaacttcctcggctaccacgagcggctgctgcagctggtcagggtcggcggcctcatcgcctacgacaacacgctgtggggcggctcggtggcggcgccgccggcggcggccgacgaggcggtgccgtcggggcgggaccgctcgctcgccgcgctcgccagggagttcaacgcggcgatcgccgccgaccgccgcgtcaagccgtgccagctcgccatcgccgacggcgtcatgctctgccgccgcgtggcctgaccaccacaacacnccgatcccctctccatggatgtacttttcagaaagtgcgttgggtaaaagtaaaaatgaataaaagttgctactacttggactcttttngtnataaaaaaaaaaaaaaaaaaaaa

SEQ ID NO: 41716 - DNA, 558 bp, Oryza sativa
  Clone ID: PAT_MRT4530_45036C.1
aatctaattctcaatcatagccaatttttttaacaaggaggttatcaatgttgaacagatgaaaagtggtacgacatgtcaataaggaatttgacaacagaaagactacttgcattaagaacagaagcattgagctaaaaaatgccaaacagcagtagaaactcaccaggaactccgatgtatcatctttacggatatactgaagctcctggatacatcatacatgcctgtagactaggcaccagaaaaatctttgttacagggtccgcgatatgttcttgaattcattcaaacaggacaacaaaatcttttgacgtttcagcagagactggcgctcgttctggatagcatcaacagcaccaggtgccacgaacatgtccatgaatctatcgtcattaacagcaaacagctcgaagccaagtgccaaaaacaaccgctcacgacatgggggtcaagaatccagaattcagtggagagggtacattcctttcaatcaggacttcccgcattttggcgaaatactgagcagatattgaacgtatgctggagtatgatgat

SEQ ID NO: 41717 - DNA, 2774 bp, Oryza sativa
  Clone ID: PAT_MRT4530_45037C.1
atggcggccaacgcgttctcgtcgccggcgacggggaggacaccgaaccctaaggtggcgccgtccccttccaccagacgggccgcagactccgccgcggcggcggccgccgccgccgccgcggcgtcggactcaaaggcgcggttcgaggcgtacaaccggctgcaagcggcggcggtggcgttcggcgagaagctcccgatcccggagattgtggccatcggcggccagtcggacgggaagagctccctcctggaggccctcctcggcttccgcttcaacgtccgggaggtcgagatgggaacccgccgccccctcgtcctccagatggtccacgaccccaccgccctcgatccacggtgccgcttccaggaggaggactcggaggagtacgggagtcccatggttctagccacggccatcgccgacctcatcaagcagcggactgaagcgcacctcaggaagatccaggccgcagtctcgcccaagcccatcgtcatgagggccgagtacgcctactgccccaacctcaccatcattgacactccaggtttcgtgcttaaggctaagaaaggtgagccagagagtactccagaagagatcctgtcaatggtgaagtcgctggcgagcccacctcatcgcctccttctgttcctccagcaaagcagcgttgagtggtgctcatcactctggttggatgccatcagagatattgatcccactttcaggcgcacgatgatcgtcatctccaagtttgataaccgcctcaaggaatttaccgaaagttgggaagtcgatagctacttaagcgcaagtggctaccttggggataatatacacccgttcttcgtggctcttccaaaggatcgtggaacaatctccaatgaagagttccggaggcaaatttgccaggttgatatcgatgtgttgcgtcacttgagagacaatgttaagggtggcttcaatgaagagaaatatggaccatacattgggttcagttgtctcaagaagtacctggaatctgaacttcagaagaggtacaaagaagcagctccagccaccctggcattgttagagcagagatgtagtgaagtctcaatggacctatccagattggactccaaactgcaagctacatctgatgtctctcagctgagaagatcagcgatgcttcatgctgctaatatctgcacgcatttgcgctcactacttgatggagcagctgatccagcaccagagctatgggggaaaactactgaagaggaacagatgcatagtggtataggcagctggcctggcattaacatgcctgtaaaaccacccaactccagtcttaaattatatggtggtgcagcttttgagagagtaatgcatgaattccgctgtgcaacatactcaatggagtgtccacaggtttcaagagagaaggttgcaaacatactacttgcacatgctggacgaggtgggagtagtgggttgactgaggcagcagctgagatagcacgtgcagctgcacgatcatggcttgctccccttatcgatacagcatgtgatcggcttgcatttgttctccaaagtctatttgaccttgcaatggagcgatgccgctatcaagactcaaaatatcatcaaaatgttgaagatatggatggatatgttggcttccttgctgctcttcgctgttcatattataagtttgtcaaggaattgtccaagcaatgcaagcagatagtgagacatcatcttgattctgttacaagtccctactctcatatttgttacgagaatgacttccttagtggtgtcgggtctgtggcaaactccatgcataggtttaaccacttcccgggagtcacatcttttgacctatcagacagcggttctgcccttgaagaagctcaggagaatgtgccaccaaaggatcgtcaacatatgacaccacctgctaaaggaaatgagtcaaaggaagttcttagagaaagccagctgacggttcctgagacaccttctccagatctgccagttgatatgaatggtggcaagaagaaagacaacggaaacttgaatgatggtggtgcaagaaaaagacatgcaaggatggcagcatatgcaaacaggaatcatcataacaatgtgattggtggtgatgacctgggctcaaaatctggatcatcatactccagcatatgctcaatatctgctcagtatttcgccaaaatgcgggaagtcctgattgaaaggaatgtaccctctgcactgaactctggattcttgaccccatgtacacgtgagttttgtccttccctgatatgtgtactccaacttatgcaatgcagtcgtgagcggttgtttttggcacttggcttcgagctgtttgctgttaatgacgatagattcatggacatgttcgtggcacctggtgctgttgatgctatccagaacgagcgccagtctctgctgaaacgtcaaaagattttgttgtcctgtttgaatgaattcaagaacatatcgcggaccctgtaacaaagatttttctggtgcctagtctacaggcatgtatgatgtatccaggagcttcagtatatccgtaaagatgatacatcggagttcctggtgagtttctactgctgtttggcattttttagctcaatgcttctgttcttaatgcaagtagtctttctgttgtcaaattccttattgacatgtcgtaccacttttcatctgttcaacattgataacctccctgttaaaaaaattggctatgattgagaatt

SEQ ID NO: 41718 - DNA, 414 bp, Oryza sativa
  Clone ID: PAT_MRT4530_45038C.1
tttttgttttttttttttttttttgtttttttttttttttttttttttttttttttttttttttttttttcggggccccccccaatttattttaaaaaaaccgcaggggatatttccacaatggcgggcaccacttcccaaaaaaaaatcgacccctggggcgggcaaaaggcatcaccgtggggaggcagagcccactgttatgcgaaacaggggcccaagaaccccaaggccaagaccctgaacactgtttataaccggaatgaatttaacaggtttggccagcccaaacatgattgtttttgaagtccggagaaggggggccccccatgggaaacatcaccgaagatgaacaaatccattttggggtagggcctccacaaattcatgctttggggggggccaagccccttt

SEQ ID NO: 41719 - DNA, 288 bp, Oryza sativa
  Clone ID: PAT_MRT4530_45039C.1
caaaaatccacagaaatttccattcacccaagcaaaaattagtcaaaaaattcaattcacactagcacaatttaaatttacagtcaaaaatttctattcccccaagcattcaagcatcaaaaaaattcaagcattcaagcctccactgcctccgcctcgacgaggccgctgccgagccccgccgtgctccgccgctgcacagagccccgctgcagacatggtttcagattagaaccaaacgcatgaactgaagagaggatcctctcgtgcggtcgtgcctcctctctg

SEQ ID NO: 41720 - DNA, 1115 bp, Oryza sativa
  Clone ID: PAT_MRT4530_4503C.1
cccacgcgtccggagctagcaaatatcaaaaagcagctccagcttcttctgatcgatcgatcgagctgagctataggcagtagctgctaattaagctaattaattgctaagcagtagtagagctagctaattaattaagatggccggcaagaaggtgcaggtttgtgcggtgttcgtcgttgctctgaatatggtcatctccatgcagatgggtgcagtagtgcaggcatgcgagccctactgccccacaccgacgccgccggtgacgccgcctccgtcgccgccgtcgggtggagggaataaagtgcccgatcgacgcgctgaagctgagcgtgtgcgccaacgtgctcaacctgctgaagctgaagatcggcgtgccggagagcgagcagtgctgcccgttgctgggtggcctcgtcgacctcgacgccgccgtctgcctctgcaccgccatcaaggccaacatcctcggcatcaatctcaacatccccgtcgatctctctctccttctcaactactgccacaagacctgcccctccgacttcacctgccctctctaaattaatcgatcctccgatcccttaattaccataccattacaccatgcatcaatatccatatatatataaaccctttcgcacgtacttatactatgttttgtcatacatatatatgtgtcgaacgatcgatctatcactgatatgatatgattgatccatcagcctgatctctgtatcttgttatttgtataccggcaaataaaagtttcttccacttgtgttgaaaaaaaaaaaaaaaaaaaacccccggaaatgttattcgttgggatgattgtcaaccaattttgtttttcttccctcggggggggccgggccccattccccttatgtgggtgtttcccccctcctggccgtttttaaaatctgactggaaaccctggttcccatttatcctttaacatgcctcttttcgttggttattgcagaggcccaccgccccttccaaatgccaaccaaggaagggaccgccttggggctatagccgggttggggtcgcgtgacttctttcggccaccccctgttatttgccttatccctggagtcccaaagtatggg

SEQ ID NO: 41721 - DNA, 267 bp, Oryza sativa
  Clone ID: PAT_MRT4530_45040C.1
agccacccgctgcacctgcacggcttcaattttttcgtcgtcggccagggcttcggcaactttgaccccatcaacgacccggccaagttcaacctctacgaccccgtcgagcgcaacaccgtcggcgtgcccgccggcggctgggtcgccatccgcttccacgcagacaacccaggcatgtgtgtggttcatgcattgtcacttggaggtgcacatgagctggggactgaaaatggcgtggctggtgctggatggcagccgtcctga

SEQ ID NO: 41722 - DNA, 301 bp, Oryza sativa
  Clone ID: PAT_MRT4530_45041C.1
caacaccaaggttaaccagatggatatattaagccccccccaagggatcagtaatactgtacacaccttgacacccttaaaattacatgaaacccaaaaaggtaattaacacaggccaaactatgcatgcatggagggagggattacgtacaattaatggcaaacataaagaggatttcttctctaattttttttttccaattttgctccatgatagtatgacccagggccaaactttgagcaggtaaatgctgagctccgggccgccgttgccgtaagggttaataatgtaaaacgcctc

SEQ ID NO: 41723 - DNA, 849 bp, Oryza sativa
  Clone ID: PAT_MRT4530_45042C.1
ttcccgggcccagaccgccgcgacaccgcccctccgcccgctgccgttcgccctctgcggccgcgctcgcccgccgcttgccgccgccgcagccgcgtgctcgccccctgacgccgcccctccgcctgcttcagccgccgccgcccctttccgccgcctaccgccggcgacgttagaaactcaaagatatctatatgaagaagattgggccgatagaactacaaaattagtaaatgagcaggttggacttaagcccaaggaacaaacttatatgtatcggctgccatatcctgaatggtttgatagggttccattgccacaccaatacaaggtcccagatttctccaaatattcagggcaagatgatatatctacaatggaacatatctgccgatttttagcacaatgtggggaggcatcggctgaagaggctctaaaagttaaactttttccattgtctttgactggatcggttttcacatggtttttatcattaccaccaaattctatcagaggatgggtcgatcttgagaagcaatttcatgaatatttctttgctagaatcgatgagttgaaactttcagacttattattggttaagcagcaagaaggagaatcggctatggaatatattaaaagatttcgtaatatccgcagccgatgttatagtttgagcctaagtgatgagcagctagcggatcttgcattccaaggattatcaacacctatcaaggatagattatttttccacgaattcaatagcctagctcatctgatgaagatagtatcgactcatgaaagactaaatgttgaggctcgacaaaatgaggatgaagcccgtcacggatg

SEQ ID NO: 41724 - DNA, 480 bp, Oryza sativa
  Clone ID: PAT_MRT4530_45043C.1
atggcccgacgaggtggaggagcggcggcggcatgggagagatggcggcagcttgatgaagaggaggagcggtggcggcggccgacgacgaggaggaggggcgacaacggcggcacacggaagggaccaacggtggcggcggagaggcgcggattcgcaccggcgccggctcgtgggggaaggagtggcggcgacggcggcagaggaagcggatccgcaccggtgccggctcgtcaatggagcggcggcggcggtggaggggcgcggatccgcgccagctccagctcgtggagggagggagcggcggcggcggcagaggggcacggatccgcgccggttctggctcgtcaagggaaggagtggcggcggcgggacacggtggtgcacggatccgcgtcggtgccgactcgtggagggagcggtggcggcagcggaggggcatggatccacatcggcgccggcttgcggtggagggagtga

SEQ ID NO: 41725 - DNA, 420 bp, Oryza sativa
  Clone ID: PAT_MRT4530_45044C.1
atgggccccgagagttcagaactaccctatgggtccatgaagttctgggctgcccatcgagtaacgaacaatgatcatgaggaggaagatgcttatggagatcctgttgacccattagagtgggacgattacgcgaggaggaatggtacccatgtttcatatcgaggcatcgtcgctgatttcaacagagtccccattgatttcaacaccaacgctgggtattccccaaatttggaattaatggggttagttgtagacgattactctttgcccgaccccggtgatgaggaagacaaagacgatgactggaacaccgacgagaaggcccctccgcttgcatcacccgacaagaatgcctactggaacgatgatgacgacggttcatctggatacctgccaccaaggaagaagcagaaataa

SEQ ID NO: 41726 - DNA, 1041 bp, Oryza sativa
  Clone ID: PAT_MRT4530_45045C.1
ccgaatcggagaaattgccacggatcgagggcgaccgataatggaaggcgagcagcagcagcagcagcagcagagcgtcgcggcggtgaggccgtcgctggggaaggcgccgtcgccgtcgttccggctccggaacggcagcctcaacgcggtgcgcctccgcagggtgttcgacctgttcgaccgcaacggcgacggcgagatcaccgtggacgagctggcgcaggcgctggacgcgctcggcctcgaggccgaccgcgccggcctggccgccaccgtcggcgcccacgtccccgacggcgcggcggggctccggttcgaggacttcgagtccctccaccgcgccctcggcgacgcgctcttcggctcgctggacgtccccgaggacggcggcggcggcggcggcggcgacgaggagatgaaggaggcgttcaaggtgttcgacgtggatggcgacgggttcatctccgcctccgagctgcaggaggtgctgaagaagctcgggatgccggaggccggcagcctggccaacgtgcgggagatgatctgcaacgtcgaccgcgacagcgacggccgcgtcgacttcggcgagttcaagtgcatgatgcaggggatcaccgtctttggcgcctgaccacttcttccatccagggtagccatggcatccgctcaccctcacctagccaacgttcttatcgacggaaagacatgggagaacaacgtgttcatcatcagatcgcagccaagatcagtaggttcggtgtactctttttaagcttaaggcaaggcaattccacttttgttgcagctacgaccttatccctgttagtgcttgttttgtgcatcggaatgcagtgcagggcctgagtttcgttttctgtggccttcattcgcacaacttgttgtgtggtaaggtggtgttgatattatacatctacatggacgtacgcttgctaatctagcgaatagtgatgtggatgttcttgaccctagctatctctaactctcacgtcaactttaaaaattcggtgtttggttttt

SEQ ID NO: 41727 - DNA, 486 bp, Oryza sativa
  Clone ID: PAT_MRT4530_45046C.1
atggtgacggcggcggcggcggcaggcgaccgacttcttcttcgacaacggctggtggcggtggcgggcaagcggcttctgcttcaacggtggctggtgacggcggcggcggcttcggctgaacgatgcccaacaacaacagctagcagcagcaacgccgtggccgacgatgccctacgaccaccaccacccgctgctgcagccgctctgcaacgccgccgccgccacggcgcagagctcggccacgtccgcgccaccgacgcgccgccgctgcgcacctgtccgccacggtgctgctgcagaaggcagtgcagatgggctgctcacgaggcagggaccggaggaggaagggaggtcgctctcagcctctcactcgccgagaaccgccagctcctcatcctgctcaacatctccctcgccgtcctcgtcggctgcagcgtcgtgttgctctcgagctcggtgccaccgcttgccgttgcgccttag

SEQ ID NO: 41728 - DNA, 1867 bp, Oryza sativa
  Clone ID: PAT_MRT4530_45047C.1
cggtctcttgggttcgcacagtagcaggacagtcgccgcctccaacaatggcgaaaccgacggtggtggtgctgcccgtgtggggcgccggccacttcatgcccatgatcgaggccggcaagcggctgctccgcggcagcggcggcgcgctgtcggtcaccgtgctcctcatgccagcgccgacgccggatgcggcggtcgacatcgcggcccaggtgaagcgcgaggaggcctccggcgccgacgacatcagcttccggcacctccccgccgtcgacatgccgaccggccacaccggcgtcgaggagtggatctcccgcatactgcggagccacgcgcccaacgtgtgggccgccatcgccgggctcgactgccccgtggccgcgctcgtcaccgacatcttctgcacgccggcgctcgaggtgtcccgggagctcggcgtgccgggctacgtgtacttcccctgcagcgcgtcgatgctggcgctgctgctgcgctcgccggggctcgacgaggaggtggccgtcgagttcgaggagatggacggcgcgatccgcatccccgggctgccgccggtgccgccgtccgcgctcccgtcgacgatgctggacaggaagaagtcgacgtacgactggttcgtcgccaccggcaggggctacatgaacgccaccggcgtcatcgtcaacacggcggccgagctcgagcagagcgtcctcgccgccatcgccgacggccggtgcacgcgcggggtccccgcgccgacggtgtacccgatcggcccggtgctctccttccccccgccgccggaggagcagccgcacgagtgcgtgcggtggctcgacgcgcagcccccggcgtccgtgctcttcctctgcttcggcagcaaggggctcctgccgccgcccaaggtgcgggagatagccgccgcgctggaacgcagcggcggccaccgcttcctgtgggtgctgcgcggcccgcccaaggacagccggcaggggcagcgggtgcccacggacgccatgctcgacgagctcctccccgaggggttcttggagaggaccaaggggagggggctcgtgtggccgacgcgggcgccgcagaaggagatcctcgcgcacgccgccgtgggcgggttcgtgacccactgcgggtggaactccatcctcgagagcctctggttcggcgtgccggtgctgccatggccgctcgacgccgagcagcacttcaacgcgttcaccctggtcgcccacctgggcgtcgccgtgccgctcggcatggacaggaggcgggacaacttcgtggaggcggcggagctggagcgcgcggtgaggtcgctgatggacgacgcgtcggaggaggggaggaaggcgagggcgaaggcggcggagacgagggccgtttgccggaaggccgtggaggagggcgggtcggtcgtccacggcgttccagaggctcaccgacgatatcgtccgaaggggtgccgttcaaatccgttaagtttgctggtttcacccagattatgtgcgcgcgcaatgagtcctctttactcaatccattcgatgtctcatgttgtgaacttgtgattcctgttggttgatccgtttggtatggtgtcgaatgcgaaactgaaaggactgaaaatccgtcgactgacgactgtgcagtgcagagctggcccaaatcgaaacgcccatgcggctttgcgtgactgcgtctacacgtcgacatgtgtacgttttaaaatgcacgggttagagattctatctatcgactatacgtgtacgtctgtattggcgtttaatatgtgcgtatatgcatatctgttcattgttcaataataaaatctttcaaacaaaaaaaaaaaaaa

SEQ ID NO: 41729 - DNA, 528 bp, Oryza sativa
  Clone ID: PAT_MRT4530_45048C.1
ttcttcttcttcttcttcacagcagcagctaaccaagaagccaaagcttccattgatcactcgctctgctcacattctgatactgcgatggagtgcgagactggctacgtcgccgcggccgccgatggtggtctctgcatggaggtgccccgcgccgacccgctcaactgggggaaggcggcggaggagatggccgggagccacctcgacgaggtgaagaggatggtggcggagtaccggcagcccgtggtgcggatcgagggcgccagcctgaggatcgcgcaggtggcggcggttgccggcgccggcgacggcgaggccgccatggtcgagctcgacgagtcggcgcgggagcgcgtcaaggccagcagcgactgggtgatgaacagcatggcgaacggcaccgacagctacggcgtcaccaccgggttcggcgcccacgtcgcaccggcggaccaaggagggcggcgcgctgcagcgggagctcatcaggttcctcaacgccggcgccttcggcaccggcgccga

SEQ ID NO: 41730 - DNA, 2818 bp, Oryza sativa
  Clone ID: PAT_MRT4530_45049C.1
cggccaaacccctgtgtttgccgtgacgatgccctccctccccaactccggcgacgagggcggcgccccgcctccgactccgccgccgccgggggcgcgccgcgtggtggtcgcccaccgcctccccctccgcgcggatcccaatccgggcgcgccgcacgggttcgacttctccctcgacccgcacgcgctcccgctccagctctcccatggcgtcccccgccccgtcgtcttcgtcggcgtgctcccctccgccgtcgccgaggccgtccaggcgtccgacgagctcgcggccgatctcctcgcgcggttctcatgctacctggtgttcctccccgccaagctccacgccgacttctacgacggcttctgcaagcactacatgtggccgcatctccactatctcctcccgctcgcgccctcctacggcaggggcggcggcctccccttcaacggcgacctctaccgcgccttcctcaccgtcaacacccacttcgccgagcgcgtgttcgagctcctcaaccccgacgaggacctggtgttcgtccacgactaccacctctgggcgttccccaccttcctccgccacaaatccccgcgcgcccgcataggtttcttcctccactctcccttcccctcctccgagctcttccgcgccatccccgtccgcgaggacctcctccgcgccctcctcaacgccgatctcgtgggcttccacaccttcgattacgcgcgccacttcctctccgcgtgctccagggtcctcggcctctccaaccgctcgcgccgcggctacatcgggatcgagtacttcggccgcacggtggtcgtcaagatcctctccgtcggcatcgacatgggccagctccgcgcggttctgccgttgccggagacggtcgccaaggccaacgagattgctgacaagtacaggggacgacagctgatgctcggcgtggacgacatggatttgttcaaggggattgggctcaagctcttggccatggagaggctgctggagtcgcgggcggacttgcgtggccaggtggtcctcgtgcagatcaacaacccggcgcggagccttggccgcgacgtcgacgaggtccgcgcggaggtgctggcgatccgtgaccggatcaatgcccggttcggctgggcggggtacgagccggtggttgtgatcgacggcgccatgccgatgcacgacaaggtggcgttctacacgtccgcggacatctgcatcgtgaatgccgtgcgcgacgggctgaacaggataccgtacttctacaccgtgtgccggcaggagggcccggttcccaccgctcctgccgggaagccgaggcagagcgccatcatcgtgtcagagtttgtcgggtgctcgccgtcgctgagcggcgcgatccgcgtcaacccctggaacgtggacgacgtcgcggacgccatgaacacggcgctgaggatgagcgacggcgagaagcagctgcgccaggagaagcactacaggtacgtgagcacgcacgacgtcgtctactgggcgcagtcgttcgaccaggacctgcagaaggcctgcaaggacaactcgtccatggtgatcctcaacttcggcctcggcatgggcttccgcgtcgtcgcgctcggccccagcttcaagaaactctcacccgagctcattgaccaagcataccgccagactggcaacaggctcatcttactggactacgatggcacagtgatgccacaggggctgatcaacaaggcgcccagtgaggaagtgatccgtactctgaatgaactgtgctctgatccgatgaacaccgttttcgtcgtcagcgggcggggcaaggatgaactggctgaatggtttgcaccatgcgacgagaagctggggatctctgcagagcacggctacttcacaaggtggagcagggattctccctgggagtcatgcaagttggtgacacattttaattggaagaacatcgcagggcctgtaatgaagcactacagtgatgcaaccgatgggtcatacatcgaggttaaagaaacatcactagtgtggcactatgaggaagccgatccggattttggatcatgccaggccaaagagctccaggaccacctgcagaatgtgcttgcgaacgagccagtctttgtgaagagcggccatcagattgtggaagttaatcctcagggtgtgggcaaaggagtcgccgtgcgccggccgggttcaaccatgggaaatcgtggcagcttgccagatttcatcctctgcgtcggcgatgaccggtcggatgaagacatgttcgaggctatgatcagcccttcgcctgcgttcccggagactgcacagatcttcccctgcactgttggcaacaagccgagcttggccaagtactacctggatgacccggctgatgttgtgaagatgctccagggcctgacggactcgccgacccagcagcaaccgcggccccccgtctcgttcgaaaactcgctagatgattgaaggatcaagaagaggtcgcgtgacatatatgctcgtgagaaagagccccgttcatttcgttcatgattgctttttgtaattggcagaaagagagagagaaaaaatggttttggggggaggtgtgaaaatgggaaaagggcaaaggtgagcaaaaactgactagtgatcgatcggtaggttacagatgttcatgttttacccggtaggcagttcttttgtacaaactgtcaaaagttttttttttccctgcctagatcgtcagaagaaacaaaatcatatggttcggtgcccaaaaaaaaaaaaaaaaaaaaaaaa

SEQ ID NO: 41731 - DNA, 201 bp, Oryza sativa
  unsure (1)..(201): unsure at all n locations
  Clone ID: PAT_MRT4530_4504C.1
agagcagccatggcattagcacctagtanaccaaaataaaagctccncatncgaaggcatgcatggaggattaatgaactgttaccttcacacacatgtccgttcacaacntctccagacttttacggtacatcaagctccgttttttcaagtaaacaacactagnttatgttaaaaanaaannnnnaaaanaaanaaaaa

SEQ ID NO: 41732 - DNA, 207 bp, Oryza sativa
  Clone ID: PAT_MRT4530_45050C.1
atggaattagggataaacaagttccatcattacattggatctgctgtttggagaagaccaagtggtgacctgaaaaagaagaaagaaggtggtaatagaagagataccggcagtatcgatgacaagaaccccgggcagtcgacgcgcaccacaaagacacaggaagaggagagtgcacaaacgccctggtgggttggtggcaggtga

SEQ ID NO: 41733 - DNA, 1336 bp, Oryza sativa
  Clone ID: PAT_MRT4530_45051C.1
ctcactctcaacaagaagaagcagaagcatcgatccaatccaatcgaggccatggccgccggcgtgaagaacatggtcatcgccatcctcgtccctctcccttccctcctcttcttcttctccttcgtccgccccaccaccaccccgtccccggtgtcgtcgtggtgcgccgcccaccccctcctcgtcgccaacctcctcttcctcttcaacgttgacctcctcttctggctcatcggcaatctcctctccaaccactggctcatcgatctgtactggaccgtcatcccggtgatgctgctgcactactaccgggcccacccggccgcggttgcggacacggcgaggtcggcggtggcggtggcgctcacctgggtgtggagcgccaggctgacgcacaactacctgaggagggacgggtggcaatggggcaagagggaggattggaggttcgccgagatgcggggccagtacggcaagggccgtggtggtggatgtccttcttcgccgtctacctctcgcagcaggtgttcctcatcggcatctgcctccccatgtacgccatccactccaccacccagccatggggcgcctgggacgtcgtggcaacaatggcatgcctcgccggcatcgtcatcgcccacttcgccgacacgcagctgcacaggttcgtgaccaccaacgagaagctgaagaaggtcggcgagcccacggtgccgaccatggaggccgggctgtggcggtactcgcggcatcccaactacttcggggagcagctgtggtggtgggggctgtacctgttcgcctggaacatcgggcagccatggatggtggtcgggccgcttgtgaacagcctgtgccttggctatgtcaccgtgctggtggagcggcgaatggtgaagcaggagcaccgagcagaggcctacaagctgtaccagaagaggacctccgtttggatcccctggttcaggaagcccgtccctcaaccctacaaccacaaggacagctcaaaccaaaattcgctcaaaatttcgcactcttgattgttcacctttatgtgtttgatcactttgattgctccttcctgtctgtcgtgcttttgtgatgtttcatttgttggcggggaattaactatttggaatccgtaacttgtaccatcatcactttgcagggtgtctggaaattcacggtgtaaaacaaaaaaaaaaaaaaaaaaagctcaagggggggccaggtaccacattcgcctataggggtcgaatacccccctcacggccggcgtttacaccgcgggctgggaaaccctggcgttccaactaatgccttgagacatcct

SEQ ID NO: 41734 - DNA, 1677 bp, Oryza sativa
  Clone ID: PAT_MRT4530_45052C.1
atggagatgtaggagatcgaggaggtgctggggccggccgggatcgccggcgggggggcggcgccggggatcgcaatctcgctcgccgccgtcgcactgaaccccatgctaccgcggacgtccagggacccgcagctacggcgacagaccgtggccgcgttgcccgggacgcagggagacaggaagttcccgtagtggcagctgttattttttgcaaccgcggtctgtaaggagaccgagagagcggattggtgactgaaaaagctgcggactgtggtaaaatcaattgagactgccatgagaaatctcacagcgatgtgcatgactgcaaataggactttggttgtggcaggatatgtgccaatagcaactcttggtatgaaggcgctgtttggtaatagcgttgtaggagtggttcaaattgaccaccttgtgaaagatgatgaagaatccttaaaaggccatgaggttcggttgttgagtcggaaaacactgccctcacttgatttacctaaggtaaggaagaacaaatttatcgagattcttcctattaatgttgggtgtttgggtgcttgcacatactgcaagacaaagcatgctcgtggtcatcttggaagctatactatagaaagtttggtagatcgtgtgaaaattgttgtctctgaaggtgtccgagaaatatggttgagtagtgaggatactggtgcttatgtgtttgcgcctggccctgacttattccacaactatacatctcaggcaatgaatcgtgaatacactgtgagtgaattcaggagggtagttgacactctttgtgagcttgtccctggaatgcaaattgctacagatattatttgtggattccccggtgagactgatgaggatttctctcaaactgttaaccttgtaaaacaatatctattccctcaggttcacatatcacaattctaccccagaccaggaacacctgctgctaggatgaaaaaggttccaagcgttgaagtgaagaaaaggagccgtgaattgacctcagttttcgagtcattttcaccctaccaaggaatggaaggcaaagtagagaggatatggatcactgaaatagctactgatggtgttcatttggttggacataccaaaggatatatccaggtgcttgtcattgctcctgatagcatgttaggaacatcagcagatgtgaagatcacatctgttgggagatggtctgtgtttggtgaagtgatagaaggatccgttgtagcaaaggaaacacagaagcataatcacagtgaactgcaagaagaatacaggccaagtcaggttgaggaagccacttgctgcggcacggactcttgtggtgcctgcacatgctctgatgcagcacagcaatgcaatcccggtccagagcgatccgaaaattcgacgccccaatcctgtggtgatgctactcatcaggaagctgttcagtctaaacttgtgagaagaaatgttgaaggagcggtgaaaagtagcgaaagtgatacagcgaaacaggtaggggagattcagcgactaaatgtagcagctaggaggttcccagatgttgatacgattctgtggggtggtttggccgtgagctttgccacgacagtaaccctcattgcactgctagcttacaagatttcttccacgccctcctactag

SEQ ID NO: 41735 - DNA, 445 bp, Oryza sativa
  Clone ID: PAT_MRT4530_45053C.1
ctagctcggctggaggaggagtggcggtggcggctcggcgaggaggtagaggcagacgcgggcggcggcggaggcagtcgcgggcggcggtggaggcagtcgcgggcggcaaggctgaggccactgcgcacgcgtgctcgccattgctggagctccaccatggccacctcccatgcccgccgatgacgaccgaacaacgacgacttcgcacgtgtgggcagctcggctggagaagcggcggcggcgggggacggtgtccgtgcagcacgtggcgaaggcgtcgtcagacaagctcatgcggaagttcaccgacccggacgcgcacgccaagcagatcacgccgccgcgccgtagccttgcgctgcggcggaagcagtcgtccagcagggtggcattggggctccgcgagggatttggagctcccagcggagctcgtggcgcctaa

SEQ ID NO: 41736 - DNA, 514 bp, Oryza sativa
  Clone ID: PAT_MRT4530_45054C.1
ccctaacacaggctctcatggggattggatttgtgtcccacacacagagtgtgtctcaccgttgccctcaggctcccactgtagacgcagagtgtgtgtctcagaggccggaagatgtgtgtgcccagcgtcagtccgtactagcggtaaccacaccagagtgttgctgtggcgggtctgtaacgttcgggaggtctcaggcggtctaagacgtctaatagccccccagctattgtgttggcccctataatcgtgtgtccggtcaatatgccgggtagcttatccccagcgtatcaacacctgcgtcccgtgtagccagttccgtaccgcgtcggtgggtagtgctgggtatgtgaattggtagcccggtagtaggtagctacccggaagaagaaaaatataaagagtcatgccagtcagtcgtgtgtgacacgcaggtgtgtaaacatcggggggaaaccaatttgaataaaatgtcatgccaattttaacataaaaaaaaaaaaaaaaaaaa

SEQ ID NO: 41737 - DNA, 504 bp, Oryza sativa
  Clone ID: PAT_MRT4530_45055C.1
atgcggctgcagccagcacggataaaactttactcacagaatcagcagcatgcagttgtagcatggctgccgaacaggcgctatataaggcagttggccgctgctggcctggtgattacggagtacatgcatgtgggtagcaagctgggaaaacaagtgagcaccgagcgcatcgccagccgagcagccaagcggcaacggcgccgaccggaggggcggagctcagcggcggagggcttgatggcggaggagctcggcggcggtcgatctgggacggcgccgggcggcggggcggtcgagcggcaacccgagctcctccgctcgagctgggacggcgccgggcggcgggagacgacgcgcaggagctcgacgacagatctggccgacttggggaccgccgctcgtgctagaggagaggggagaggggcgaggcagctgaggaggatggccctgagctcggcgacgcggagacgaggaggtcgacgagctcagtggtgtggatag

SEQ ID NO: 41738 - DNA, 387 bp, Oryza sativa
  unsure (1)..(387): unsure at all n locations
  Clone ID: PAT_MRT4530_45056C.1
gaccaacgcatcaatcaaacacacaagcacaccacgcggacgcagcagcaggggaggagacaatttcctattcttcctcgccccgcgtcgcctcgcctgantctgactctccaaacgccgaccagtgacgccgcgagccttgccccttgcccgcgcagatctcaccaaaccctaccagatctgcgccccgccatggactccgncgccggggtnggcggcctcacggccatccgcctgccctaccgccacctccgcnacgccgagatggagctcgtaagcctcaacggcggcaccccccgcggaggctcccccaaggaccccgacggcacgnaccagcagggggcccccgccgcccgtaacaccancaccaggaagttgttcttggct

SEQ ID NO: 41739 - DNA, 543 bp, Oryza sativa
  Clone ID: PAT_MRT4530_45057C.1
atgattacgcccgcactcctacccgcgaatcattttctttcgacgaaaccgccgcccgccctccaccccgccagtgaccgcgcctcccctcccctagtggccgtgcctccctaccgccggcaccgtcgcctacccctcaaatcctccaccgtgcctccctaccgccggcgtcgtcgcttaccctccaaccgtgctatctatgcccccacgaccgccgctgtgctttcccaacgcgatgacttcaccgccgtgcctcctcacgctgctccagatgcgcgctgcgcctcccgaatcctcctaactccatgccgtcatcgtcatcgcgtggtcccagctcctcccgcatccccccatccccgccgcctcctccaccgtgtcgccgatggctccatgtcgtcgtcgtcgcacggtcccggctggctcctccactgtgccgttgctgcctcatccatcgtgctgtccaagatccagccatccctcataccgaactcccccatcccagcggcggtggcgattctagcaggtaggctctccaatttttga

SEQ ID NO: 41740 - DNA, 352 bp, Oryza sativa
  unsure (1)..(352): unsure at all n locations
  Clone ID: PAT_MRT4530_45058C.1
ccggtcgcccaccgtccgctgggnccncgaacgaggccggttcagccggtgaacttgaaacatttcagcaagtacgcgcgccgtccctgcaggctcactcgggaggtgtggagtgacgagggaaccggaaggctgatctttggtggttcgcgggaactgggtggcggtggggggtgctggcaggcgaggaaggtcctggggggaggcctccggcgctgttcgacggggcctgttcggtcgtgggtgctcggggcgccgctttgtgccttgttgctttttgctctggtcggctggggtgggttcggcctgtgctctggtctgctcgggctctgctgcggttggtttgtgtctc

SEQ ID NO: 41741 - DNA, 1512 bp, Oryza sativa
  Clone ID: PAT_MRT4530_45059C.1
aagcagcatgggcaggaggatgtcgtcggcggcggcggtggtgcgcgtggtgtcgaggcgcaccgtgaagccggcagcgcctcggccgcgggagagcatccccctcacctcctgggacctctccatgctctccgccgattacatccagaaaggcctcgtcttccccccgccgccgccttgcctcctagtcgtcgaccacctcgccgccgccctctccaccacgctcaacacctactaccccgtcgccggccgcttcgtcacccacaaccacccggaacctgaaggcggctgctccgtctccatcgactgcgacggccagggcgtccagatcgtccacgccgtcgccgatgccgtcactgtcgccgacctcctccctcccgacgcccacgtcccgcccctcctccactccttcttcccgctcggggacgccgtcaactacgacggccaccatctccccctcttcgtcgtccaggtcacccacctcgttgacggcgtcttcctctccttcgtctacaaccacgcgctctccgatggaaccgcattctgggacttcctcaatgcgtgggtcgagattgcgcgcgccagctgcctcgccgcgcccacctcgcccccacccttgttcaaccgttggtctccctctcccggagacggagccccggtcgtgctgccgtacgccgacctgtcggagctgatcgagaggctgcagccgccgctgctgtgcgagcggatgctacacttctcatcggagtcgctggtggcgctcaaggagcgggctcgccaagagctcctggcggccggggacacggcgggcgcggccgcgctgacgaggttccaggcgctgagctcgctgctgtggaggtgcatcacccgcgccaggcggctgccggcggagcaacagaccatgtgccgcgcggccatcaacaaccgcgggcgcctccagccggcgctgcccagggagtacttcggcaacagcatctacgccatcagcacggagaaggtgcaggcgtcggagctggtggagcgcgggcacgggtgggcggcggcggcggtggggcgggcggtggcggcgcacacggacgcggacatcagggcgcgggtggcggcgtgggaggtgaagccgataatatacacggcgaggtacttcgacccgtcgggggtgatgatggggagctcgccgcggttcgacatgtacggctgcgactttgggtgggggaaggcgctggcggcgcggagcggcaaggccaacaagatggacggcaaggcgtcgctgtacccggggcgggagggcggaggaagcatagatgcggaggtggtgctcactccacaccacatggcggcgctggacgacgaccacgagctgtgggccgccgtcacgccgctactgctcaacaacaacaaaccttgaagcttttcttcctcctccttcctgccttaattagtgcctgccttttcttccaaaattaaataataaaataagaagctttaagcttttccttccaaaaaaaaaaaaaa

SEQ ID NO: 41742 - DNA, 770 bp, Oryza sativa
  Clone ID: PAT_MRT4530_4505C.1
ctgcaggaattcggcacgagggctagcagcagcaaaatatactatatcatcatcaattaattaagctagtacaattaagaagtagctaagtagtccaatacgatgggcggcggcaagaataaggtgcaggtttgtgcggtgttcgtcgttgctctgaatatggtcatctccatgcagatgggtgcagtgcaggcatgcgagccctactgccccaccccgacgccgccggtgacgccgcctcgcgtcgccgccgtcgggtggagggaataagtgcccgatcgacgcgctgaagctgggcgtgtgcgccaacgtgctcaacctgctcaagctcaaggtgggggtgccggcgagcgaggagtgctgcccgctgctgggggggctcgtcgacctcgacgccgccgtctgcctctgcaccgccatcaaggccaacgtcctcggcatcaacatcaacgtccccgtcgacctcgtcctcctcctcaactactgccacaagacctgcccttccgacttctcctgcccactcatctgattcttaatcttcattaccaccacaaccctagctacctaattaaggcttaagctttgcatggcttagtctgtgtgttgcagttgtgtcatacatatatacttatctcgatctatcagtgtgattattgatgatcagatcgatcatctaatatatgtatcttgttattttaatgcgtactgtcaaataaaagtttcctccagtgtacgtacgttctacttgtgctaaaaaaaaaaaaaaaaaa

SEQ ID NO: 41743 - DNA, 157 bp, Oryza sativa
  Clone ID: PAT_MRT4530_45060C.1
gcaagcgacaagcgaccatctctgcgccagtggccactacggccccggcgcccaccgcttgctcgctcggtccgacgctagctccttacctgcttcttgcccaccctcactgtggctcggcggcacgcggctcatgcgcgacttgtctagcgagtga

SEQ ID NO: 41744 - DNA, 269 bp, Oryza sativa
  unsure (1)..(269): unsure at all n locations
  Clone ID: PAT_MRT4530_45061C.1
tcctccaccggcgccttcttctccacttcctttctcctcctcctgcctcacctctcctcctgtaggctctgatcttatattcgtgggcttcgcctcctcctnntctccacctatcatcagcatcatcaaagcaaacaatatgttgatgagattgtgtacagtaacttcctctagtactgcattatttancttaatgataatatatcctataatacttctctttgtgatatatatcaggatttccttcattctctttattccttctacta

SEQ ID NO: 41745 - DNA, 435 bp, Oryza sativa
  Clone ID: PAT_MRT4530_45062C.1
atggctctgccgctgctatcgtcgcccctcacctcctccatcaagctctggacccgcccttcccgagcccgaagggagccactcccgctcgctgccggtgcgctcgagcccgccaacactactcctacccgccaccactactctcgagcctaccaccgtggcttaggagaggaggataagaatgaaggagaggatgtgggaggagtggagaggctggagtggataagaatggagaggataaggagagagaatgagggagtgggtagaatttttaaggtagagggaggtaggctggacttttcgcaggtggacctcttaataggcccgaatgagaaaataggtgtccacttgcagaaatgtatttccgtatacgggtcttttaaggagctggatgcgaaaacacaagttgatttttgcagatgcgatcagttatag

SEQ ID NO: 41746 - DNA, 1470 bp, Oryza sativa
  Clone ID: PAT_MRT4530_45063C.1
ccggccgggatccaacaacaacaactagtctcagtcatgccgcctctcttctccgcgccggcgctccaccgccgccgccttctccgccacgccgccgcattcgcccttgtgctcctcgccgtcgccctcctcttcctcctcctcgtacacccccgctcgctcggcaccccttccccttccccgtcctacggccaccgcctccccacgctcgtcgacctcaccctagtccacggcgccaaggagaagggcgctgtctgcctcgacgggaccccgcctgggtaccactggctgccaggcttcggcgacggatctaacaaatggctcctccacctagagggcgggagctggtgcaggaatcgcacgtcctgtgatcatcgcaagaaaaccagtcttggctcatctgcttacatggaaacccgggtcgagttcgtcggcatcctaagcgacgacaaggcccagaacccagatttttacaactggaacaaggtcaagatcaggtattgtgatggtgcctccttatctggaaatgtccaagatgaacaccagtatggcgccactttcttcttcagaggccagcgcatctgggaggccgtcatggctgaacttctacccaagggtctagcccgtgctaaacaggcttttcttacaggatgctctgcaggtggtctatccacatacattcactgtgatgatttccgtgcacttttaccaaaggattctactgttaagtgtcttgcagatggtggtttttttcttgacgtggaagacatttctgggagaaggtatatgcggggcttctataatgatgttgctcgtcaacaggatttgcggaaacggttccctggttgtagttcagatatggaaccagggcagtgctttttcccacaagaagtggcgaaaggcatcaccaccccaatgtttattctcaatccagcatatgatgtttggcaggtagagcatgtcttgactccagacggatctgaccctcaaaatctgtggcaagattgcagaatggatattaccaagtgtaatacgaaacagcttgaaattctacaagtcctgctgattcatttgcttctgcgatcaatgacatgtcatatactcacatctgcttcaattctggtgaacagactgtggctgaagcggtgggcgactggttctttgatcggagagaggctatttaatagcccgaaggatccaaacaaggccatactatatgggtatggcatgcccaacttggcagtgaccagagtgtgtttgtccttgttagatgaagctggaatggaacgtaagttgtccggtctaagcacgcaatttgttggaagatttgcacatacacttgtttcctttcctctgcctccactagcaaaggcttggctagcagccgcagcagtatctttgtttgatcggctcatcaatctttctggtcaaatgatgtttctgtgtgaaaccgtcaagtttgtccagtaa

SEQ ID NO: 41747 - DNA, 137 bp, Oryza sativa
  unsure (1)..(137): unsure at all n locations
  Clone ID: PAT_MRT4530_45064C.1
acccactcgtcctcccactcgtcctcccactcgtcctgcgaggagggctcccatgaagtcctacgacctcaccttgtggcggcacattctcttcngcttcccatccacccttatcgtcaccgccgtctggntacccc

SEQ ID NO: 41748 - DNA, 402 bp, Oryza sativa
  Clone ID: PAT_MRT4530_45065C.1
atggccggaggagagggagcgacggcagcggcggctccccctctctccctcccggctcctagatctggccagagaagggagagcgacagtggcagcgcggacggcgacggaggcatggacgcgggtgacggctacgaagaggcagcactcatcccttccctctcccagatccagcccctacgaggagaggcggcggcggcgacggctccccctctctccgttcctagatctggccggaggggggggggggagcgacggcagcgccgcggacgaggcgacggcggcgccgacgcgggcgatggctgcgccgatgcgggcgatggctgcgcggaggcagctcccctcccctccctctcccagatccggcccctacgaggagaggggaggacggtgtcggagtag

SEQ ID NO: 41749 - DNA, 489 bp, Oryza sativa
  unsure (1)..(489): unsure at all n locations
  Clone ID: PAT_MRT4530_45066C.1
tgcagcaggttgcccgcccggttgatcgatcaccaccagcaagctagagatggcgagacgggctgcatcggtggcgctggcgtgcgcggtggtggcggccgcgatggtgctcccggaggcggaggcggggcagaactgcatctgcgagtgcgtgaagctgtgcatgcggacgcggatcccgagcatcgaggcgcagtgctcgggcaagtgcagggagacggcgtgcgtgcggagctgcgaggaggcgtgcgcgcgcaagggcttccccgccctgcccggcgagggcatcggcgcctgcgagctggagccgctcacccccgacgaggcgcacatgctgcactgatcatcgagtcaccaaccaatcgatggcaagcctaccgccgtttccgtctccgnctctggctctgtctctgggtatggtactgtctccgcctcttctgcgctgntgtatactntgatatgtgtactacatctaccacaccggtcaaa

SEQ ID NO: 41750 - DNA, 3175 bp, Oryza sativa
  Clone ID: PAT_MRT4530_45067C.1
atgtcgtcgccgtcgccggcgttgtgcgccgccgcctcctgctccaccccgcttcgcgttgcgtcgcctgtcgttcggttccgccgccccggcgcgcccgcgcccgtcgtatccgcggcgcgcgcgtcgtcggcggcggtcccggccgtctccgacgacctcgtcctccgcatcgcggagcagctggaggactcggtcgcggcctcctcgccgctcctcgacccgctccgctccgcctccgcgctctccctcctctccacgcgctggccaacccgccgctccaacgaggcctaccgcttcaccgacatctcctacctccgctccctccccatctccctcccctcccgggacgcccccgccgtcgcgccgcccgcctccccctacgcctcccacgtccacttctccgatggcgtcctcacctcctcctcgggcgcccacgtctccgccctcgcggacctcccgcctggccacgtccgggaccgtgcggccgccgctctcgccgcctccgcgggattcgccgacaaggacctcttcttcgacttcaacgccgttggcgcgaaggatgtcgtggtcgtgcacgtgccggagggggtaagtatggccgacgacccggtgcacatcatgttcagttacagtggctgcggcgatggtagtatgatgatgtcgaacccgagggttctcgttgtggcggagaagggggcggaggtggccatcattgaggagcactttggtcaggaggacggtgggtgttattgggctaatccggtgatggagatcatcgtggaggaggatgcgaaggtggtgcattcctatgtgcagcagcagtcgtttgcggctgcgcataccaagtggaccgtcgtccagcagaatacatctagcaactatgagtttgttgaggtaagcattggagcaagattgaacaggcacaatctccacgtccagcagttgggccctgagaccaacacacaattgtcaacgttccacttctcagcgcagaataaacagatacatgatcttcatagcaagcttatacttgatcacccaagaggtcgttcacaacagatacatagattgattgcttctggtacagggaatggcatatttgatggaaatatcaaagtgaacagtattggtctcatgggtcagccagaagatgatgaccccaacgacgacgagtacacaccaccggatcatccgctgccggcgccggcggcggggcggcggcggtggccggtgatgacgagcttgaacctgacaaagtacgtggactcgctgccgcggattgccaagatccggggctacggcatccgccatggccgtccagtgcccatcaagctcaccatcggcatgtacagcaagacatggcaattccaccgcgacatgccaccgacgccggtgttcgtgtacgggcaatcgctgcagacagcgacgttcccggggcccaccatcgtggcgcggcagggcgtgccgctcgccgtggagtggcagaaccacctccccgacgcccacatcctcccgtgggaccccaaggtccccaccgccatccccaagaagggcggcgtccccaccgtcgttcacctccacggcggcgcccacccgccggagttcgacggccacgccttcgcctggttcacccgcgacttcgccgagaacggcagcacatggacgcggaagacctacacctaccccaacgtgcaggcgccgggcaacctctggtaccacgaccacgccctcggcctcacccgcgtcagcctcctcgccggcctcctcgccgcctacgtcatcgagaagcccgagctcgaggaccccatgaacctcccctgcggcgaccacgacctccacctcgtcatcgccgaccgcgagttctacaccaatggctccatctccatcgaccgggagtggaagccggagtacttcggcctcgtcatcaccgtcaacggcaaggcgtggccgtacctcagcgtccagcgccgccgctaccgcctccgcatcctcaacgccagcaacgccagatacttcaacgtcacgctctccaatggcgccctccccttcaccgtcattggctccgactcctcctacctctccaggccggtcaccgtctccaacctcgtcctctcgccggccgagatcttcgacgtcatcgtcgacttctcccggttgccggcggcgatgaccgagatcgagatgctcaacacggcgccctacccgttccccaacggccctaatgtgacggacccgaacctcgacgggaaggtgatgctgttcaaggtcgccggcaaggggaaggtcgacgacatgccggacaaatccaaggtgccggagcacggcgtgccgtacgcgagcgtggcggcgctcccgccgccgacgacgacgaggtacatcgtcctgtacgagaaccagaccgcgccggggaacctctacatcaacggcctccggctggaggacccggtgacggagacgcccaagtccggcacgacggagctgtggcaggtgatcaacctcaccggcgacaaccacccgctgcacctccacattgccacgttccaggccatcaagatgacgaagatcgagggattccaggtgttcaaggactgcatgatcaaaaacaacaacaccgccacgtgcaacctcgaccagcacgccgtcgggcccgtcgtgccggtgccggaggaggagaagacgtggaagaacgcggtgaagattccgccggagttcatgacgtcggtggtggtggcgttcaggcttgtcgaggccaatcagccctaccccttcgacgccaccaccgagccgggattcgtctaccactgccacatcctggatcacgaagacaacgccatgatcaggcctctgaagctgcttccatgaacaagaaacgtagtgctgatcgatgagaatatgagatgaagaagcttcttcactaggattaataattctgagcatttacgtttgagtgaaagttgtttatgttatgttatccaagtctttgtttatgagtgaaagtttgctagtcataaactggtgcgctctgacggggtatctgtgctacggacttaatttgggtttgtactttattggaagttatatatgaattatgttgttgattgttgaagtacactgtacaaaataatatagcttatttcaggaaataaattttaatccttcaagggatgttccc

SEQ ID NO: 41751 - DNA, 570 bp, Oryza sativa
  Clone ID: PAT_MRT4530_45068C.1
atggtgccgccggcggcgcacgcgccgaagaacctggggctgaggggggtgcggcgccggctgtggggcaggtgggcggcggagatccgcgtgccgcggggccaccgcgcggccgcgaggctgtggatcggcacgttcccgtccccggcggcggcggcgctcgcctacgacgccgcgctctactgcttccacggcggcgcgccgccggggaaccgcgccttcaacttcccgcacgcgccgcgcctccgcatcgacgaccgccgccgccacgcgctcacgccgggccacgtcagggccatcgccgagaggtacgcccacgacgtcggctccgtcctgttccgcccgctccctccgccgccgccgcccgtcgccgccgccgccgtccccgtgttcgccgcacctgcaccgcccatggcgccggcgccggccaaccatgctgccgatccttactactgcaacgagcctgacaccaccacagacgaggacgtcatggctgcggctgaccgcctcctctccatggacatcgaagaggtcgccgctttgatcgccattgttcagcaaggagagtga

SEQ ID NO: 41752 - DNA, 402 bp, Oryza sativa
  Clone ID: PAT_MRT4530_45069C.1
atggcgactcatgcggatgtctctagccgctcgtcaccagcggttgggacctcgcagtgtcacccgcctccttctctggctccgcatcaccaagccgctcctcgaccgccacttgttgtcgccggaaacgcgccggagctctgttcccctcgtgcatctccatgcttaaacaccactagctcacttaatgggaataactacattagctacattagcatcttgatgagctgtgtgctcaagacatatggccatgttttattggtcgtaattgtccaactaaaatatggcttaatggtgggctgcgggtgcatggttttgctagacgcacacatggcaattaaggatcggttcgtggcaaaccttggaagacttaccgcgtttaccacaagcaggaatggctaa

SEQ ID NO: 41753 - DNA, 257 bp, Oryza sativa
  Clone ID: PAT_MRT4530_4506C.1
tatcttcgtcctactactctcctcatatcggcgcgtagcttttgaagacgctcgcgggctatccctaattctagcgcggacgactcctagctgcggcgcgcgtgcgcacacgtcgaggcggcttttggggcgcgcggccaggaggtgttcttattccatccttgtctccaaggggaggggcatcttctagaagcttgggctacttaccaaggtcttttttatttctgcttactgttaaacaatatacaaaaggtgag

SEQ ID NO: 41754 - DNA, 499 bp, Oryza sativa
  Clone ID: PAT_MRT4530_45070C.1
gcacgaggtgcaacatttcattttatgcatcacgccgattctgataaactggaactggagtatggcgagggaattagggctagcatgataagtccattgactacctatccaaccgtagtggaatcagtgccactgagcacatcaaatgattgtgcgctgtgttggatggcgtggcatacagagaatgaatagatataattttaatttgagcaggataggtgattgtgttctttttaaaacaacaaaaatattcacatgggttagagctaaattgttaactaggtcttgtacaagccgtattattagtaataaggctgatactttaaatttagtctatttgcaccttagtgctttaaactaaatttattgattttaatgactaatttttttcgttcctaaatttctaccaatccaagctgcctagtaatagtagcagtagcagtagttggcagtttcccacattcctggtaaccaatgggggcaagcttgaggaggaaca

SEQ ID NO: 41755 - DNA, 1392 bp, Oryza sativa
  Clone ID: PAT_MRT4530_45071C.1
atggcgagcagcaggcggcagcagcacaagggttcgtggtcgtggacgtcgcgggtggcggcggcggcggacgcggcgtcgtggtgcctggcgctgtcgctggtggcgctgctgctggtgtgctcgctcgggcccggtggcgccgccggcggcgagcagcggggtggtgtggcggcggtgttgcgcggcgcggcgctgtcggcgcgggcgtgcgaggagatctacgtggtggcggagggggagacgctgcacagcatcagcgacaagtgcggcgacccgtacatcctggagcagaacccgcacgtccacgaccccgacgacgtcttccccggcctcgtcatcaagatcacgccgtccaagcccagtacacgtgctgtcgtatgcaggctcttgcctgtatctaaacaggtgaaaccaatggaaggaagattccagctactccctttgtaccgttggagagaggctccagtgacagtggagacccggccccttcagttgccacttgccagacgagggccccgcgtcctcgacccaaacgtgcccgtaggagtaaccggcggtgcgaacattcggaaagattggcaggagaaatgcagcaaaggtcctctgctcaacgcagatgccgccatctcagagcacaatcaaggcaaaatctggtggtatattgaaaaggttgttatcattggggcgacaaaagagattggaagaacggcaatagcggcaataagtggcatggaagaagccctggaaattccggtgctcaatgatctcacaatggttctgggctcaattgcacaaaccagagcaactggagtggtggttgattttagtgaaccttcaactgtttatgataatgtcaaacaggcagcggcatttggtttaaacagtgtggtgtacgttccaaaaattgagttagatacagtaactgagctgtcagcattctgcgagaaggcaagcatgggttgcttggtcacaccaacattatcaattggctcagtgctcctacagcaagctgctatccaggcctcgttccactacaacaacgtcgagatagtggaatcaagacctaacccatcggatttgccatcgcaagatgcaatacagattgcaaataatataacagatcttggtcagatatacaacagggaagatatggactccgataatccagcaaggggtcagatacttggagaagatggggtgcgtgtccacagtatggttctaccaggccttgcttccagtacatcgatccatttctcgggccctggagagatttacaccttaagacatgatgtgacaaatgttcaatgcctaatgccaggattaattctggcaatacggaaggtgatacgcttgaagaacttgatttatggtctggagaagttcttgtag

SEQ ID NO: 41756 - DNA, 1274 bp, Oryza sativa
  Clone ID: PAT_MRT4530_45072C.1
atggcttacctgaaccttcgctttcctgtaatctccgtcttcagaacaaaagcatggttaccactagcggcagaacgagatcatggctactttatgccactctgttcataccagagcattcggaaagattggcaggagaaatgcagcaaaggtcctctgctcaacgcagatgccgccatctcagagcacaatcgagggtgttatcattggggcgacaaaagagattggaagaacggcaatagcggcagtaagtaaagcaaggggaatggagcttgcaggggccatagattctcagtgtataggcctagatgcaggagagataagtggcatggaagaagcctctggaaattccggtgctcaatgatctcacaatggttctgggctcaattatcaacgcgttgatctatctcgatcgatcgagagatcgatcaacctgtacagtggacaacgatcgacgcgaatgtatggcggaatgcagagatggttcttgtttgtttgtgttttttcttgctttgaagtttgaaagattctgaccaaagaagggcgccgtatcccggagtttgtttcgtcgtcgtttgcttcgtttgacgatgatgaccagaaccacacgtactggaagcacaggtaagctatccacctacaatatggggaaaaaaactaagttacatagtgtagtggtagttgttaggcaggcagccttgcctggtgtgtgtgtgctttcttcattccgttataaatagaggctaagttgtcagttggttacctgaactgaactgatgcagtggttggtaaaagaaaaaactgagactgatgtttgttagatgcgtaagcaagcttgccgtaattgtggcgtgttgataaaagtgcggctaagaaatagttaagtgtaatatagttagctttcaattgaagaatttaccatttgtcactctaccaaaaaagagaaggcaagcatgcctggcaggatttgccatcacaagatgcaatacagattgcaaataatatatcagatcttggtcagatatacaacagggaagatctctgataatccagcaaggggtcagatacttggagaagatggggtgcgtgtccacagtatggttctaccaggccttgcttccagcacatcaatcaacttctcaggccctggagagatttacaccttaagacatgatgtgacaaatgttcaatgcctgatgccaggactaattctggcaatacggaaggtggtacgcttgaagaacttgatttatggtctcgagaagttcttgtag

SEQ ID NO: 41757 - DNA, 421 bp, Oryza sativa
  Clone ID: PAT_MRT4530_45073C.1
tgaatggacaaaataaacaaggagaaaatagcgaacgagagattatctacctgcttggctgtgacagttagatcctatgcattgtcagtctgtcacttttcttcctagtagtaccatgatacacttattattatcgtcctgctcacaaaaaattgcagagttcatcatcagggatagataattagaggctttggatatatagcattgcaatgtcaatgttgcatatgcagcagtgtgcaaaccaactttttttatgtggaggaatcttgtctctgagcctgtttggtcagttatattgttgagctagacatgtgtgagaaacagtatatgttgagcctgtttggtcaaatatttattttaagtgacattataatctatttccaagtttgaactatttggctctattgtgcagtttagtcgt

SEQ ID NO: 41758 - DNA, 221 bp, Oryza sativa
  Clone ID: PAT_MRT4530_45074C.1
gatctacggacgcgtgggcggacgcgtgggcggacacatgcaacggacgcgggggtctacatgtatatacaccaccgtttcctgcaaaagggccacattgccttacacagagtagcattatagcttggagcaaacgtggatgtacaagaactatgtgtgagatcgacatacaatcactattacacacaccttataatgaacaagttttacacgttgagact

SEQ ID NO: 41759 - DNA, 210 bp, Oryza sativa
  Clone ID: PAT_MRT4530_45075C.1
atgggtcgacaggccaagcccaacacacaaagcatagggagcaaaaatagacatattatatgccacgtcgccacccccaagcagcaccaccgctcagctgttgtcacgaccattggatccatgccaagattcgtgcatcggcttctctccaactccgacaggctccccttcttctccggcgccagcgacaccccgactccagagggttag

SEQ ID NO: 41760 - DNA, 518 bp, Oryza sativa
  Clone ID: PAT_MRT4530_45076C.1
attgttgctcatacgacatgcctaaaaaggcttgcttaattaactgatgacgagatgtgtgaaagggaatatgcatgaccagtcatcatgttgttattaactatttatgcgattttcaccctgatgtttggtcctcagtcacgttatcaaccttttgttctccataagcattattatcattgtctgatgtggacctgtgaagtgttcattacttatcaggctgtgatatatggacatctcgccagccgagcttgcgatcaacatagtagatcctgtcacggaattcagtttgttagacagcctttatcctgccaggcatttgcagtgaattgtgttttaattcagattgaatatttcagccaaccaattacagccaatcttactataaatagtcatggacaaatcatttactgctttctgcatcctcccctgtttttaattagttgctctcacatcatgtacttccacaaatgtatcaactgcaatattaatatatgtaacgaagcatgttgaattta

SEQ ID NO: 41761 - DNA, 445 bp, Oryza sativa
  unsure (1)..(445): unsure at all n locations
  Clone ID: PAT_MRT4530_45077C.1
tttgaccacatganagggtgacggtacacgctgnataggacacgaaactttgctgatactcaacgggcccgcacgggtcgcgagggcacatttgcttagacacggcacaactataccagatataaccacgcacctggatgatgatattctccacgaagatgaagatgatgatccactcctctccacgggaggtagagatggtttnctttctccacgagtatgtttgaaaggtgtttcctatatgtgaaaatagagtgcacgatgattactgctcacctgttgcaagctcattagatgtgacggcaatacatttcttctggcttttaactaggccatacatccactcgctcacacacaatacatcctttttggtcccccaaggaacttgtggcatatccatcnctgttactatggacgttttggagaaaaaaaaaaaaaaaaaaaa

SEQ ID NO: 41762 - DNA, 252 bp, Oryza sativa
  Clone ID: PAT_MRT4530_45078C.1
cccacgcgtccgtggatctgttggagaagaagaacattaagaaggggggagaagtggaggaggaggtggctcgcaagggaaagggaaggaaggagaaaaagttgttgttgaagaaaagagcccttcaccacttctgcaaccaggggaggaggagcttgttcgcctctttcttgcctgcggtaggcccaaagtatttccaatgtcgagcccttcacctaatccttcgcaacttacaattttctatgggggatc

SEQ ID NO: 41763 - DNA, 223 bp, Oryza sativa
  Clone ID: PAT_MRT4530_45079C.1
tcaagcctggcgttgcttggaaaccattggagaaccaatttaagtttctttcgttttaatcgtagtggatcagacttttccaagtaataattacctgttacttgactgcatgtgtcagcctggagtctggatgttgtctttgatgtggacccgttgttacttatactgtttcattatatggatgaaccgatgagtctttaagaaccctcaaaaaaaaaaaaaa

SEQ ID NO: 41764 - DNA, 795 bp, Oryza sativa
  Clone ID: PAT_MRT4530_4507C.1
ctaccgaatttcgatttttctttctttcttcgctaaagaagacgctaattgcgatcgagttaacccggtgagagatcgtttgctttttgcacggaacgcggaggaggcgaaggcgaggagaggcgagatgagatgagatgccgtgcgttgtgggcgggcggccgccccgcgcttcgcttcaccctcaatcctttcctttctgtcgcggccaactcctcgccaccacgccgctttattctctaagaaccccctcccctcccctccccctcctcctcctccgtccatcgcagctactgcctccttcttcttcctcctgatcctctgctcatcgtagaaatcgcgatcgccatacttgaccttgcagagctctgtctctgtctctcgctctgattgaagtgttctgctgccatctctctcccgcttctgtctccgtgtgtgcatatatatatgctgtattggggacgttgcggcagcggttcttgggtacatggcctactcctcacggtcttgtgatcagtgcagtcacggataaatttgagggccaccaagatttgactgaccctgactgcgcctgcgtgccccgtcaatcggaggtagaattgaaaaaggaaaagaagataacgctgtgattagcacggtgtagagaggggccatgttagcaacgcaagcaatttcgtgtggcgttttgtccctgtgcttcttgatcttgttcaatgcagagaggagatccggcttcatgaagtggctctgcgctatcctgaaggggacgaacgacggttaggccaaccgacggcg

SEQ ID NO: 41765 - DNA, 162 bp, Oryza sativa
  Clone ID: PAT_MRT4530_45080C.1
atgacacgaacacgaggtgaggttggggttggggttgggctggcggtggcggtggcggttgaggcgtgggattgggggagaaaacacgcccgaacgctgggaatatttcggccgttggcggccacgcggtggcagccagacacggaactctatggacagtag

SEQ ID NO: 41766 - DNA, 492 bp, Oryza sativa
  Clone ID: PAT_MRT4530_45081C.1
atgggtggcacgctctttggcggatcttgccctagtagcggaggcggcggaggccgctacggcgaaagcgacggcgacaatgtcagcagaggggattatggtgggggttaccgcgtctacggcgtttgtggcacaggaggtcatcgggcggtggagctcatgcagctgccaccgaaccacgttcctcaccgccatggtgggggaggtcaaggaggtggctatagcggtgccttccttcatcccctgcaagctattccattgctgtaccaccgaagagagagggagctcgacgcccacactgaggcgaagagtgaggaagcgagaaggccggcagccgcaccggatgttgatagtggtgacgacgacacaatcaggcaaattggaacgatggcgcagtggggatggccgaccatggccattgtttgtcttccccacggcagtaaaaacaatgaggcgctgctcctctattgctcatctttcccacggcgatga

SEQ ID NO: 41767 - DNA, 335 bp, Oryza sativa
  unsure (1)..(335): unsure at all n locations
  Clone ID: PAT_MRT4530_45082C.1
ctcgggtggntctgcgcaggctgctgtacaggagcaagcagcggggtttnttggagctggccncatacaagcagcgaggacgacggcaagccagacctcggcgtcaccagcaccggcggtggctgattactgctgctgcttcaccatgtcctctcttgcagtagcctgtctaggtctgttcttttttcctatcatctcttcttttttaaaaaaaaatgnaaagggcaaagacttgtaatttgtaacctgtaatgtagtagtaccaaccatcgagggctggactggaacaatcttaataaaataacatcaattagcacgaaaaaaaaaaaaaaaaa

SEQ ID NO: 41768 - DNA, 1110 bp, Oryza sativa
  Clone ID: PAT_MRT4530_45083C.1
atggagatcaagggcaatctccgccgcttcttcgtcttcctcttcgagctgtggctcgcggccacccttgtcctggtcctgctatgcgtgctcgccaacacggggggatcgccggagatgccggcggcggcggaagtctgcaactgcagtcagattggaatcgcttcttctcgcatatcagaagaagttactggtaccagcggtaattccaacgagtcaagttttgcagatttagctgagcttctgcccaaggtggcaaccgacgacaggacggtgatcatcacgtcggtgaacgaggcgttcgcgcggccaaactccctcctcgtcctcttccgcgagagcttcgccgccggcgagaagatcgcccacctcctcgaccacgtcctcgtcgtcgccgtcgaccccgccgcgttccaccactgccgcgctgtgcaccctcactgctaccacctcaaggtggacaccatgaacctcagctcggccaacaacttcatgagcgaggcctacgtcgagctcgtctggaccaagctctccctccagcaacgcgtcctcgagctcggctacaacttcctcttcacggacgtggatatcttgtggttcagggacccgttccggcacatcggggtgtacgccgacatgacgacgtcgtgcgacgtgttcaacggcgatggcgacgacctgagcaactggcccaacaccgggttctaccacgtgaagtcgacgaaccggacagtggagatgctgcggcggtggcgggcggcgcgggcgaggtacccgccgaaccacgagcagaacatcttcaactacatcaagcacgagctcgccgccggcctcggcgtgcgcgtccgcttcctcgacaccgccgtgttcggcggcttctgccagctcttccgcaacgacatggcgagggcgtgcaccatgcacgccaactgctgcgtcggcctcggcaacaagctccatgacctgaggagcgcgctcgaccagtgggcgaactacacgagccctgcgccgccggaggggaggaagaagaagagcggcggcggtggcggcgaccgccgcgccgggtggagcgtcccggccaagtgcgggacgccggacaagaggggatga

SEQ ID NO: 41769 - DNA, 768 bp, Oryza sativa
  Clone ID: PAT_MRT4530_45084C.1
ttactcaaggaagaagagtgacgagacttgccaagcttgaaagcggtttgacttgggctcggccttgttctgggcctcgggctcaccttggtccttgtatagcttgcatcccttgaacgtgtagagatgtagcctagagggggggtgaataggctttcctaaaattttctcaacaattgcagcggttaaattgacagggcccggaacctcctggtgatgaacaccggaactttcgggcaggatgagtagcccgaaacttccggagttcttgagctgccaggaggttccgagcaaaagtgccaggaacttccgggcagcacttaggaaattttttgcaaataaacggtgcccggaagttccggccagaacctccgggtagccctctcttcggtgattttcgcacttaggaacatttgaattggggggtctccttgcattcttagccatcacaacttgctttgggactaaactctttggacagtggcgcttgggacacgcgtcgcacatgccccgcgccacctgatttagccaaacgggcagagaagcaaccgtggcattgtttcgggtaggtcgggccttatcgggcccaccacgcaccacgtggtgaacacactggcggaggcccaaccatctaagacggagcccggagcccggggtaatatgaactgtaagacttgaagggtttcttgagaaacctccgggtggcttgaacctgtataacctcctgcctctctcttctcgtgaggcggttgggccccacgaatccat

SEQ ID NO: 41770 - DNA, 3039 bp, Oryza sativa
  Clone ID: PAT_MRT4530_45085C.1
ggtacatccatggcgggagtcatggacggcaagctggtggtgtgtggctgatgaggaggatcttgaccctcgtcaccaagcacgacctacttcgactccccctcgccgcaatcctaggcgaggggagggccgggataagtctggggactcggccatctcactgctggcaggcaagggaggacgctgagaaagagtgcgctgccgcctcacgacgacggtggcacgcctcagggcgcacttctgcgccaccccttgtcgatccagagccagagacctcggtccggtgctggctggacgatgtggccaacctggtcaccaccgcacagcggcagcttgccgctggcggccggacaacggcggctggtatatcacgtagtacgattgccctctctttgtcgtcaagatggagagcacaccgggtggcggcagcttcccgccactcgtcctcacacccctcgtcgatgcccgcagggagctgtgggcgccatgagtgtatctacggagaaccggacgctcggcttgacatcgagcgctggctggatgtgcattgagccgcccgtgcgccgagagtaaagagggtggcaatgcgccgataaagtccttatcagacactaaacacccttttctaaagataaaaggaaactaacaaactattcctaattagtagataaactgtcatgccgcatccttcttgaactcggactcttctggataaattccctttagttgatccgactccatcgagaacacggttggtggtgatttgacgactcccatcggctgattccataactctgaagccgatactgactctaagccgatgatgactttgggcttaccaaattttgtcgttaacacatgccccccagtggatataaaatcatggtcccaccgggcgtgccaaaagcgtgttgatgcgaaaaacacgaggcctgggagatctgcttaactccatgcggtacaacggaaggacgatgagtccctccactcatacatctagcagttctgtcaggtccgcaacaccatcgatcccatgcatccctcctcacgcggtcatctacgcatttaggggggcgtgtggcataaccgcgtgctgaagaaggtcgcctccaaggagcacaaaacatacgcggagctttttcagctcgcggatcacgtggcccgcaaagaggaggcgtgggcttggaactcctccagctctggcgcggcggctgcggctgcccctgagtcctcctcctgctccaagcggcgagagaagaggaagaagaagagatcggtccgatccggcgacaaggaccacgtcctcaccgccgaaggcaccttgcggcccccgcacaaagaaaaggccgcgagcatcaaacagaaggacaccgccgccccttgtgagagccgctcactagataagtggtgcatcatccacaatacctccacccacagccttgctgactgtcgcacgatcaagtccttggccaagcgcgtcaagaagtcgcatcaggagaagcggcagggtcaccgggagggtaaagccccggagacctcggccgacaagcggcgagaggaggccaagaagaaggcccccgtcgacaatggtgatgaggacctggagttctaggagcttgacaccactatcgccaccgtcgactgtggagcatgcgcccacgcatccgaccgtagctttaaggccatgaagcgcgagcttctggccgctgtccctacccatgaggcgacacggcgagcacgctggtcggaggtgaagctcaccttcgaccaaaccgaccacccgccagtggtttcccggggagggcagttggcgctggtggtatcgcaaaccatctgcaacgttaagatgaagcgcgtcctaatcaacggcggggtcgcactaaacatcatctcccccgcggccttcgacgccatcaaggccccagggatgaagcttaagacgtcgctacccatcataggagtgaccccgggacacacgtggccgtccggtcatattgtgctcctggtcacctttggtgatcctaccaacttccgcaccgaacggctcgactttgatgtggcggatctcaatctgccctacaacgcggtccttggcaggcccgcattggtgaagttcatggcggtcacccattacgcctacctccagatgaagatgctgagccccggcggccccatcaccattagtggcgatgtcaagatcgccctgacttgcacgaagcaacgtgcaatcaacctcgcagccggagaacggcggcggggggcctgagaaagattatccttggcaatgatccgtccaagaccgaagattggtggtaacttggacgacaaataggaagacgcgctcgtctccttcctgcgggcaaacgccgacgtctttgcctgaaagccgttggacatgcctggggtccacagggaggtgattgagcaccatctagccgtgcggccggacgcgagacccgtccgacagaaggtgcggcggtaggccccggagcgacaagcttttatccgcgaggaggtggcgcatctcctagaggccgagttcatccgagaggtcatccatttggagtggttggcaaacctggtgttcatccccaaggcgaacggcaagctctggatgtgcatcgactacaccgaccttaacaaggcatgccctaaggatcccttccctttgccacgcatagatcagatagttgactccaccgtggggtgcgactttttgtgtttcctagatgcttattcaggttaccattaaatctgcatggctaggaaggatgaggaaaaaactgctttcattactcctgtaggcacattttgttatacaactatgccttttggtttaaagaatgtgttggtatttcttaacgacattactagaaatataattcccagcaatgttggattatctcaaagatgatggcgccaagaccttgtcacacgttgtaagcaatccacgtcactagatggtcagctccaggaaacaatgaatgctttaaaatcttctaggcacaggactaacataaacaggcagatacgaaaagc

SEQ ID NO: 41771 - DNA, 849 bp, Oryza sativa
  Clone ID: PAT_MRT4530_45086C.1
atgacgtcaccccggcggcggcggctcggcggctgggacggctcgggcggcgcacgcttgccggcgaacggcggcgcgaggacgctaacgaagggcaccagcacgtagaggacgacgcggcgaactcaccggtgaccaaaacggcggcggaagatcaacggacggcgacggcgacgaggaggaagcggcgaagctcttcgggtcgacggtgacgagggtgctccggcggtcttcggcggcggcgaaggggcggacgaggacggcgacgcaacggcgatcacgacggcggtcttcccgagcgacggcggcgtctggaacggcggcggagcacggctggagcggcggcggcgactgcgaagctagggcttgcggcgctagagcgattccgacgacgagaggcgaaggcgaaggtggcgacgggtagaggagagcacggggaggcttttaaaggggctcggaggcgaaggcgaaggcccacggcggccggcgacgaggaaggaaggttcggcaaaaacgaatccgagacgaactcgaatccctcgatttccaaaccgatttagccgatgattccaaaggagaaaaggtagaggagatcccggagattgtttcccctaaatctattcggccggagaaggaaaggagcggccggatttggaaggaaacggcggcggcggcgcgctagggttcgggcgggcgacggccgaaggtagacgacgactgacaggtgggccccacctgtcagcgacagcgagggcgcgcgtggctgcggcggactgggccggctgggccgaggagagagaaaagagaggttttgggccgactttcggcccaaagccaaaagaagacttt

SEQ ID NO: 41772 - DNA, 462 bp, Oryza sativa
  Clone ID: PAT_MRT4530_45087C.1
acaggaccgtgggatagcgacggggatgcttggagggccccgctccacactgcactctcagggatcctcgcctgcttcccggccgtctccaagctcatcctcaagtgcgaccgccatcccgagagcatcgccgaccccctcggctcggcccttcgacgactcaagctttgctccctctgtctcgttgccgcgctcggcaccagcctccacaagctctccgccagctcatgcatctttggtgccaaggggattgagggcgtcctccgcgcctgcctccatctcgaggagcagtgccgacagttagcgaggctggtcgaactagaggaaaagaggaaggggagagttgtgagactgatagtgtgcacgcgacatgaatccaccaacgtctccatgggccgcctcaccctgctccctgccctgctcttctcgtctctctctctctacccggccgttgggactcgc

SEQ ID NO: 41773 - DNA, 483 bp, Oryza sativa
  Clone ID: PAT_MRT4530_45088C.1
atgtccgccagttcttctgccccatccgcgccggatgcgcgcacccagtttctcgacctgctgaacgccgccctgcatggcaataccctggtcaaactggtattggcgcgccatgtcggtgccgaccagaccttgcaacggatcattgctaagccgctgcaggtcaagggccagccgtgcctgtcgctggtctatcgccaccagacccgtgacatcacccgcaatctggcgctggagcaggcccaggcgctggtcgccgagctgctaccggacagcttccgcaacgcgcacctgttcgatgccgacggtgaagtgcagttgaccttcagcaagaagggcaagcccagctccagcgccacggcgcacaggcgccacgcgaagctgccagcagcagcggccatgaccgcgagaagaagcgctatctggagctttcacggccgttcctgcgtgacctcggggttactgacgcacaaggcgcgctga

SEQ ID NO: 41774 - DNA, 624 bp, Oryza sativa
  Clone ID: PAT_MRT4530_45089C.1
ccattaccctaatccctaaaattccctcccctacctcaatcaagcaattcagatccgtctatgggctaaatggttccctgaagtatcagcaaagttctgacaaacagactgtctgtagtggctccatccaccgttgcctcaacacaaactgcttttattccaggcaggttcatacttgaaggatgtgttattctacatgaggtgatgcatgaactaaggagaaataaacaaagaggcgtgattctgaaactagattttgagaaggcttatgacagagtgagatggggattcgtttatggggtgtttgacagagagcattttcatgaaaaatggattcactgggtgaaaagctgtatagaaggtggaaaagtctgtatcaacataaatgggtagagatctaatttttttcagcacttacagaggcctcaggcaggaggatcctatctctccgctgctcttcaattatgtgagtgatgcgttgatccagctatttgatgcagccaaaagcgccaatatcctaacagggctggtcccacacctcttccctgggggattgactcacctacaaatgcagatgatacagtgatttttatcccataccttgctgtgaccaagttccttctt

SEQ ID NO: 41775 - DNA, 426 bp, Oryza sativa
  Clone ID: PAT_MRT4530_4508C.1
atggctgtcctctcctctcccgtcccttcctctccccgtggcgcttcccctcccaccagccccacgccggcggccacctcctcgccggcgtccttcaggccggtgccctgctctcccatagcgccagtttctccctcgtccaggttccgttcggttggtcgttcaaagcaccagcgttggtgtgggttgagtcctttgtccgatgaccccagcccctcgtcgtacaaggaggctcttctatcgacgtcggtgtctcacgtctccaaaacgccatccccagttatctcggcggcgccttccccggggacctctgcggtggtttcggcggtgcactcaccggtgttttcgcggtcgccggtggctttccccaagtcgaacgccggctcttccaacgtcgccaacctcgtcctgtgcctgtcgacctga

SEQ ID NO: 41776 - DNA, 1402 bp, Oryza sativa
  Clone ID: PAT_MRT4530_45090C.1
ttttgatcaatcaagaaatcgttctagctagaatgaggtgttcgatggcggcgatggcggtggtaatggcggtgatggcggcggcggcggcgtcgccggcggagggcgcgagggcgttcttcgtgttcggcgactcgctggtggacaacggcaataacaactacctcctgacgagcgcgcgcgccgacatgccgccgtacggcatcgaccacccgagccaccgccccacggggaggttctccaatggcctcaacatcccggacatcatcagcgagcacctcggcgccgagcccaccctcccttacctcagcccggacctccgcggcgccaagctcctcgtcggcgccaacttcgcctccgccggcgtcggcatcctcaacgacaccggcatccaattcgtgaacatcgtgaggatgagcaggcagctgcagtacttcgcggagtaccaggagaggctgcgcgcgctggtcggcgcggcgagggcgcggcggatcgtgaacggcgcgctcgtgctcatcaccctcggcggcaacgacttcgtcaacaactactacctcgtccccttctccctccgctcccagcagttcgccctccccgactacgtccgcttcctcatctccgagtacaagaaaatcctccagaggctgtacgacatgggggcgaggcgggtgctggtgacggggacggggccgctggggtgcgcgccggcggagcgcgcgctgcgggggcgcggcggcgggtgcgcgccgcaggtgatgcgcgcggcggagctgttcaacccgcagctgtcgcgcgcgctgggggagatgaacgcgcgcgtcggccgcccgggcgcgttcatggcggccaactcgttccgcgtccacttcgacttcatcagcaacccggcggcgttcgggttcgccacggcgagggacgcgtgctgcggccagggccccaacaacggcctcggcctctgcactgccatgtccaacctctgcgccgaccgcgacgcctacgtgttctgggacgcctaccaccccacggagaaggccaaccggatcatcgtcagccagttcgtcagggggtcgctcgactacgtctcgccgctcaacctcagcgccgcgctggagatcgacgccgcggaggaggcggcggcggcggcggcgaggcgccggcggcagcgcgcggtggcgaggctcgtcggcgacaagccgcacgcgtagctagcttgtgtgatgtgctggtgttaaccgtgttatggcaaggagagagacgtgtccatgccatgcatgtgtggctgttggggtgggtgctgagtactctcgcacgaggaaattaattggaagctgataataattccgattttcctaactaatttcagaaaatttcagatttctgatttaaaaaaaaaaaaaaaaaa

SEQ ID NO: 41777 - DNA, 385 bp, Oryza sativa
  unsure (1)..(385): unsure at all n locations
  Clone ID: PAT_MRT4530_45091C.1
attcaaaaaaacatttattaacaccaaaatgaacatggaactagggtttgggttattttcaccactgcatcactgggacagggaggcccattgtaaaaccatgctgttcatgttgggaggtgagtttggaggccaatccccatcgtttggtgcttaactgattttgctccggggaaaactcgcaaacgtttttattgacagggtagccgagggcatcgatgatcattcgggagttttcctttaagaaacgaacaatacccttcacgaactggggcatttgctcatttgngacccactttttgatccgagccaaccactgggggaaactgtcggggaccttttccgtgatttcctggtggagagcgttgatcacgggggaagcaac

SEQ ID NO: 41778 - DNA, 824 bp, Oryza sativa
  unsure (1)..(824): unsure at all n locations
  Clone ID: PAT_MRT4530_45092C.1
catggggtaaattgccaaattgtctgactaaccgccacttgcatggaacanancaaccaggtaaatagtacaaattatgctgcctacgaatgctgtgacctactctagatcagatggcatgtgacagtgtccccctttactttggctaggtcaggacataagaaagtagatgtgtcataacctgttagccgtccattaatcttctagtattattctaatgtgataaagatgtagcttatgtattcaacagatattaaaaaaaaagggcttctttactcatgatagtgttgattacttgatttccaactagtaaagtgaacggtagcagcaatagaagcaagcatgtaagaatgtcaaaaagtaagaacagaagtaagaatttgattctgaaaagtctgcaacactgctaattatctatgctcctaggtccttgaattcactcttaagaatttccaattaattcacattttatggttgtctattctctaacttcaggtgattctcatttgctgaaccaaaactagaaattcttccaaagcaacttttaccaaatagtaagccaataacaaggacaccactatgagctatcctgcgttataaaccagaaggagctgatctaaaaataacatacaattctagcaaatgcacagaaaaggttatggagcaaaaagggaaccacctagtagcacaaaattgtttgatatgtaactaactttcagttttggccctcaaatttgttgggaggtatcacaaagttaaaaggtactacatcaatacggacgcgtgggcggacgcgtgggcggacgcgtgaacgaacgcgtggg

SEQ ID NO: 41779 - DNA, 984 bp, Oryza sativa
  Clone ID: PAT_MRT4530_45093C.1
atggcggcgcctgcacccgcacctgcaccaccggcttcccgcaagcgcgcggcggcgccggacgacgaaccgaccgccaccggatccactactcccgcggcggcggccggcgccaagaggccgcggaggtacgcgctggcgagcgtcgacgactacgagcagctcgacgtcgtcggcgagggcgcctctggcgtcgtcatcatggcgcgccaccgccgcaccggcagcaaggtcgcgctcaagcacctcccccacggcgcccgcgacttcgacgccgtcagggtcgaggctgcctgccagcacgcgtgcaccggccaccccaacatcgtccagatcaaggacgtcgtcgccgacgccaagtccggggacgtcttcctcgtcatggagttcgtcggaggcagcctccgcgacgagctaccaagggcccggccggagaagcaagtccgcttcatgatgcggcagctcatcggcgccgccaagaagatgcacgcctcgcacgtcatccaccgggacatcaagccggagaacatcctcaacagcttcggcgacctcaaggtctgtgacttcggctcagcgacgttcgtcaaccccgccgggaagccatacaaggagtgtttggtcggcaccttgccctacacctcgccggagcagctcgccggcaaccactgctacggcccgggcgtcgacatctgggcgctgggctgcatcatgggcgagctgctcaccggcgcgccgctgttcggaggcgacatgacggagaaggagctgctcgccgacctgtccgccaacctggaagaccaactcaacgagctcttctttgatgtcctgccggagctgtcgccggcggcacgcgaggtcctctccgggctgctggcgttcgaccctgagaagagaatgacagcggcggaggcgctggagcaccggtggttcgccgaggagcccaagaaagcaaacttcgccggcttcgcgcctctgtttggttag

SEQ ID NO: 41780 - DNA, 313 bp, Oryza sativa
  Clone ID: PAT_MRT4530_45094C.1
tcctttttttttttttttcgttttttttttttttttttgtcgcaaggaagctgaagctctgcttttcctttcagcacctttggggggcgagttcatacagaggagcgcctttttacatgttttctcatataaggggggggggaacggtttttttgaacggctggcaggggggcatggcttgttttttgggacttcttaccccccccatttggtttttttttgccctttctggcgggggcgcccatgggaaaaaagcaatttgtgggctgggccatttttctccttatatttggaaccaaacggaagatctttt

SEQ ID NO: 41781 - DNA, 403 bp, Oryza sativa
  Clone ID: PAT_MRT4530_45095C.1
ttttctctctctctccctccatccatgtccggccgtcgccgccgtcggccgatgtcgtccttcgtagttccccttcctcttcccttgcgccactatgctggctccactccggcgaatccattttgcccatctccccttccttttccccttgaatcaagccaccaccacccctctctttaccaccggagataagctcttctactcgggcgttccggccacatccctcttcctctcttccatccaccaccctccccgggtgcgcgtcgctcgggaacacaaacctccgccgacgtcgcagcctcccagccactggagcaccgccgccccactcggcctctcctctctcttctctcggctcactgtgagacagaaagaagagaacgaaaagaagaagaagaaaagg

SEQ ID NO: 41782 - DNA, 357 bp, Oryza sativa
  Clone ID: PAT_MRT4530_45096C.1
atggctgctgccctcactcactcggatccattggccgttgccctcccccgcctcgatccggcagcagcctccctcccgcgtggatctatcggcggcggcggcggcggcggcgaagggaggatgatggcggcatttggataccccgccgagctcgccgcgacgcccgggcaccgcgtcagcacctctgggagcaccacgccgaacgcgtacacgtcgcggtaccccgccgatcgagctcgccgcggccaccgccggggacgagcccagctgcgccaggccgtaccgctccaggcgctagaggccgacagggagaccatgcgccgacgagatcctgcagtacatgggcaggtcaagtaa

SEQ ID NO: 41783 - DNA, 264 bp, Oryza sativa
  Clone ID: PAT_MRT4530_45097C.1
atgatgaagtcctattgccgccgatcgaaccgccctcctgccgccggtcagaccgccaacgcctcgctggtcaaaccgcccggacacctgcggtcagaccgcagctatcccaccagtcagactgcgcgtacacctatggtcgagattcttaagctagtagcttctggtgatcatgcagctgctctcaaggtaacagccgctcatcaggggcctcctgctgccaattgcaggttagcaggaggcggtattgaagaaccccagtga

SEQ ID NO: 41784 - DNA, 135 bp, Oryza sativa
  unsure (1)..(135): unsure at all n locations
  Clone ID: PAT_MRT4530_45098C.1
atgccatcgccgttagggntccgnncattcctccncgccgnnnacncctttgggatgaacngngtntttggcggcgcggantggacggggccctancggcgatggtnttttggggaaaaaatcacttgggcgatg

SEQ ID NO: 41785 - DNA, 354 bp, Oryza sativa
  Clone ID: PAT_MRT4530_45099C.1
atgatgaagtcctattgccgccgatcgaaccgccctcctgccgccggtcagaccgccaacgcctcgctggtcaaaccgcccggacacctgcggtcagaccgcagctatcccaccagtcagactgcgcgtacacctatgtggacgacgatctatcaccggcaacactctcccaaggccttaagcaacacctgcacatgcaacaaccaagaaaccatattccgagcccaagtcgagattcttaagctagtagcttctggtgatcatgcagctgctctcaaggtaacagccgctcatcaggggcctcctgctgccaattgcaggttagcaggaggcggtattgaagaaccccagtga

SEQ ID NO: 41786 - DNA, 982 bp, Oryza sativa
  Clone ID: PAT_MRT4530_4509C.1
agccgcaacagaagctaaatagtgcgatcagagaagtcgtgaaaaaataggtcttgaaactcctacacgctgggataatatattttatgccgtatagagagtgggttagcctggtgcaggttgtgcgtaagaagggaggcatggcggtcattcaaaactcgaagaatgaattgattcgatgacgcattgttacgggatgaaggatgtgcattgattacagaaagctcaacaaagctacaaagaaagaccatttcccgctacctttcattgatgagatgctggattagctaggaaatcatcaaattcccatctatgccgatgatcaaagcaagacaatgtttacatgtccttacggaatgtacgcataccagcggatgtcgttcggttgtgtaatgcacccgtgtcgttccaacggtgtatgatgtctatcttctccgacatgattgaggaaatcatggaaatcatcatggatgacttatccatctatagaaagagttttgatcaatgcttggagaacctggacaaagtcttgcagcggtgtcatgaagaggacttggtgcttaactaggaaaagtgtcatttcatggttcagaaaggaatagtgctcgaacatcgagtctccgaaaaagcagtacaggagtacaaagttagaattgtggtaatccaacaactccgacctcctataatgttaaaggggtccgtagtttcctgggtcatgcggggttttattgtcggttcattaatcatttttctttagtagctagacccctcaccagcttgccagctaaggatgctccctttaactttgatgattagtgcttaaaatcttttagttacctaaaagactctggcttacaactctataatgtacgacccccacggacttctcgccgcttcacagtctggtgcaccacggtgagccttgctacacaaagtgtccttggaaataaaaaaggtaataaattaaaatttttatttgaaa

SEQ ID NO: 41787 - DNA, 785 bp, Oryza sativa
  Clone ID: PAT_MRT4530_450C.1
tcgttcacgcgtccgcgattttaaatatctctatgggcgggccatagaggagtacagtggcgaagccgttaatgttttggtgggacttctagaaagtaaaaaagaacacaaacaataattatgttcaattttttaaatcctaatgataaaaaagagaggatgcggtggatgggccgtagtggagtacattgacgacgtttgacgggacttctaaaaattataaaaacgaaacccaacgagacaatcaaatctgaaaactataagttctaatttttgaagttctaaagaggatgaatagaagtaatgatagatcaagcaatcaaataaaggtgtagcagaggagcaagggtagcgactaacgtgacttttaaaaactttaaattagaaacatgggaatgataaattttaaataaaatcatatgtaaaaacaataattttatacgggtactagccgcgcaattgcgcgggctacccaattataagaggtaaagtaggaatatattttataaataaaaaaatatcggaatgaaaaatataccggttctaaagagggatgaatagaaatagtgatagaatcgagcaatcaaataaaggggtgacagaggagtaagggtagctattgacgtgacttttaaaaactttaaaaatagaaaacgctagaatggtaaatttttaaataaaatcatatgtaaaaaggcaaataaattttaattacaggggcttacttgggcaaatggcgcggggcccccccttaagaatttaaaggcgggaaatttttttctctt

SEQ ID NO: 41788 - DNA, 919 bp, Oryza sativa
  unsure (1)..(919): unsure at all n locations
  Clone ID: PAT_MRT4530_45100C.1
ctcgtgcanttcggcacgctttgtcacctgcaccccgaggagaggagaggagcaatggcggcggggtaccgatgcggaggacgactacgactacctcttcaaggtggtcctcatcggcgactccggcgatcggcaagtccaacctnctctaccgcttcacccgcaacgagttcagccctcgattccaagtccaccatcggcgtcgagttcgtcacccggctccctgcaggtcgacggcaaggtcgtcaaggcccagatttgggacaccgtcgtccaggagcgataccgtgctattactagtgcatattaccgcggcgccttctgcgcccttctcgtatacgacatgtgccgccgctccaccttcgacaacgtcggtcgctggctccaagaactcaacacacattcggacacgactgtagccaagatgttggtgggcaacaagtgtgatctggataatatccgcgaagcgccggtagaggaaggcaaagcacttgctgaagctgaagggctgttcttcatggagacctctgctctggactcgacaaacgtgaggacagctttcgagatcgtaatcaaggagatctacagcaacgtgagcaggaagatcttgaattcggactcctacaaggcggagctatccctcaatagggtaagcattgagggtgattcgaaggatgatcagaaacagtcaaaccggtttggatgttgctaggggttttagtacattattattattggattcactgtgatatgaaggttttttgttcattaatattattattattatctgtaaacttgtaatccaaattgttttttggtttggttactctggtacacactgtgacactgagatacaaagtgagagaagaatagttgctggtaatgaatagttcccaggactgctttgtgctgttacctg

SEQ ID NO: 41789 - DNA, 354 bp, Oryza sativa
  Clone ID: PAT_MRT4530_45101C.1
atgcgggaaggcggcagcacgctaccatcgagcggtgcggagccccgtgccatgacgccggtggaggaggagcttgagagcgagcgagtgcggcaagggttggacgagcgcgccacgccgcatttaatgcggcgcagcgcacgcttatccgccggagccggcgtggtaactcctggagttggcacgtcagtcccggtcagatccattccaggcttcatcgcaaccatggcaaggaagtcattgtatgaagaagggcagacgtgtgacaaccgtgctctcacgttgcatctgcttccggcggagtggaggcgagtgacggcgctgggcctcactcaaggacaagctgtgatttag

SEQ ID NO: 41790 - DNA, 262 bp, Oryza sativa
  Clone ID: PAT_MRT4530_45102C.1
cggactgcaactccatccacgagcaggggcagtgcttcaaccccaacaccgtggtggcgcactgctcctgggccgccaacagctacttccagaggaacagggccatgggcgccacctgcgacttcaccggcaccgccaccctcaccaccagcgacccaagtaaaaaatgattcaccacccaagtcacttcaattcttgtattttttttttcacgaatgcgcaaaaggattgcacgtcaatatattacttcctccgtttcaca

SEQ ID NO: 41791 - DNA, 483 bp, Oryza sativa
  Clone ID: PAT_MRT4530_45103C.1
ttttttttttttttatgtatatgcatattgcataatgttaacttgtatcaaagtcccaagagatcacaacctggatgaataaattaggtttaatacaactgtttacaaaattatcctgatgactagctgagtcgacttggagccaacctcggcaaaactttaattatgtattttaatcctatataattgtatttgagccttttttccaatcctcatcagatcaatctgacttgcttgcatacatcttcagttcttggaatgctttccggcaaccttcatcaaacccacctgcaagctgatgtatgcggaaggcaaagcggacaccttggagaagcagttcttcgtcatttgtgaatgggttcggactttcagtggcattcacaacgcggtttcatgaattctcttgctagcttcaatgaagccatctttagtgggttatggatccagagtcaagcatccaattcccaaggatccttaagatcc

SEQ ID NO: 41792 - DNA, 2970 bp, Oryza sativa
  Clone ID: PAT_MRT4530_45104C.1
ctatggggtgtagtggaaagctccgtgggagggcggagtaggcgtcgagggaccaagctcggcggcgtcgatcatggcgtccatggtccacgccatgtcgtcgtcgccgtcgccgtcgatcctcagtgtccaggttctgatgacgaaggcgcggctcgaacggtcgcaggtggtgtgcttgcccaggctgccgcagcagcagcgggaggagatgtcgacgaatttgagcgcggcgccgccgccgtcgatggcgcagacgacggttcgagtgttgagcagacaacgccgatagttgtcgccctggcggtcgaagtgctcctcgtcgaacgcgccggcgggggcctccacggggagcgacacgtactgcagccgcgggggaatttcgtcgaacaggtcgtcgccgcagaggatgacgccgcggtacaggtcgacgtagcacagcagccggtcgccgacggggacggccatgtcggtctcccagtaggagagctcctcgcccttgccgtcgtcgtggacgatcggcgcgatcggcgtggcgctccactcgccggagcggagcacgacgagctcggcgccctccagcgtgtcgcgcctgcggtactcctcggtgaggagcgccgccaccacgagctcgtcgtcgtcgtcgtcgccgcagcggcgcacgaggaggccggtgctacctccacgcagccggggcggcttggtattggtaccctgataagtcgggagagcgacaacgacggcggccgccgtggtgggtcctcgtcgccgtcgccggcattgtagaagaagtaatcgatcccgtattgttggtacccttccttctggtaatgcatctcgaggagcacggagtcgccgtgggcagcgacgacgtacatcgagggccggtaatgatgagctccgtatccggagccgccgcacggtgagcagtggaagcttagccccgacgccgccggtggcgactcgaggcggagggagacgcggacgagatggccggacgaggagcgggaggccgccccggtgatcttggcgtcgcatggtcggcttcaccggccggtcttcctccatggagatcatcatcagcgtcgacgggtcctccagcatcatacgggctacgaggtagccagcgatggaccatgtctggaacttcctggcctgcttgccgatgaaccgtcccagcttgccatcgtagtactctggccagccgtccttcagtagcctggactcggcgagctcaatggcgcgcttcgccatctgcggacgcccagtcttgatgcaggctgctgtcagcagccacaggagaactggccatgatcctccattgtgataactccaccgggtgttcttcgggtcgcagccagtgattattctccattcatggttctcaattgcagggtaacatatcttcagaggcatctcaccaactagctcttcccaccgctcctcaatcagatccattattgccactgattgctctggagtagccagagatgatataatggcaatgcaatttccaagggcaaaccaccgaaagtccatcatagctgggctcacgttgccaaggaagtagcctccccggcatggcatgaaatcaaacacccagtcagggattgaatccgggatgacattgaatttgttcacagcagtgtgtgaatactcctctgttttatatctgtatatgttattcaggtgtgggaaatctagccagaagtaattcctcatgtggtaggttagagcatgtagccgttgccctatcttttctatgaaatccttcccttcaccatctggcttaagcatctgcagagcacatctcaacgccatgtagaatagagcttggatctcaataggataaccatatatacccattcgacgatctatcattgagcagccatctgtgcagagcagagttgggaaggtatcaaatccctcagataagcataggttcagtatcagcctcatgcagttctgacactctggtgattctgccaaactagtatctgccgtatactttgtatatgcccggagtagaataatccaccaaaatccagagtccactggagccaccctcccaattgcactctcaccaaaatctgcaactaaagtttcagtgtttctgttccgattacgatccaccttgaaacttgcaggcatcgctcctgctccaagcttgaaacggtctaccattttctccgagctttgcaggtggagtgttttcaagaggaagtttttcactatatcagtctcattattcattagaaaagccaatgcacttggaaaaaaatctcgcacaaaaacctgatcataattgagcacctcctcggacgcatggtcgacggcggcaatcgtcccaaccggctgcccccggaagtacaccacggacttcctgagagcctcccacgcctcgttcacgagcgggtggggatcaccgagcgtccccagcgagaagggcgagtcgaagcccgaggggaacgccggggagtgcatgatgctgtcgaagccgtcgttctggcggtgggagagctcactccacgactgctcgtcgaaggacctcttcctctccagcgtcagcctcggcttgtcgatgaggagccgcgagagatcgaggttgatctccgcctccgaggcgatggagacgtgggacgacaccctcttcatcctgctgatgacctcctcttcttttcttggtcaaatttgtttcagcacgaatcagttcgagtaaatccaatgtgaaattggaaagacaggcaatgcaagatccttgaatccgaagcggcggcggcggcgtgttcgccggagaagaatcgacgaggagagagaaaccagccaactaataaaccaaccaatgagagcgtcgccgttcaccgatcttgcggtctagatccaagcgcaagaacggcaagatctcctccggcggcggatgggatcaagagggggagggatcgtggaaggaggtggtggtggtcctcgtgc

SEQ ID NO: 41793 - DNA, 472 bp, Oryza sativa
  Clone ID: PAT_MRT4530_45105C.1
tgccgctgttgattagcagcagcatagaattcagggcacccaggtatatctaacaagcaatgccatcattgagcacaacatttcacttgctactcgtttctgtaatttctgtcaagtgctgcatggagcatggataatatatctttgggaaagaagtggtaattggacaattgcaaactttgaagaaatttgcaggaagcatgaagcatgatgcactgactaaataagtttcagaaaaaaataaatatggttttgctatgacacctatgtttgatttaccatcatgataacatgatagttatggtatatttgggccctttatcccattagatggagatatatttgggccaaatttcttacaaccaaatttattttgtaacaattttttgtaaatagacaattttaccaagatattaacgcattagggaacaagttctctgttgatagctaaaaaaaaaaaaaaaaaaaaagg

SEQ ID NO: 41794 - DNA, 306 bp, Oryza sativa
  Clone ID: PAT_MRT4530_45106C.1
ttttgttgtttttttttttatttgttttttattttttgtgttattttttttttgtcttcttttttttttttttatttaaatcacacatgctcttttttttttgtttcacattctttatggacagaaaaaaatccctggaggacgaggtgtcccaagggcgggtgggggctgcagacctaaacacaggaggtatttaccggggccaaaaaagtttgtatgtacagcatactgcgggaggacggtatggcatacaaaacgaaaaggcgggtgacatactgtgggtaaacggacgaattggcctcccca

SEQ ID NO: 41795 - DNA, 555 bp, Oryza sativa
  Clone ID: PAT_MRT4530_45107C.1
ggccgcttttttttttttttttttgttttttttttttttttttttttttttttttttttttttttttttttttttttttttttataaggccaaagggaaaccaccccggtaagcaacatagtaaatcctctccttgcacagggatggatgacccggtacatgaaataaatttgcccagaggtacatgctggcgaagggcgccgttctcacgctacatcactacatacagggtaaagcaacgggccctaggcaaacagcaacgggttttactacaacaccgacccctggttctatgggatgaaaacattaaaactggatctctcccgccacaggaaaaactagatctttggtatagaaaggtaacatctacagagctaccctacaaatccgcccgccgcatttctccattggtatagacattatttttttcatcggttatctaccatcgccaggatgacttcccttttgggcaggaagccctaggttgggttgtccctgaggagtctcgtcgcatcggatttcggtgactgctcgtcttcccgctcaggctgactg

SEQ ID NO: 41796 - DNA, 1650 bp, Oryza sativa
  Clone ID: PAT_MRT4530_45108C.1
atggccggtatcgcggctctagccaactgccaaagtgatgagaggagttcgtcttgcggcgctgcgttgctggagttcatggggccagccgcgccgccgtccgaagccgccgcggcggccgacgatgtggtgctcccgtacatctcgcgtattctcatggaggaggacatcgacgacgacatgttcttctgcctgtaccccgaccaccccgctctcctcgaggcgcagcagccgttcgcccagatcctctcctcctcctccagcatcgccggtgaggtgaacagtgcacccatggaggattctgctgccttgatgatgcaggggagcggcaatggtaggggacggaagggtagtaagcatggcggggacgagctggaggccgaggtgggcagggcgagcaaactgatggccacgccggaggaggaggaggacgacgacgatggcgtcggcgagatgttggagaagatgatgctcaacggggacgaggacgaggcattccacggggagacgaacgcgccgcgcgtccccgcggagaagaagtgcgggaaggcggcgcggcggaggaggaggcaggccaaaggggaggtggtggacctgcgcgagctgctcatgtcgtgcgcgcaggcggtggcatcgggcaaccgccggagcgccggcgaactcctggagcagatcaagcggcactcgtcgccgacaggggacgccaccgagcggctggcgcattacttcgccgatggcctggaggcgcgtctggccggcgcggcgagcctggagcgccggctggtcgcgtccgcggaggagcgcgcgtcggccatggagttgctggaggcgtaccaggtgttcatggcggcgtgctgcttcaagtgggtggcgttcacgttcgccaacatggccatcctccgcgcggcggaagggaggaacaggctgcacatcgtggactacggtggtcagtaccacggcctccagtggccatccttgctgcagcggctggcggagagggaaggcgggccgccggagttccgcgccgtggcggcggcgaggtgggagacggtcaccgccgaggacgtcgtcggcgtcgaccccgacgacgaggcggcggtcgtcgtgaacgacgtgctcagcctgggcaccctgatggacgagagcggcgtgttcgacgacccgagcccgcgggacacggtcctgggcagcatccgcgacatgcgcccggcggtgttcgtccaggccgtggtgaacggcgcccacggcgcgcccttcttcccgacgaggttccgggaggcgctcttcttcttctcggcgctgttcgacatgctgggcgcgacgacgccggaggaggggagccacctgcgggtggtgctggagagggacgtgctgaggcgggcggcggtgggggtgatcgcgggggaaggggcggagcgggtggagcggccggagacgtacaggcggtggcaggcgaggaatcggcgggcggggctgaggcaggcggcggtggagggcgacgtggtggaggcggtgaggagaagggtgaggaggaggcatcacgaggagttcgtgatcgaggaggatgcagggtggttgctgcaggggtggaaggggcgcatcctgtacgctcactcggcgtgggtcgtggcagaggatggtgcgcactag

SEQ ID NO: 41797 - DNA, 1758 bp, Oryza sativa
  Clone ID: PAT_MRT4530_45109C.1
atggggccagccgcgccgccgtccgaagccgccgcggcggccgacgatgtggtgctcccgtacatctcgcgtattctcatggaggaggacatcgacgacgacatgttcttctgcctgtaccccgaccaccccgctctcctcgaggcgcagcagccgttcgcccagatcctctcctcctcctccggcatcgccggtgaggtgaacagtgcacccatggaggattctgctgccttgatgatgcaggggagcggcaatggtaggggacggaagggtagtaagcatggcggggacgagctggaggccgaggtgggcagggcgagcaaactgatggccacgccggaggaggaggacgacgacgacgatggcgtcggcgagatgttggagaagatgatgctcaacggggacgaggagatgaacgcgccacgcgtccccgcggagaaaaacggcgggaaggcggcgcggcggaagaggaggcagggcaagggggaggtggtggacctgcgcgagctgctcatgtcgtgcgcgcaggcggtggcatcgggcaaccgccggagcgccggcgaactcctggagcagatcaagcggcactcgtcgccgacaggggacgccaccgagcggctggcgcattacttcgccgacggcctggaggcgcggctggccggcgcggcgagcctggagcaccggctgctcgcgtccgcggaggagcgcgcgtcggccatggagttgctggaagcgtaccaggtgttcatggcggcgtgctgcttcaagtgggtggcgttcacgttcgccaacatggccatcctccgcgcggcggaagggaggagcaaggtgcacatcgtggactacggcggtcagtaccacggcctccagtggccatccttgctgcagcggctggcggagagggaaggcgggccaccggaggtgaggatgacgctcgtcggccacccgcagccaggtttccggccagcccgacggctcgagaggacggggcgccggctcagcaactgcgcgcgcgcgttcgggctcccattcaagttccgcgccgtggcggcggcgaggtgggagacggtcaccgccgaggacgtcgtcggcgtcgaccacgacgaggcggcggtcgtcgtgaacgacgtgctcagcctgggcaccctgatggacgagagcggcgtgttcgacgacccgagccctcgggacacggtcctcggcagcatccgcgacatgcgcccggcggtgttcgtccaggccgtggtgaacggcgcccacggcgcgcccttcttcccgacgaggttccgggaggcgctcttcttcttctcggcgctgttcgacatgctggacgcgacgacgccggaggaggggagccacctgcgggcggtgctggagagggacgtgctgaggcgggcggcggtgggggtgatcgccggggaaggggcggagcgggtggagcggccggagacgtacaggcggtggcaggcgaggaatcggcgcgcggggctgagacaggtggcggtggaggccgacgtggtggaggcggtgaggcgcagggtgaggaggcggcatcacgaggaattcgtgatcgaggaggatgcagggtggttgctgcaggggtggaaggggcgcatcctgtatgctcactcggcgtgggtcgtggcagaggatgcaactagcgttggagagctcacagtagtaacaacaagcttagtggcaataatcctttcagctgcttcagcacaagacgagcttccattgtccaccaatgaatga

SEQ ID NO: 41798 - DNA, 1210 bp, Oryza sativa
  Clone ID: PAT_MRT4530_4510C.1
atggaggaggcggcggcggcgagcaacggggggctgctgtaccacgaggtgcaggaggggaagctctgcgccgtgcactgcgtgaacaccaccctgcaggggcccttcttctccgagttcgacctctccgcgctcgccgtcgacctcgaccagcgggagcgccaggtcatgtccgagggcgcggccggcgccgccaccaccgccgcgggggacttcctcgccgagggtgagggctcccacaacgtctcccttggaggagacttcagcatccagttgggtgagagggctttttgtaaacgtcgacaagagttctcttggcaggttgcagtttttcatgttacgtacttcactacttgccatgcaaagatacaaaacatcaacggtgttgacatggacattaaggttctgcagaaggcacttgaagtttgggatctgcaagttatcccccttgactccccagatgtggggtcatgcctatttgaccctgagctggaaactgctttcatttgccatctgcaggaccactggttctgcattaggaaggtaaatggagagtggtacaacttcaatagtctgtaccctgctcctgagcatctatcaaagttttacctatcagctttcatcgacaccctgaaggggtcaggctggagtatctttgcagtgaggggcaattttcctaaggagtgtcccatggcaacggaaggctctaatggtttcgggcagtggctgactcctgatgatgcccggaggataacctcctcttgtaaccaggtccaaacacctactcagcaggcaggcgtctctctagttgctgatcaatcagaggaaatgagtgaaatggatatgattgctgcacagcaggaagaagctgacttaaatgctgctatagctgctagcctgatggacactgggggtccatttgctaattatgcagctcacgaagaaagcaggtctcaggatgcttttgcaattgaatcaacatcaggtgaaatgagcaaagacggcaatctggaggagcaaggggctaacaagtctgaaacaagcgagcctaacagcgataatattgagtctgcttcaggcagtaacccgaagcagaacactacctctttagagggaaaagaatctataaaagaagattaggacggcatgattcgggatggaactgtattagaatatacagacaacaaaaaaaaaaaaaaaaaaaaaaaaa

SEQ ID NO: 41799 - DNA, 239 bp, Oryza sativa
  Clone ID: PAT_MRT4530_45110C.1
gtggtgatcagggacttctgctatgccgcagcagcagtcaggtcgtggtgccatcggtagccttcaaccctaaatacaaaccgtcgcccgtgaaggatagtacgagactaggaggtcgcgagggtcttgtttccttctttttcctattgtgtccttgcttattcaacggttagattttgtttggtaccttgcagtaccagtatttggaggtaccatttaatggaccataaaaacactcc

SEQ ID NO: 41800 - DNA, 1146 bp, Oryza sativa
  Clone ID: PAT_MRT4530_45111C.1
cccacgcgtccggcccccgatcagagcgtggtcaaggtccgttgtgccgttgggcccgacgggtgggagatctatctaacagtaaatagctagtactagtaatcatatccatcaaacgttatagcatgagcgtcatggatgatgcattgtaatgtttcgtgccttttccctcgctgcatatttataccgctactcaaggcgatctcgacaccaaacaagcacaattaatctgaataattgaagttcagagcagcagattaatactcctaattagtcctaccgacatggccgcagaaggtgagctgaagctgctgggaacatgggcgagcccctacgtctccagagtgaagctcgccctccacctcaagggcctgagctacgagtacgtcgtcgaggaggatcacttcaacaacaagagcgagctcctcctcagctccaacccggtgcacaagaaggtccccgtgatgatccacaacggcaagcccatctgcgagtcgctgatcatcatggagtacctcgacgaggctttccccgacaccgccgcacctctcctccccgccgacctgcacgaccgcgccgtcgctcgcttctgggccgcctacattgacgacaagctagtgccctcgtggaagcaggcgttcagcggaaagacgggtgaggagaaggcagaggggatgcgtcatatgctcgcggcggtggatgcgctggaggcggcgatggagtggtcctacaaggggaagcccttcttcggcggcgacgccgtcgggttcctggacgtcgcgctggggggcttgctctcctggttgcacgggacagaggagctgtgtggcgccaagatcttggacgccgccaagaccccgctcctgtcggcgtgggcgcggcgcttcggcgagatggacgccgccaaggtggctttgccggacgtctgcaagctggtcgagtttgccaagatgaagcgtgttcagctggaggctgcaatggcagctacaacagtttcccgcaactgaatgtgttgtcaggttgttgtgttgatgtgttcctacaagtgaataaaccgtactttaaaatttaaataactaaatatttgactaataatattttattataaattaagttgtgtttgataaaaaaaaaaaaaaaaaaaaa

SEQ ID NO: 41801 - DNA, 140 bp, Oryza sativa
  Clone ID: PAT_MRT4530_45112C.1
atggctgctgcgacagaaaacacccggtcttgctgctgcaagatgaaggcgtatgctatgaagaccgccgacaaggctgcctccaagtggttgtgcaagcccagcaacgaggacgacaccaccgtgccactcctccccat

SEQ ID NO: 41802 - DNA, 218 bp, Oryza sativa
  Clone ID: PAT_MRT4530_45113C.1
atacgcgtgcggggtctgcacagccctatacctaatcttagaggaatgcctacagaacgtaatctagaggcacaagcgtctgggcaccggaactagactgaccgtgaaggcttggtgactcacgaactgcacgcagaaggaggagtggttcacatacaccgtcaccggagtggtagtgccgcctgacatcgacagagcctagatcgtgaactacgcct

SEQ ID NO: 41803 - DNA, 216 bp, Oryza sativa
  Clone ID: PAT_MRT4530_45114C.1
atggcgggcggcctccctacggcggcgcgtggaggtcggtcgatgggtggccacatcgaggggcacagactccccacagcggcgtgcgacggtgaactccccacggtggcgcggagggaggcgagcggccggtctctatgttgtttggatgatgaatgtgttcttgagatgagggatgttgttgatgctacgagggatgatggggagcggctttga

SEQ ID NO: 41804 - DNA, 713 bp, Oryza sativa
  Clone ID: PAT_MRT4530_45115C.1
ggagcactaagatgtatcaagacctaaagcaacaattctggtgggccagcatgcgacgagaaatagcggaatatgtggctctatgtgatgtgtgtcaacgagttaaggcggagcatgagaagccagctggtctgctgcaaccgttgaagattccacagttgaaatgggaggaaataggaatggattttatcactggtctacccagaacgtcggcaggacatcattctatttgggtagtagttgacagacttactaaagttgctcatttcatacctgtcaaaacaacctactcgggaaataagcttgcagagttatatatggcaagagttgtatgtttacatggtgttccaaggaaaatagtgtcagacagaggtagtcagtttacttcaaagttttggcagaaactacaagaagagatgggtactcgtttgaatttcagtactgcttatcaccctcaaactgatggaatacatgacgtgttccatgtgtcgcagttgaagaaatatttgcgtgtacctacggaggaaacagatcctgagcgtatagagcttcaagaagatttaacttatgttgagaagccagtcagaattttggagtttccgacgttccggaggagagcgtttacgttgaggaaggttcagaagcgtttgaagaagctcaaggcaagtcacatagatcccaaacaaccttttgagcatgttgaacctttttaa

SEQ ID NO: 41805 - DNA, 2868 bp, Oryza sativa
  Clone ID: PAT_MRT4530_45116C.1
ggtgtgacaatgcctctggttgtagagagggtgattaggatccagatgccgctccatccgccggaaaacttgatcgatgtgctaggatttgtcagggagctgagattgatggcatttgaagtaggctatgacgttgcccccgaatatcgccaaattccccatgaccccaacgaggagaggtgtcatgttcgtgtgacgttgactagtgatcgtgaagactttccgtcgataaagtttgaagctgggggaagaaagtacagtcatgcttgtcaggaagcagccttggtggccattggagacgccatggatgctgtaggcgtggagcgggagaaagcagctcatgatagggaaaactggaaccgtggcaggatttgcaagttggagtgcaaggtgtaccgtctgcagaaggaactggccgagcttaagggagaagcaccaccgccagcacccaagctccgcctcaccgcaaggaagagaacccgtccaccacctcgtatccagttggcttcgaagactcgtgtggtgggagatgctgtgcctgatcatgctgaacctgtcatccatgtcttaagtgatgatgaagaggaggaagacccagaaaaaagagagccggctactccagaggaagaagatccatctcttcgctccgacgcaagccgagattcttttgcttgtcagagaatggtgaacacccgcactggaagtggaagtggaagtggaagtggtaacaatgaaggaattcctttcccatccacacttttcttgctagaatccaaagatcttgatgttatcttagggatggattggctaacccatcacagaggagttatagattgtgctaaccgtaaggtgactttaactagtagcattgggcaaacagtgtctttctttgtgtccccccctagatctcatggtttgacattaaatcaagttgctttgcgagagatcccaatagtacaagactacccagatgtgttccttgaggatttgccaggtatgccacctaagagagacatagagttccggatagacttagtacctggaaccaaccctatccacaagagaccatacagaatggcagctaatgagttagcagaggtgaagagacaggtagatgatttgcttcagaaaggatatatcagacccagtactttgccatggggagcacaagtcatctttgtggagaagaaagatcatacccagagaatgtgtgtggattatcgagctttgaatgaggtcactatcaagaataagtatcctctatctaggattgatgacttgtttgatcaactggaaggtgctacagttttctccaagatagatcttcgttctggatatcaccaacttcgaatccgtgaggaggatataccaaagaccgactttacaacacggtatggtttgttcgaatgtaccgttatgtcgtttggactcactaatgccccggcctttttcatgaacttgatgaacaaagtgtttatggattatctggataagtttgttgtggtgtttattgatgatatccttatctactccaagactaaagaagagcatgaagagcatcttcgtcttgctttagagaaactgcgtgagcatcagctctatgccaagtttagtaaatgtcaattttggttgcccgaagtgaagttccttggtcatgtcatctcagctagaggagttgccgtggatccaagcaatgtggagtcagtgctaaattggaagcaacccaagacggtttcagagattcgtagttttcttggtcttgcggggtactaccgcaggtttattgagaacttctccaagatcgccagaccaatgactcgactgcttcagaagcagttagagttgatcaaggattatgatatggaaattcattaccatccaggaaaagcaaacgttgtagcagatgctctcagcaggaaaagctactgtaatatgtcagaagaacgacatctaccttgggagttatgtcaggaattggaaaagttgaatttgggaatagtcaacaaaggttttgttgccgctttagaagctcaacctactctttttgatcaagttagagaggctcaagtgaatgatcctgatatccagggaatcaaaaagaacatgagaagaggaaaagccatcggttatatagaagatgagcaaggaactgtgtggttaggagaaagaatttgcgtgcccgataataaggagctgaagaatactatcatgaaagaagctcatgaaactttgtattccattcatcccgggggcactaagatgtatcaagacctgaagcaacaattctggtgggccagcatgcgacgagagatagcggaatatgtggctctatgtgatgtgtgtcaacgagtcaaggcagagcatcagaagccagccggtctgctgcaaccgttgaagattccagagtggaaatgggaggaaataggaatggattttatcaccggtctacccagaacgtcggcaggacatgattctatttgggtagtggttgacaggcttactaaagtcgctcatttcatacctgtcaaaacaacttacacgggaaataagcttgcagagttatatatggcaagagttgtatgtttacatggtgttcccaagaaaatagtgtcagacagaggaatacatgacatgttccatgtgtcgcaattgaagaaatgtttgtgtgttcctacggaggaagcagatcctaagcgtatagagcttcaagaagatttaacgtatgttgagaagccagtcagaattttggagttcccgacgttccggaggagagcgtttacgttgaggaaggttcagaagtgtttgaagaagctcaaggcaagtcacacagatcccaaacaaccctttgagcatgttgaacccgtttaa

SEQ ID NO: 41806 - DNA, 2535 bp, Oryza sativa
  Clone ID: PAT_MRT4530_45117C.1
atgaggctacttgcgctggcagttgcaagcatcgtgcttgctaatttgcacctgttgggagttcatgggagggatttgcttctcagctgtggttcaaacgcgactgtggatgctggcggccggagatggatcggcgacatggcccccgggctgaattttaccttaagcagccctggaatagctgcgtcgcaggctgggagcagcaatggcaatgaaatcttcggactggtgtaccattccgcgcgtttctttagcacggcatcttggtataacttcagcgtgctgccggggaactactgcctcaggctgcatttcttcccttacacattcgggaatttcagtgggaatgattcattgtttgatgtcactgcaaatgatttcaagctggtctcgaaattcaacgtgtcagaggagattgtttggaggagcactgtgagcaattcagccatcaatgcagttgtcaaggagtattttcttttagttggttctcgtggtctgcaggttgagtttgatccaagccctgggtcatttgcctttgtgaatgcaattgaggtgatgctcactccagataacctgttcaatgacacagtaaacaaagttggcagcgctggaaatgggcagcttcctcttggtttaagcaacagaggcctagagacaatgtaccggttgaatgttggagggcatgcacttaattcttccagcgatcagtatctgcacagaccatggtacactgatgaagcattcatgttttctgcgaatgctgctcagattgtgtccaacacttcaagtgtaagttatctctcaaacaatgactcctcaatttctcccattgatgtatacgagactgcaagaatcatgagcaacaacatggttgtggacaagcggttcaatgtttcatggcgattctatgtccaccccaactttgattacttggtccgccttcatttctgtgagcttttctatgacaagcccaaccagagggtcttcaagatctacatcaacaacaagacagctgctgaggactatgatgtgtatgtcagggcagggggtattaataaggcatatcatgaagactattttgacaacttgccacagcaggtagactcactctggcttcagctaggccctgactccttgaccagtgcttcaggcaccgatccacttctgaatggtttggagatattcaagctcagcaggaatggcaacctcgcttatgttcttggccatattgacatgggtaaccaaaggggtatttccaaggatagaaataggaaaattttatgggaagaagtcggaattggctcagcttcttttgtgacactgacaagtgtggttctatttgcatggtgctatgtaagaaggaaacgaaaagctgatgagaaggaggcccctcccggttggcacccactggtcctccatgaggctatgaaaagcaccacagatgcccgtgcagccggtaaatcacccttgacacgtaattcatcttccattggtcatagaatgggcagaagattcagcatttcagagattagggctgctacaaagaactttgatgaggctttgcttattggtactggtggttttggcaaggtttacaagggtgaggtcgatgagggtactacagtggcaatcaagcgtgcaaatccattatgtggccagggcttgaaagaatttgaaacagaaattgagatgctctccaagcttaggcaccggcaccttgttgcaatgattggctactgtgaagagcagaaggaaatgattctagtctacgaatacatggccaaggggacattgcgaagccatctttatggaagtgacctcccacctctgacatggaagcaacgagttgatgcctgcattggtgcagctcgtgggcttcactacctccacactggagcagaccgaggtataatccatagggatgtgaagactacaaacatcttgttggatgagaattttgttgcaaagatagcagattttggtctgtctaaaactggcccaacactggaccagacccatgttagtacagcagtcaagggaagctttgggtaccttgatcctgagtacttccggaggcagcaactcacacaaaaatctgatgtgtattcttttggagtggtgctctttgaagtcgcttgtggcagaccagttatagaccccactctaccaaaggatcaaatcaacttggcagagtgggcaatgagatggcagcgccagcgttcgctggatgcaatagtggatccacggctggacggtgacttttcatctgaatccttgaagaagtttggtgaaattgcggagaagtgccttgctgatgatgggagaagcaggccatcgatgggtgaggtcttgtggcatctggaatatgtgctgcagctccatgaagcttacaagcgtaataatgtggactgtgaatcatttggaagcagtgaactgggatttgccgatatgtcctttagcctgcctcatatcagagagggagaagaggaacatcactcaaagccatctagtataagagaagatccagacacttga

SEQ ID NO: 41807 - DNA, 570 bp, Oryza sativa
  Clone ID: PAT_MRT4530_45118C.1
ctctgcaggccgccggcgggtggggaggaggccggcggggagctcctcctgcgtgatcgcgagctccgcggtcggacacgtcgccgaggtcgccgcgtaccgcctcatcttctcaactcaccactcgttctacgacgggctctacgtcggcggcgtcgccgacgcccgcatccgcccggcgctccgcacgttgaagcagaacatgtcgctgctcctctccgtgctcatcgaccgcgtgcagccggtggcggtgcaggaggcgagcgaagcagccaggcggagtggggggcgccgtcgccgatcagcagccgctcgtcgccggagtaggcgacggcaaaggagcagctcaacgggagctactggagcacaacgggctgctgggtggcgaggagggcgaccggagcgggtcgcgggcaggcaaccggtggccacggcaggagacgctggcgctgctcaagatccggtcggagatggacgtcgcctttcgggaagccattctttaagggccccctttaggaggaagtctccaggaagcttgcggagatgggggttcaagatgagcaccaatgt

SEQ ID NO: 41808 - DNA, 2685 bp, Oryza sativa
  Clone ID: PAT_MRT4530_45119C.1
atgatgccgcctcatccaccgaaaaacttgatcaaggtgctaggattcgtcacggagttgaggttgatggcatttgaagtaggctatgaggttgctcccgagtatcgccaaattccccatgaccccaatgaggacgatcatgaagaccttccgtcaataaagttcgaagctggaggcagaaagtacagtcatgcttgccaggaagcagctttggtggccattgaagagttgcgtcatcgctttgaagaggagctagagtcgtcagttttccagtaccatccccacaagcctcatggtcaagattatggaacctacaactgtcctgatggagaagatagtgccacactgacacatgctgtgcatatgcttagtgctatggatgtagtaggtgtggagcgagagaaagcagctcatgacagggaaaactggaatcgaggcaagatttgcaagttggagagcaaggtgtaccgtctacagaatcgaggcaagatttgcaagttggagagcaaggtgtaccgtctacagaaggaattagctgagcttaaaggagaaacaccgccgccagcacccaagcttcgcctcactgcaaggaagagaacttgtccaccacctcgtctccagttagcttcgaagactcgtgtgcatgacctagagttggcagcggtagtgcatgcattgaagatttggcgtcattatcttttcggtaaccatacgaagatctatacggatcataaaagtttgaagtacattttcactcaacctgatttgaacatgcgtcaacgaaaatggttagagttgatcaaggattatgatatggaaattcattatcacccgggtaaagcaaatgttgtagcagatgctctcagcaggaaaagctactgtaatatgtcagaaggacgacatctaccttgggagttatgccaagaatttgaaaagttgaacttgggaatagtcagcaaaggttttgtggccgctttagaagctaaacctactctgtttgatcaagtcagagaagctcaagtgaatgatcctgacatacaagaaattaaaaagaacatgagaagaggtaaagccatcggttatatagaagatgagcaaggaactcgagtcaaggcggagcatcagaagccagccggtctgttgcaaccgttgaagattccagagtggaaatggaaagaaataggaatggattttataaccggtctacccagaacgtcggcaggacatgattccatttgggtagtggtcgacaggcttactaaagtcgctcatttcatacctgtcaaaacaacttacacgagaaataagcttgcagagttatatatggcaagagtggtatgtttacatggtgttcccaagaagatagtgtcagacagaggtagtcagtttacttcaaaattttggcagaaactacaagtagagatgggtactcgtttgaattttagcacggcttatcaccctcaaactaacggtcagaccgaaagagtaaatcaaattttagaagacatgttgagagcctgtgttctagattttggtggaagttgggataagaatttgccgtacacagaattctcatataacaacagttatcaagctagtctgcaaatggctccacatgaagcattgtatggccggaagtgtcgtccgccgctcctttgggatcaaactggtgagcgtcaagtttttgggacagacatattgcgagaggcagaagaaaaagtgaagattatccaagaaaggttgcgcgttgctcagtcgcgtcagaagagccatgccgacaatcgtcgtagggatttggctttcgaagaaggggattatgtgtacctacgggttacgccgctacgaggaattcatcgttttcagaccaaagggaaattggcaccatgctttgtgggaccttttaagattgtgagtcgaagaggtgaagtaccttatcaggaagcagatcctgaacgtatagagcttcaagaagatttaacttatgttgagaagccagtcagaatcttggaatttccgacgttcccgaggagagcgtttcagtttaagaagtggtacacctctgatcagagtaaaactattcgaatagccgtgcccgcggttatggagcaggagatctaccgggtaattaagaagatgccaattgataaggcactagggctagacggctacactgaaaacttcttcaagatcctctctaagctgttggcgctgcgcctaagacccgattatgtggacagtcatctcagtcaatcagaggcctttatcaaaggcaggaggatccatgataagaagacatggcctagccacaaacaagcaaaaatctcaggtagccacaatcagatgcgagagcatagatctggactccattctaaatggtgtgccattggtgcgggcacacttccctataaaatacataggactgccacaactccttggaaggatgggctagatggatataaaaccaacctttcacaagactgcaacgcgggtcattggctggagggggaaaaacatgggaccagcaaggtggtcaacactggtcaagtcaacactgacagtgcagcccatctaccttctcatgccctcaaggagaccaaagaagccctaggtctccttgacacaaaagataaggaagttcctatgggcggggacaagggccatcacaggggggaaatgcatgattaa

SEQ ID NO: 41809 - DNA, 540 bp, Oryza sativa
  Clone ID: PAT_MRT4530_4511C.1
actcctatgggcgattgggaccctcgaggccggccggacagaccatgtctcgataattaagactacatggatatggcatagctacgtcgtctcctcagttttcttcacagtttgcttgctcctcttgtgccatggctctctagcccagctattattacgccagaccactacatgatgtaagactcctcgacgaggaattacgaaagaatgattggacaatatactgcaatcatttgagcctcttcaaagggtgaggtatcatgctgggactgctgacttcttcgatgacactgatgaattatttcgatggaccacattatgctgttggacgtggagttattgcacctagacgtctgctactaccccattacactactgctgcatcgctctaatttatcctccgaagaagaggtatgacaggaacctctcctcgcatgctgtgctgattactaccaacaactgctacaactatcatgtcaaggccaattgaccaaacgtcagagtcagagtgagcagctcaaggaatgatcatcttaagat

SEQ ID NO: 41810 - DNA, 3672 bp, Oryza sativa
  Clone ID: PAT_MRT4530_45120C.1
atggcatttaaagcagctcatgatagagaaaactggaatgggggcaggatttgcaagttggagagcaaggtgtaccatctgcagaaggaactggccgagcttaagggagaagcaccaccgccagcacccaagcttcgtctcaccatggtgaacacccgcactggaagtggaagtggaagtggaagtggtcacaatgaaggagatcccacacttgctcaagttttggctcagcaaacccagttgattaatttactagtacatcaagcgcagaaccagcaagcaaataacaacaatcaaccaccacctccacagaacaagttggcagattttcaacgtgtgagaccacctaccttctcaagcaccactaacccacctccacagaacaagttggcagattttcaacgtgtgagaccacctaccttctcaagcaccactaacccagtagaggcaggtgattggctgcatgctattgaaaagaagttagatttgattcagtgcaccgagcaggagaaggtttcctttgcttcgcatcagttgcatggtcctgctgctgagtggtgggatcactttcgtcaaaacagagctgtgggagagcctatcacttggcgggagtttactgctgctttcaagaagacacatataccatcaggtgttgtggcacttaagaagagagagttcagagcactcaatcagggatcctgttctgtcatagagtacctccatgactttaatcgcttagctcgttatgccccagaagatgttcgcactgacgaagaacgtcaggagaagtttttagagggactgaatgatgagttgtcttatgcattgatggctatggagtaccgggatttccagcagttggtggacaaggcgattcgtcaagaagacaagtacaataggatggaacagaagaagcgtagggctgctcatttcaaggctcaacaggctccaactcagaatcagcctgtcaggaaggaacagggaagcaagccaggggtgtgcttcaattgtggtcatccaggacattatgctgataagtgtccaaaggctcgacgtgtgaagaatgctcctgtccagaacaactccaatgctacagcactgaaggctcgtgttaatcacgttgcagctgcagaagcccagaattcacctgatgtggttttgggtacatttcctgttagctctgtacccgcaactgtgctttttgattccgttgctttgcaagagatcccaatagtacaagactacccagatgtgttccctgaggatttgccaggtgctacagtcttctccaagataaatctttgttccggatatcaccaactccgaatccgtgaggaggatataccaaagaccgcctttacaacacggtatggtttgttcgaatgtattgttatgtcgtttggactcactaatgccccggcctttttcatgaacttgatgaacaaagtgtttatggaatatctggagaagtttgtcgtggtgtttattgatgacatccttatctactccaagactaaagaagagcatgaagagcatcttcgtcttgctttagagaaactacgtgagcatcagctctatgccaagtttagtaaatgtgaattttggttgcccgaagtgaagttccttggtcatgtcatctcagctggaggagttgccgtggatccaagcaatgtggagtcagtgctaaattggaagcagcccaagacggtttcagagattctccttggtcttgcggggtattaccgaaggtttattgagaacttctcaaagattgctagaccagtgactcgactgcttcagaaggatgtgaagtataagtggacggaagagtgtgagcagagttttcaagaattgaagaaaaggctagtgactgcgctagtgttagtcttgcctgatccaaggaaaggtttccaggtgtattgtgatgcatctagacttggtttgggttgtgttttgatgcaagatgggaaggtggtggcctatgcatctaggcagttacgctctcatgagaataactatccaacgcatgacctagagttggcaactgtggttcatgcatcgaagatttggcgtcattacctttttggtaaccgtacggagatctatacggatcataaaagtttgaagtacattttcactcaacctgatctaaacatgcgtcaacatagatggctagagttgatcaaggactatgatatggaaattcattatcatccagaagctaaacctactctgtttgatcaagttagagaggctcaagtgaatgatcccgatatccaagaaatcaaaaagaacatgagaagaggaaaagccatcggttatatagaagatgagcaaggaattgtgtggctaggagaaagaatttgcttgcccgataataaggagttgaatgatactatcatgaaagaagctcatgaaactttgtattccattcatcctgggagcactaagatgtatcaagacctgaagcaacaattctggtgggccagcatgcgacgagagatagcggaatatgtggctttatgtgatgtgtgtcagcgagtcaaggcggagcatcggaagccagccggtctgctgcaaccgttgaagattccaaagtggaaatgggaggaaataggaatggattttatcaccggtctacccagaacatcggcaggacatgattctatttgggtagtggttgacaggcttactaaagtcgctcatttcatacctgtcaaaacaacttacacgggaaataagcttgcagagttatatatggcaagagttgtatgtttacatggtgctcccaagaaaatagtatcagacagaggtagtcagtttacttcgaagttttggcagaaactacaagaagagatgggtactcgtttgaattttagtactgcttatcaccctcaaactgatggtcagacagaaagagtaaatcaaattttagaagacatgttgagagcctgtgttctagatttcggtggaagttgggataagaatctgccgtacgctgaattctcttataacaacagttatcaagctagtcttcaaatggctccatatgaagcattgtatggtcggaagtgtcgtacaccgctcctttgggatcaaatcggtgagcgtcaagtttttgggacagatatattgcgagaggcagaagaaaaagtgaagattatccaagaaaggttgcgtattgcccagtcgcgtcagaagagctatgcagacaattgtcgtagggatttgactttcgaagaaggggattatgtatacctatgggttacaccgctgcggggagttcatcgttttcagaccaaagggaaattggcaccgcgatttgtgggaccttttaagagagagttgaagaaatgtttgcgtgtacctacggaggaagcagatcctaagcatatagagcttcaagaagatttaacttatgttgagaagccaatcagaattctgcagtttccgatgttccggaggagagcgtttacgtttagaaaggttcaaaagcgtttgaagaaggtcaaggtgggttgtgagcacatggttttgatggtcgtgctcatgacaattaaggaccggttcgcgagctactattgtgaaacatttaccatgccaaccacaagtcagtgtgggcaacggctttaccttttgtatagcatggttcattacggggtgccagactga

SEQ ID NO: 41811 - DNA, 3630 bp, Oryza sativa
  Clone ID: PAT_MRT4530_45121C.1
atggatgcccatccgccgaaaaacttgatcgaggtgctaggattcgtcagggagctgagaatgatggcatttgaagtaggttacgaggttgcccccgagtatcgccagattccccatgaccccaacgaggagaagtgtcgtgttcgcgtgacgttgactagtgatcgtgaagaccttccgtcgataaagtttgaagctgagggaaaaaagtacagccatgtttgtcaggaaacagccttggtggccattggagagctacgtcatcgctttgatgaggagttagagtcatcagctttccagtatcacccacacaagccacatggtcaagactatagaacttacaactgtcccgaaggtgaaggtagcgccactgtgatgcacgccgtgtatatgcttagcgccatggatgcagtaggcgtggagcgagagaaagcagctcatgatagggaaaactggaaccgtggcaggatttgtaagttggagagcaaggtgtaccgtctgcagaaggaactagctgagcttaagggagaagcaccaccgccagcacccaagcttcgcctcaccgcaaggaagagaaccagtctaccacctcgtctccagttagcttcgaagactcgtgtgatggtgaacacccgcactggaagtgaaagtggaagtggaaatggtcacaatgaaggagatcccacacttgcccaagttttggcccagcaaacccagttgattaatctattagtgcagcaagcgcagaaccagcaggcaaataacaacaatcaaccaccacctccgcagaacaagttggcagattttctacgtgtgagaccacctaccttctcaagcaccactaacccagtagaggcaggtgattggctgcatgctgtgggaaagaagttagatttgtttcagtacaccgagcaggagaagttggtggacaaggcgattcgccaagaagacaagtataataggatggaacagaaaaagcgtagtagccagaggccgcgcattgctttgggacctcaagctgcaccatacccacagggaggatcctcttcagttgctcgccctcaacgccagttctacaacaacaacactagtaatcacagcaacgataatcgtaatatggtcactcgtcatgtagcagctccaactcagaatcatcctgtcaggaaggaacagggaagcaagccaggggtgtgcttcaattgtggtgatccaggacattatgctgataagtgtccaatgcctcggcgtgtgaagaatgcacctgttcagaacaactccaatgctccagcaccgaaggctcgtgttaatcatgttgcagccgcagaagcccagaatgcacctgatgtggttttgggtacgtttcctattaactctatacccgcaactgtgttttttgattccggtgctacacattcctttttgtctaaaagttttgcgggcaatcatgggatggaagttattagtcttgggagacctttactagttaataccctaggcaatcaagtatcctcaacgcagtactgtccttccgttactatagaaatagaagaaatacctttcccatcctcacttatctttctagaatccaatgatcttgatgttatcttagggatggactggctaacccatcacataggagttatagattgtgctaaccgtaatgtgactttaacaagtagcaatgggcaaacagtgtctttctttgtgtcatcccctaaatctcacggtttgacattaaatcaagttgctttgcaagagatcccaatagtacgagactatccagatgtgttccctgaggatttgccaggtatgccacctaagagagacatagagttctggatagacttagtacctggaaccaaccctatccataagagaccatacagaatggcagctaatgagttagcagaggtaaagagacaggtggatgatttgcttcaggaaggatatatcagacccagtacttcaccgtggggagcaccagttatcttcgtggagaagaaagatcatacccaaagaatgtgtgtggattatcgagcgttgaatgaggtcactatcaagaataagtatcctctacctaggattgatgacttgtttgatcaactggaaggtgctacagttttctccaagatagatcttcgttccggatatcaccaacttcgaatccgtgaggagtgtaccgttatgtcgtttggactcactaatgccccggcctttttcatgaacttgatgaaccaagtgtttatggaatatctggataagtttgtcgtggtgtttattgatgatatccttatctactccaagaataaagaagagcatgaagagcatcttcgtcttgctttagagaaactacatgagcatcagctctatgccaagtttagtaaatgcgaattttggttgcccgaagtgaagttccttggtcatgtcatctcaactggaggagttgccgtggatccaagcaatgtggagtcagtgctaaattggaagcaacccaagacggtttcagagattcgtagtttccttggtcttgcggggtactaccgcaggtttattgagaacttctcaaagattgctagaccaatgactcgactgcttcagaaggatgtgaagtataagtggacggaagagtgtgaacagagtttccaagaattgaagaaaaggctagcggctgcgccagtgttagtcttgcctgatccaaggaaaggttttcagatttggcgtcattacctttttggtaaccgtacggagatgtatacggatcacaaaagtttgaagtacattttcactcaacctgatttgaacatgcgtcaacgacggtggttagagttgatcaaggattatcatccagaagctcagcctactctttttgatcaagttagagaggctcaaatgaatgatcctgatatccaagaaatcaaaaagaacatgagaagagcgagtcaaggcggagcatcagaagccagccggtctgctgcaaccgttgaagattccagagtggaaatgggaggaaataggaatggattttatcaccggtctacccagaacatcgatgtcggtggaagttgggataagaatctgtcgtatgctgaattctcgtataacaacagttatcaagctagtcttcaaatggctccatacaaagcattgtatggtcgtaagtgccgtacaccgctcctttgggatcaaactggtgagcgtcaagtttttgggacagatgtattgcgagaggcagaagaaaaagtgaagattatccaagaaaggttgcgagttgctcagtcgcgtcaaaagagctatgcagacaatcgtcgtagggatttgactttcgaagaaggggattatgtatacctacgggttacgccgctgcggggagttcatcgttttcagaccaaagagaaattggcaccgcgttttgtgggaccttttaagattttgaagaaatgtttgagtgtacctaccgaggaagcagatcctgagcgtttagagattcaagaagatttaacttatgttgagaagccagtcagaattttggagtttccgacattccggaggagagcgtttacgctgaggaaggttcagaagtgtttgaagaagctcaaggcaagtcacacagatcccaaacagcgcttttag

SEQ ID NO: 41812 - DNA, 531 bp, Oryza sativa
  Clone ID: PAT_MRT4530_45122C.1
atctgacaccatcttaattaattcccactttgcaacaatgaagctgcaatacagccagtaaacaaaaatgactgagctcaaaaacatatacatagatatagatatgtacaacgggcatgcaaatggctagacaaaatcgtcactctaggtttgtggtggttcgtactatctacaaaaacttcaagaaaaaaggaaacataacctacacgggtcctcattttctgtccaatgcacttcctcacattgctagtgactggttgcaaccaggattctcataggagtactgcatgttatttctaactcggcagtgcctccagccattattagcaccattacgctcctcagaatggtactttggtttcatggcctttgagctaatgggaccaactctatctctacccctgctattccttctgctcgactcattggttcgcctttttcagtgaccgtaagaccagccctggctgtcaggtacataacagtttctctttatggttgtcccatgaatctatagctgcagaaccccagccg

SEQ ID NO: 41813 - DNA, 529 bp, Oryza sativa
  Clone ID: PAT_MRT4530_45123C.1
tcattttcctcctactcctctctctctctcatttgttcaccaccaccaccaaatccaccgccggctcagctccttgctgcctccgccgccagctgcaacggtccccctcctcactccctccgccttcgccactggctcgcttgccctctcccggctaggctcctccctctcgcggtgacgcgccacaacgacaacgacggtgccgcctatgggtagggggaggagacgcgcgacggcggcaacgacaactgcggcgacgacgatgacgccgatgcgacgaggacggcgcctgtgtgagggcggggacggaaggaggagagctgccggctggagggggaggccggcggcggcgcccgtgtgcggctttttgttattcgttgaatgtgtttttgcaggcgggtaaatcaccgcctgtaaagaggagatgtcgcctgcgtcgcaggcgattgcatccaggcgatcctttcctccgcccgtgaaaactgtttttgatcgtctggaaaaatgattttgagtaaaaaaaaacaac

SEQ ID NO: 41814 - DNA, 4100 bp, Oryza sativa
  Clone ID: PAT_MRT4530_45124C.1
atgatgggttgtgagtacatggttttgatggtcatgctcagtcgtgagctactgttgtgcaacattaaccgtaccaacctcaagccagcgtgggcaacggctttaccttttgtgtagcatggttcattacggggtgccagactgagaagcggcaagaaatccatgggggtcgctggggagtccatgcctttggttgtagagggggttattatgattcaggtatggtgcactatggtgagttgtattgtacgaggggtactgtcacagttcctttccgagatgccgccccatccaccggaaagcttgatcgatgcggtaggattcgtcagggagctgagaatgatggcatttgaagtaggctacgacgttgcccccgagtatcgccaaatttcatgtgaccccaacgaggagaagtgtcgtgttcacgtgacattgactagtgatcgtgaagaccttccgtcaatgatgtttgaagctgggggaagaaagtacagtcatgcttgtcaggaggcagccttggtggccattcgagagctacgtcatcgctttgatgaggaattagtcatcagctttccagtatcatccacacaagcatcatgatcaaaactatggagaatacaactgctctgaagatgaagatagcaccactctgaagcatgccgtgtatatgctttgcgccatggatgcagttggcgtggagcgggagaaagcagctcatgagagggaaatctggaaccgtggcaagattttcaagctagagagcaaggtgtatcgcttgcagaaggaacttgccaagctcaagagagaagcaccgccgtcaactaccccaaaggaggaagatccagaagaaagagagctagctaccccagaggaagaagatccatctcttcgctccgacgcaaggcgggattagtgcctcgttagaccgttatcgtagttcgttgtgttagtttgcttgtgcgtgtgtgggtttagcgtgttgcttacatcattggtgggatgtaactacatgagcttagttcttttgcttgtcagagagtaaatttgctggtgagatagtgttaattcgatttaaatgtaatcatacacagttaagaacaatagaaattaaattaattaagttatccgttctaagggtatctctctgtcgttctcccctcttgcccgtgttttcttcagatggtgaacactcgcaccggaggaagtggaagtggaagtggtaacaatgaaggaattcctttcccatccaaacttatcttgctagaatccaagatcttgatgttatcttagggatggatgggctaacctgtcacagaggagttatagattgtgctaaccataaggtgactttatccagtagcaatgggcaaacagtgtctttctttgtgtcctcccctagatctcattgtttgacattaaatcaagttgctttgcatgagatcccaatagttcaagactatccagatgtattccttgaggatttgccaggtatgccacctaagagagacatagagttccggatagacttagtacctggaaccaaccctatccataagagaccttacagaatgggagctaatgagttagtagaggtaaagagacaggtggatgatttgcttcagaaaggcccagtacttcatcgtggggagcaccagttatcttcgtggagaagaaagatcatacccagagaatgtgtgtggattatcgagcgttgaatgaggtcactatcaagaataagtatcctctacctaggattgatgacctgtttgatcaactggaaggtgctacagttttctccaagatagatcttcgttccggatatcaccaactccgaatccgtgaggaggatataccaaagactgcctttacaacacggtatggtttgttcgagtgtaccgttatgtcgtttggactcactaacgccccggcctttttcatgaacttgatgaacaaagtgtatatggaatatctcgataagtttgtcgtggtgtttattgatgatatccttatctactccaagacaaaagaagagcatgaagagcatcttcgtcttgctttagagaaactacgtgagcatcagctctatgccaagtttagtaaatgtaaattttggttgcccgaagtgaagttccttggtcatgtcatctcagctggaggagttgtcgtggatccaagcaatgtggagtcactgctaaattggaagcaacccaagacggttaaagagattcgtagtttccttggtcttgcggggtacaccgcaggtttattgagaacttctcaaagattgctagaccaatgacttgactgcttcagaaggatgtgaagaagttacgccctcatgagaataactatccaacacatgatctagagttggcagctatggttcatgcattgaagatttggcgtcattacgtttttggtaaccgtacgaagatgtatacggatcataaacgtttgaagtacattttcactcaacctgatctgaacatgcgtcaacgaagatggttagagttgattaaggattatgatatggaaattcattatcatccaggtaaagcaaatgctatagcggatgctctcagtaggaaaagctactgtaatatgtcagaaggacgacatctaccttgggagttatgccaagaattgtaaaagttgagcttgggaatagtcaagaatggttttgtggccgcttgagaagttcaacctactctttttgatcaagttagagaggcaagtgaatgatcctgatatccaagaaattaaatagaacatgagaagagaaaaagccatcggttatatagaggatgagcaaggaactgtgtggctaggagaaagaatttgcgtgcccgacaataaggagttgaaggatactatcatgaaagaggctcatgaaaccctgtattccattcatcctggaagcactaagatgtatcaagacctgaaggaacaattctggtccgcatgtgacgagagatagcggaatatgtggctctatgtgatgtgtgtcagcgagttaaggcggagcatcagaagctagccggtctgctgcaaccgttgaagataccagagtggaaatgggaggaaatagggatggatttcatcaccggtctacccagaacgtcgacaggacatgattctattttggtagtggttgacaggcttactaaagttgttcatttcatacctgtcaaaacaacctacttaggaaataagctcgcagagttacatatggcaagagttgtatgttcacatggtgttcccaagaaaataatgtcagacagaggtagtcagtttacttcaaagttttggcagaagctacaagaagagatgggtactcgttttaatttcagtgctgcctatcaccctcaaactgatggccagacagaaagagtgaatcaaattttagaagacatgttgagagcttgtgtttagatttcggtggaagttgggataagaatctgccgtacgctgaattctcttataacaacagttatcaagctagtcttcaaatggctccgtatgaagcgttatatggtcggaagtgtcgtacaccgcttcttcgggatcaaaccggtgagcgtcaagtttttgggacagacatgttgcgagaggcggaagaaatagtgaagattatccaagaaaggttgcgtgttgcccagtcgcgtcagaagagttatgcagacaatcgtcgcagggatttgactttcgaagaaggggattatgtatacctacgggttacgccgctgcggggagttcatcgttttcagaccaaagggaaattgtcaccgcaatttgtgggaccttataagattgtgagtcggagaggtgaagtagcttatcaactagagttgccttcgtcaatggcgggaatacatgacgtgttccatgtttcgcagttgaagaaatgtttgcgtgtacctacggaggaagcagatcctgagcgtatagagcttcaagaagatttaacttatgttgagaagccagtccgaatttcagaggtaaatgagagaaataccaggaatcgcgtcatacggttctgtaaagttcagtggagtaatcattcagaagaagaagccacttgggagcgagaagatgaattg

SEQ ID NO: 41815 - DNA, 312 bp, Oryza sativa
  Clone ID: PAT_MRT4530_45125C.1
atgtatggtggttgctccggcgattcagaccacggcgcgacagccttccccctctgggatggaaagcttcgcttcactcaaggtttcggatttggggtcgaggtttcttcggcggcgctagctctcgagtccgaaaagaagagggcggcgctcttgcgggagagaaaatcacgctacgggatagatgaggaggacaaacaacgcttctttcccttttccaatcctacccacgcgaaatcaacggccggatgggttttggtaccgcgtggtacaagtaccgagcggcagggttcacaattcgacgaaaactag

SEQ ID NO: 41816 - DNA, 1902 bp, Oryza sativa
  Clone ID: PAT_MRT4530_45126C.1
atgggggtcattggggagtccatgcctctggttgtagaggggggggattctgatccaggtatggtgcactgtggtgagttgtgttttgcaaggggtactgttacagttcctttccaaggtaccgtggtggcattgaggcgcatggagacatgttttggagctgtgtcttgtgggtacagtgttgtatatttgctgtgtagcttgttgagtatgtcatatgctcattcttgcaatattcattcatcagaggaggagtacttcagtgaagaaattccgggcgtgacaagttggtatcagagccatgttgaccttaggacaagccaaatgatgtcgccccatccgccggaaagattgatcgatgtggtaggattcgtcagggggctgagaatgatggcatttgaagtaggctacgacgttgcccctgagtatcgtcagattccccatgaccccaacgaggagcaatgtcgtgttcgcgtgacgttgactagtgatcgtgaagaccttccgtcaataaagtttgaagctgggggaaaaaagtatagtcatgcttgtcaggaggcagccttggtggccattggagagctacgtcatcgctttgatgaggagttagagtcatcagctttttagtatcatccacacaagccacatggtcaagactatggagttcacaactaccctgaagatgaagatagcaccactctgaagcatgcggtgtatatgcttagcgccatggatgcaataggcgtggagcgggagaaagcagctcatgataaggaaaactagaaccatggcaagatttacaagctggagagcaaggtgtaccgtctgcagaaggaactggccgagcttaagggagaagcacaaccgccagcacccaagcttcgcctcaccgcaaggaagagaacccgtcctccacgtcatatccagttggcttcgaagactcgtgtggtgggagatgctgtgcctgatcatgctgaacctgtcatccatatggtgaacacccgcactgaaagtgaagtggtcacaatgaagaagatcccacccttgcccaagttttggctcagcaaactcagtttgattaatctactagtgcagcaagcgcagaaccagcaggcaaataacaacaatcaaccaccacctccacagaacaagttggcagattttctacgtgtcagagcacctaccttctcaagcaccactaacccagtagaggcaggtgattggctgcatgctgttgaaaagaaagctgcgggaaagcctatcacttggcgggagtttactgctgctttcaagaagacacatataccatcaggtgttgtggcacttaagaagagagagttcagcgcactcaatcagggatcccgttctgtcatagagtacctccatgactttaatcgcctagctcgttatgccccagaggatgttcgcactgatagagaacgtcaggagaagtttttagagggactgaatgatgagttgtcttatgcattactggctatggaataacgggatttccagcagttggtggacaaggcgattcgccaagaaaacatgtacgataggatggaacagaagaagcttgctcgccctcaatgccagttctacaacaacaacactggtaatcgcagcaacaacaatcgtaatgtggtcactcgtccagtagcaactccaactcagaatcagcctgtcaggaaggaacagggaagcaagctaggggtgtgcttcaattgtggtgatccaggacattatgctaataagtgtccaaagcctcggcgtgtgaagactgctcctgtccagaacaactccaatgctccagcaccgaaggctcgtgttaatcacgttacagctgcagaagcccagatcgacctgcaggcatgcaagaatgaagttctcagtgacagt

SEQ ID NO: 41817 - DNA, 3510 bp, Oryza sativa
  Clone ID: PAT_MRT4530_45127C.1
atggctggcgatgactttccgacgttccggaggagagcgttttcgttgaggaaggtgggttgtgagcatatggttttgatggtggtgctcgtgacaattaaggaccggttcgcgagctactgttgtgaaacattaaccgtgccaaccacaagccagcgtgggcaacggctttaccttttgtataatatgattcattacggggtgtcagactgtaaagcggtgagaagtccgtgggggtcgctggggagtctatttgcctctggtttagagggggagattatgatccaggaacggtgcactgtgtggtacatctctggccagagtaaaactattcgaatagccgtgcccgcggttatggatgccgcccatccgccgaaaaacttgatcaaggtgctaggattcgtcagggagctgagattgatgatggtgaacacccgcactggaagtggaagtggaagtggaagtggtcacaatgaaggaggtcccacacttgcccaaaacaagttggcagattttctacgtgtgagaccacctaccttctcaagcaccactaacccagtagaggcaggtgattggctgcatgctgttgaaaagaagttagatttgattcagtgcactgagcaggagaaggtttcttttgcttcgcatcagttgcatggtcctgctgctgagtggtgggatcactttcgtcaaaacagagctgcgggagagcctatcacttggtgggagtttactgctgctttcaagaagacgcatataccatcagaagatgttcacactgatgaagaacgtcaggagaagtttttagagggactgaatgatgagttgtcttatgcattgatggctacggattaccgggatttccagcagttggtggacaaggcgattcgccaagaagacaagtacaataggatggaacagaagaagcgtagggctgctcaattcaaggctcaacagggtagtagccagaggccgcacattgttttgggacctcaagctgcaccatacccacagggaggatcctcttcagttgctcgccctcaacgccagttctacaacaacaacactggtaatcgcagcaacgacaatcataatgtgttcacacgacctgtagcagctccaacacagaatcaacctatcaggaaggaacagggaagcaagccagggtgtccaaagcctcgacgtgtgaagaatgctccggtccagaacaactccaatgctccagcaccgaaggctcatgttaatcacgttgcagctgcagaggcccagaatgcacctaagctggttttggaatccaaagatcttgatgttatcttagggatggattggttaacccgtcacagaggagttatagattgtgctaaccgtaaggtgactttaacaagtagcaatgggcaaacagtgtctttctttgtgtcatcccctaaacctcatggtttgacattaaatcaagttgctttgcaagagatcccaatagtacgagactatccagatgtgttccccgaggatttgccaggtatgccacctaagagagacatagagttccggatagacttagtacctggaaccaaccctatccataagagaccatacagaatggcagctaataagttagcagaggtaaagagccaggtggatgatttgcttcagaaaggatataccagacccagtacttcgccgtggggagcaccagtcatcttcgtggaaaataaagatcatactcaaagaatgtgtgtggattatcatgcgttgaatgaggtcactatcaagaataagtatcctctacctaggattgatgacttgtttgatcaactggaaggtgctacagttttctccaagatagatctccgttccggatatcaccaacttcgaatccgtgaggaggatataccaaagaccgcctttacaacacggtatggtttgttcgaatgcactgttatgtcgtttggactcactaattccccggcctttttcatgaacttgatgaacaaagtgtttatggaatatctggataagtttgtcgtggtgtttattgatgacatccttatttactccaagacaaaagaagagcatgaagagcatcttcgtcttgctttagagaaactacgtgagcaccagctctatgcgaagtttagtaaatgtgaattttggttgcccgaagtgaagttccttggtcatgtcatctcagctggaggagtggccgtggacccaagcaatgtggagtcagtgctaaattggaagcaacccaagacgattttagagattcgtagtttccttggtcttgcggggtactaccgcaggtttattgagaacttctccaagattgctagaccaatgactcgactgcttcagaaggatgtgaagtataagtggacggaagaatgtgagcagagttttcaagaactgaagaaaaggctagtgactgcgcctgtattcgtcttgcctgatccaaggaaaggtttccaggtgtattgtgatgcatctagacttggtttgggttgtgttttgatgcaagatgggaaggtggttgcctatgcatctaggcagttacgccctcatgagaataactacccaacgcatgtcctagagttggcagctgtggttcatgtattgaagatttggcgtcattacctttttggtaaccgtacggagatgtatacggatcataaaagtttgaagtacattttcactcaacttgatttgaacatgcatcaacgaagatggttagagttgatcaaggattatgatatgaaaattcattatcatccaggtaaagcaaaagttgtagcagatgctctcagcaggaaaagctattgtaatatgttagaaggacgacatctaccttggaagttatgccaggaatttgaaaagttgaacttgggaatagtcaacaaaggttttgtggccgctttagaagctcaacctactcttttcgatcaagtcagagaggctcaagtgaatgatcctgatatccaagaaatcaaaaagaacatgagaagaggaaaagccatcggttatatagaagatgagcaaggaactgtgtggctaggagaaagaatttgtgtgcccgataataaggagttgaaggatactatcatgaaagaagctcatgaaacattgtattccattcatcctgggagcactaagatgtatcaagacctgaagcaacaattctggtgggccagcatgcgacgagagatagcggaatatgtggctctatgtgatgtgtgtcagcgagtcaaggtggagcatcagaagccagccggtctgctgcaaccgttgaagattccagagtggaaatgggaggaaataggaatggactttatcaccggcctatccagaacgtcggcaggacatgattctatttgggtagtggttgacaggcttactaaatttccgacgttccggaggagagcgttttcgttgaggaaggttcggaagcgtttgcggaagctcaaggcaagtcacacagatcccaaacaaccctttgagcatgttgaacccgtttaa

SEQ ID NO: 41818 - DNA, 1398 bp, Oryza sativa
  Clone ID: PAT_MRT4530_45128C.1
atgagaagaggaaaagccatcggatatgtggaagatgagcaaggaattgtgtggctaggagaaagaatttgtgtgcccgacaataaggagttgaaggatactatcatgaaagaagctcatgaaactttgtattccattcaccccgggagcactaagatgtatcaagacctgaagcaacaattctggtgggccagcatgcgacgagaaatagcagaatatgtggctctatgtgatgtatgtcagcgagtcaaggcggaacatcggaagccagccggtctgttgcaaccgttgaagattccagagtggaaatgggaagaaataggaatggactttatcaccggtctacccagaacgtcgtcgggacatgattctatttgggtagtggttgacaggctgactaaagtcgctcacttcatacctgtcaaaacaacctacacgggaaataagctcgcagagttatatatggccagagtggtatgtttacacggtgtacccaagaagatagtgtcagacagaggtagtcagtttacttcgaagttttggcagaaactacaagtggagatgggtactcgtttgaattttagtactgcttatcaccctcaaactgatggtcagacggaaagagtgaatcaaattttagaagacatgttgagagcctgtgttctagattttggtggaagttggtataagaatctgccgtacgcggaattctcttataacaacagttatcaagctagtctacaaatggttccatatgaagcattgtatggccggaagtgttgtacgccgctcctttgggatcaaactggtgagcgtcaagtgtttgggacagatatcttgcgagaagcagaagaaaaagtgaagattatccaagaaaggttgcgagttgcccagtcgcgccagaagagctatgccgacaatcgtcgtagggatttggctttcgaagaaggagattatatatacctacgagttacgccactgcgaggagttcatcgttttcaaaccaaagggaaattggcaccgcgttttgtgggaccttttaagatcgtgagtcgaaaaggtgaagtagcttatcagctagagttgcctctgtcaatggcaggaatacatgacgtgttccacgtgtcgcagttaaaaaaatgtttgcgtgtacctatgaaggaagcagatcctgagcgtatagagcttcaagaagatttaacttatgttgagaagccagttagaatcttggaagtgagcgagaggaacaccaggaatcgcgtcatacggttctgtaaggttcagtggagcaatcattcagaagaagaagccacttgggagcgagaagatgaattgaagtcagatcatcctcatctttttgccagttcttctaaatctcgaggacgagattctgtttaa

SEQ ID NO: 41819 - DNA, 297 bp, Oryza sativa
  Clone ID: PAT_MRT4530_45129C.1
atgaagcgtgctcggccctcaactagtgaagaacatcatccttctccaccttcacagccattctccgtcgagcagggctgtgccagcccgtgccgccactgtcgacgcccctcccgcatcgtcggagcgtcgtcccgctgcaccatcgctgtcgccggtctttctctcgttgagttctccctagtctatgccttcaccaagctccgccagcaccggagcttcatcctcgccatcaacccaagccggctatctttcctactccatcaccgtaacctcctcgcagaccaaagaccttag

SEQ ID NO: 41820 - DNA, 838 bp, Oryza sativa
  Clone ID: PAT_MRT4530_4512C.1
atcaactataatgatagaacaaaggagtacaattattagcagataatggtttacaacacttaaaaatggcacctcatcatgtaccgtgcctgactgtaacatcatgtaccgtgcctgactgtaacagaaagaatcactggttaaatcgtccaagttgtgaacacaatctatccagcagcagttaacaaatgacagctgccaagcgaacagggccatcaaactatggtggtttcccattgtctaactcatccatgttttcaatgtcctggcgaaactacaccctttccagttcacaatagcaattcctagcaagaagatctggatacatgtaatatccccattccctatttccgatcaccagccctgtcccctggcaactccggcacttgcccgtccactcgtaggagacagtcttgcaatcctcgatctccacgtcgcagctgaggcggcggtcgagctcctcgcgggacatcggctcggtgtccggaacggtcaacggcagcggcagcggctccacgtcgtcgacgaggtagctctccctgtccccggaccaccagtcccaccatctcctcctcccccttcccctccccttcttctcctcctccgcgccctccctggccctgacgcgcaccccgggatcccgggcggcgacgcggccgccggatgtcgacgggtccgcgtcgggcggcgccctaggccggaaccagtccggcgtggaggccgcgccggtggtgttggccgccggcggcgggtgggggcgccgggcgcggcgggggagggggagggaagggttggggcgtggggaggagaggagcggggtggggttcgcgggagtcat

SEQ ID NO: 41821 - DNA, 180 bp, Oryza sativa
  Clone ID: PAT_MRT4530_45130C.1
atgggtacccctgatctagctgaccccatggtgtactccggtgctgggaacggcggggtagtggtggtgatgccctacgggccgacggctgcaccacatctgccgcgctccgacaggagacacgacggtgtcgtactccacctgaacgtgctcaacaaattccgcatgttccacaaataa

SEQ ID NO: 41822 - DNA, 1368 bp, Oryza sativa
  Clone ID: PAT_MRT4530_45131C.1
cggacgcgtgggcagtaagtaaagcattcattcagatcatgaagaggtttgcattcgaggacagcgatatggcgcgcgtgctgatgctcatgtcgacgcacgggcagcacgagcaggcgctggctctgccggtgccggagccgatggaggtgaccgatgaggagaaggagcggaaggagaggaaatcgtctgctcagaaggagaaggaagcggggaacgcagcttacaagaaaaaggacttcgagaccgcgatccagcattacacaaaagccatggaacttgatgatgaggacatttcctatcttaccaaccgtgcagcggtctacattgagatgggaaagtacgatgaatgcattaaggactgtgataaggctgtggagaggggaagggaacttcgtgctgatttcaagatgatctcaagggcactgacaagaaaaggaacagccctagccaaacttgctaagacctctaaggactatgacattgccattgagactttccagaaggctctaactgagcatcggaatccagacactctaaaaaagctaaatgaggctgagagggcaaagaaagagttggagcaacaagagtactatgatccaaagttagcagatgaagagagagagaaaggtaatcagcttttcaaggagcaaaaatatccagacgcggtaaagcattacactgaggctatcaggagaaatcctaaggacccgaaggtgtacagcaatagggctgcatgctacaccaagttgggagccatgcctgaaggtcttaaagatgcagagaagtgcattgaactagatcccaccttctccaaagggtatacaaggaaaggtgcaattcagtttttcatgaaagaatatgacaaggcaatggaaacttaccaggccggtttgaagcatgatccgaataacccggaactgctggacggtgtgaaaaggtgtatcgaacagatcaacaaggccaacaggggtgatttgactcaggaagagattcaggaacgacagaacaaggctatgcaggatccagagatccagaatattcttacagatcccatcatgcgacaggtactggtcgatttgcaggagaaccctagggcttctcaggagcatcttaagaaccctggagtgatgcagaagattcagaagcttgtaagcgctggaatagttcaaatgagatagtcgaccaaagcaagaagcgctgttcgtgtctatgttcattgctccttactttttttccatgctcagtctttgtggacttaagatttacacagtttggggctaatcttcattctcaattggattatgtgagtgcagcgtgtcactggattattagtggttatggcatccgtgctacagctgcacgtgc

SEQ ID NO: 41823 - DNA, 2125 bp, Oryza sativa
  Clone ID: PAT_MRT4530_45132C.1
atggccgacgaggcgaaggcgaagggtaatgcggccttctcggccggccgctacgaggaggcggcgcggcacttcactgacgccatcgcgctcgccccggggaaccacgtcctctactccaaccgctccgccgcgctcgcctcggtccaccgctactccgaggcgctcgccgacgccgagaagaccgtcgagctgaagcccgactgggctaaggggtactcccgcctcggagccgcccacctcggcctcggcgacgccgcgagcgccgtcgccgcctacgagaagggcctcgccctcgaccccaccaacgagggccttaaggccggcctcgccgatgccaagaaggcggccgccgccccgccgcgccgcccgccgcccagcggcgttgacggcataggccagatgttccaggggcccgagctctggaccaagatcgcctccgacccgaccacgcgcgcatacctcgagcagcccgacttcatgcagatgctgcgggatgtgcagaggaaccccagcagcctcaacatgtacctctccgatccccggatgatgcaggtgctcggcctcatgcttaacatcaagatccagagaccagaggcctctgaatcgtcgcagcccagctcgtcgccgccgtcgcagccgcaggagcagcccgaggcgaaggcgagggaggtggagccagagcctgagccggagccgatggaggtgaccgatgaggagaaggagcggaaggagaggaaatcgtctgctcagaaggagaaggaagcggggaacgcagcttacaagaaaaaggacttcgagaccgcgatccagcattacacaaaagccatggaacttgatgatgaggacatttcctatcttaccaaccgtgcagcggtctacattgagatgggaaagcgacttttgaaatttatttatgttgatcctagttctactggtagctctgttatacttcctccgtttcataattacgatgaatgcattaaggactgtgataaggctgtggagaggggaagggaacttcgtgctgatttcaagatgatctcaagggcactgacaagaaaaggaacagccctagccaaacttgctaagacctctaaggactatgacattgccattgagactttccagaaggctctaactgagcatcggaatccagacactctaaaaaagctaaatgaggctgagagggcaaagaaagagttggagcaacaagagtactatgatccaaagttagcagatgaagagagagagaaaggtaatcagcttttcaaggagcaaaaatatccagacgcggtaaagcattacactgaggctatcaggagaaatcctaaggacccgaaggtgtacagcaatagggctgcatgctacaccaagttgggagccatgcctgaaggtcttaaagatgcagagaagtgcattgaactagatcccaccttctccaaagggtatacaaggaaaggtgcaattcagtttttcatgaaagaatatgacaaggcaatggaaacttaccaggccggtttgaagcatgatccgaataacccggaactgctggacggtgtgaaaaggtgtatcgaacagatcaacaaggccaacaggggtgatttgactcaggaagagattcaggaacgacagaacaaggctatgcaggatccagagatccagaatattcttacagatcccatcatgcgacaggtactggtcgatttgcaggagaaccctagggcttctcaggagcatcttaagaaccctggagtgatgcagaagattcagaagcttgtaagcgctggaatagttcaaatgagatagtcgaccaaagcaagaagcgctgttcgtgtctatgttcattgctccttactttttttccatgctcagtctttgtggacttaagatttacacagtttggggctaatcttcattctcaattggattatgtgagtgcagcgtgtcactggattattagtggttatggcatccgtgctacagctgcacgtgcaaacgtatgtctctatttgttagtcctaaacattttccctaccgaatgaaaatagtgccataagaggtgcagaaatagtcgattgcttttacttcccacttgtccattcccgcacccccgggatccact

SEQ ID NO: 41824 - DNA, 513 bp, Oryza sativa
  Clone ID: PAT_MRT4530_45133C.1
atggcgacgacaggatcaacggcgcccgcccgctggtcctacacagagtttgtcgtggaatctgaaacgtcgcgcgtgccggactccatggaggcatgtctaatagcacgttcaatcgaacctgccaaaacaatgtttaccaactgcccaagctgggtaaggaacagtgaaggcggaccatgggtggcgaagcctaaccagcgggagccaaagcccgttcgtaaagtggcgaagccgatttggctggatgaaacatctgctcaaggaagcctaagagaggagcctttagggctcatgagctggctcatatctagcgcgccgctgtcattgacggtcgggtttgtcgtttccgccaccttctccatctcccgatgtggtgtggaggagaagctggtgacggcggtggcgccggtgcctgcggatgtgctggcatcggacgtctacgtcgacatcgagctaccgctcctaaagatggcatcgtccaggacacccgttttgccatctttcgactag

SEQ ID NO: 41825 - DNA, 690 bp, Oryza sativa
  Clone ID: PAT_MRT4530_45134C.1
ggtggaaggaagtactcatttctcgcattctcatcgaaccagttaagggacaagtcagcttggttctttgccgaggacagaaagacaacggtggaagcaattaggaagtggatgggacggttcacaagtaagaatgttgcgaagcatgctgctcgaatggggcagtgcttctcatccacatatgcaactgtgacaatgcggccggatgaggttgatgagagttttgatgatgttgtgcataatgagtacattttctccgatggaattggcaaaattaccccagatcttgcattggaagttgccgagaggctgcagctgacagataacccgccatctgcttatcagatcaggtttgctggcttcaagggtgtcatagctgtctggcaaggacatggtgatgggacacggcttttcctgaggccaagcatgaggaagtttgagtctaaccatttggtgttagaggtggtctcctggacaaagttccagccaggattcttaaatcgacagattataatattgctatcctcactgaatgtcccagattctatcttttggcaaatgcaagagaccatgctttctaacctcaacaatattctatcaacagagatgttgcttttgaggttttaacaacttcatgtgctgatgatggaaacactgcagcattgatgctcagtgctggctttgaaccta

SEQ ID NO: 41826 - DNA, 622 bp, Oryza sativa
  Clone ID: PAT_MRT4530_45135C.1
caccaaacattttcatcaggtttacattgacaatgatccaaacattgttctcaggatttggcaatgccaacactttaaacaggtttacattgacaatgatccaaacaagcttctcaggtgctaggttttgctgaaattaccaagcagaaagaacactcgatgcaactacagtctacattacaagtacaggtaaaaaagtggatgatccttgttatattcacaaaatgttccacggtaatgagttcaacggccaaactcgttatttcatttagtgactacgatacatacttacaaccgggcacaattcgagtaactcgatcagttattcaaaacttctttaacttcacagcaagcttatcaaggtgaaagtccatgatctccgagatggtctccaagaatgtctcctcactagttcctggaaggatggcatcctctgcttcctctatgatggcctcgatttcagattcttttttgactgtttgcctgcataagatgctgcgagatgtcataaggcgttaggcctctctctgcccccttcttcaaaagcattgtgctgatgcgcagaactcgggcaactggggagatagcgcccacccgtggaacttgagaagcgcatgtcttt

SEQ ID NO: 41827 - DNA, 136 bp, Oryza sativa
  unsure (1)..(136): unsure at all n locations
  Clone ID: PAT_MRT4530_45136C.1
tggggggttttttntnnnggggttttaattagctggataaacaaccagatccaaaacctggtaaagttacagcttttgatctgggattttgccatcccatcacaaggttgtccaaaacagaaacagaaatggggcc

SEQ ID NO: 41828 - DNA, 242 bp, Oryza sativa
  Clone ID: PAT_MRT4530_45137C.1
gtgaacttgttccatccgccgctcgccatccccaattcccagtgtctctcgccatccccatttcccccacatcgtcggacgttgccgtccgcctccaccgcaacggcgtctcctgctgctgctgcggccgccggcgacggatctcctccgcttctccgaggtacggcattctgtcgcagtgcgccttgaagaaagtgattggtgttttagattgttttcccgtgatcctcgctaggtattag

SEQ ID NO: 41829 - DNA, 719 bp, Oryza sativa
  unsure (1)..(719): unsure at all n locations
  Clone ID: PAT_MRT4530_45138C.1
ccggccgggctctcgtccccactctcgcttctctcgtctccgtccctctctctccctcttggtcactccctctcctcccctcgcccccgcttctcttgtttctcccatgccggcagcaaaggagtcggcggcgatggcgtcagccgttcccgcaggtccgatccggcggtggcggtggcatcagtggctcacgctggcgaatccggtggaggtggcggcagcggtgtttccagcgggcggatccgtcggcagcggtgtttccagcggacggatccgtcggagactttttcggcgaacggatccggcggttctctaccccttctcatcagccccgcgcccaagcttctcctgcgacggcggcggtggcatcggcgatctgtcgggcagatccggcggaggtggtggcagcggcgtttccggtggtcggatctagtggtcctctaccccctccccatccaccccaagcttctcccttggattgggcggcggcggcggcggcttctccctttgatccgggngnaaccacggacgtcggcggcacccgcgggcggatccggccgaggggatatgccttccgccgccgacgtcccccttggttggatcggccgatgnntgtgattgtggatgtgttgtttgaattgttttatgngntgaagaaggttgttgntgngaataattttggaatttcatgggaatgatgttggtggttgctcccgcac

SEQ ID NO: 41830 - DNA, 767 bp, Oryza sativa
  unsure (1)..(767): unsure at all n locations
  Clone ID: PAT_MRT4530_45139C.1
attacccaggtgaatggttattagatttaccgttgttatcacaatcattcaaagaatggtcgcaagctcaacaagctgtagatcaaggggagcgcgttaccttagccaaaacgtggttagaagcggtcaataaaattgatttattcgctaaagcggacgaaaatcagttagctgatttaagcgaaatatacaccgcctatttaattaagtgcaaagcagcaggaatgcaatatactcagccggggcgttttgtgctaccggcagaaaatgctaaaggtgcgcctgtttttcaattttttccattattacatttatcagaagcagaatggcaacggctagaaactgctagcgacaatagcacttacaaaatattaaaaaaacgttatcgctattatcaacaaaagattattcaaccattttatgctgactatttttcacaatttgatcggcaagtgattttggcggattgcctaacaccactgaatcacggttatcctgcatttatcgaaatgaaaattaggttacaacagctatttaagcattttcattacggcaatcgttcactttttcaccgcttattctncgccaaaattgataagttattnatttttagccacctaagagcgatcatatttagtagccgatcaagatcgcccaatttagaaaagtttaaatgcgacaatttagtccaagaagggcggtcgttatgctgaatttgacgggattgaaattggctatcaagctatttcggctatccgtgccactga

SEQ ID NO: 41831 - DNA, 118 bp, Oryza sativa
  Clone ID: PAT_MRT4530_4513C.1
cggacgcgtgggtgctaactttgaccggtttaggagaaaattacaagctcagtttctcgctgacggttttgtacatggagtatatatttaacgcattttagtgatgttcagagagatg

SEQ ID NO: 41832 - DNA, 1692 bp, Oryza sativa
  Clone ID: PAT_MRT4530_45140C.1
cggcacgagggagagaactagtctcgagtttttttttttttttttttttcacagttcagttttagattcagataaacaaaaatcctgggtagttctactgctaatcacacattctaacatacaaaagttggaaaccaacgagggttacaatctcccacagaagtacataacagattcaaggaatacaacagcagcaatatctataacaatatagaaaacgcagacttgaaattatataatagcaacagtgttgatacaccttatcaagcaagtgaccacaggtgccaagagttcggctctgcaaccaaatgcacgttgctttgcggcagtacacattgccgcatcaaaagcctttcggctatcctcttctcctgctgcctatcacgcaatggaacatcagatacagagagagcatctataccagcccaagttgctgaaagcctgaaactgaaagcaacttcattcagtcttcaggccttgttcgctgcgtcaataaataccatcacttgtttccagctagctgtacatcacaggtgcattggcattatttagcatctgatgagcacattagcaggctatatctactcctctattaagattaaggcctttcagttctgggtagtctgctgctgaggaggagcttgagcctgctgctgcattgatggtcctggttgttgcgatgagctagcttgcgactgtgctggtggtgccaacattggctgataaggtggatactgtggtggtggtgggtatggcatgcgaggcgggggcatgtaaccgccatatggtgggtagtagggtgggtactgaccatggtaatatggttggtggcatagggtaagctctgtcctgagctgcttgatgcctgagcttggccagcctgctgtggaccgggtttgccatcaccctcctgtgacttgaccaaggcacccatcctctggggatccattgaagggtacagtgtccgctctgctcctggcggtgccggaatgttgaagtagtatgatcctgatggtgcttgctgttgtccctccgttccaggtggttgaggctggtcaccgctctgctgctgagatataacagccctggggagcattcctccatgtgcaacatgcccttgccttccagctccctcttcttctggctttggtgccctgaggcttaccccacatgagcttcaggcgtatacccttgatgactaacttgttggcaagctcctctgcagctttctcagcaccttctcttgtagtatacgtcacaaatgcacaggcacgttgcagaaccatccttatggactcaatctcaccatgtgcgtaaaattgatccctcaaatcctgctcggtgattcgattattaaggccaccaatgtaaagtgtccttatactctcatcgtctggaggtgtcagagatggcatctcaccggccttacccaaaagtttcaaagcaactggatcattaactccatagtaacgatcccccatgttctgctgagataactctccagtttcaggcatctcatgtcgataagggcattcagcacctcttgtacattcaccacgcacatagaaactgcagacatgagctcgattcctcttgtaatatggtgccgtcctctgaagcttcaccccggtgtcattgggttgtgccttcccatgggaagaatcataatcaattccagcctgcctcgtgccg

SEQ ID NO: 41833 - DNA, 1717 bp, Oryza sativa
  Clone ID: PAT_MRT4530_45141C.1
acatatcgccgcatcaaaagcctgctgctgcctcaatggcacatcagatacagggagaacatccataccagcccaagttgctgaaagcctgaagctgaaagcaacttcattcatcttcacgttttgttcgcagcgtccattaaaagtttaaaaccatcatttgtttccagctaactgtttatcactcgtctagtaagattaaggccttcagttctgggtcgtctgctgcggaggagggacttgagcctggtgcagcgttgctggtgcaggttgttgtgatgagctagcttgcgactgtgctggtgttgccaacatcggctgataaggcggatactgcggtggcggtgggtatggcatgcgaggtgggggcatgtaaccgccatacggtgggtagtagggtgggtactgaccatggtaatattgtggtggcatagggtaactctgtcctgagctgcttgatgcctgagcttgggctgcctgctgtggaccgggtttgccatcaccctcctgtgacttgaccaaggcacccatcctctggggatccattgaagggtacagtgtccgctctgctcctggcggtgctggaatgttgaagtagtatgatcccgatggtgcttgctgttgtccctccattccaggtggttgaggctggtcaccactctgctgctgagatataacagccctggggagcattcctccatgtgcaacatgcccttgccttccagcttcatcgtcttctggctttggtgcttgaggcttaccccacatgagcttcaggcgtatacccttgatgactaacttgttggcaagctcctctgcagctttctcagcaccttctcttgtagtgtacgtcacaaatgcacaggcacgttgcagaaccatccttatggactcaatttcaccatgtgcgtaaaattgatccctcaaatcctgctcggtgattcgattattaaggccaccaatgtaaagtgtccttatactctcatcgtctggaggtgtcagggatggcatctcaccggccttacccaaaagtttcaaagcaactggatcattaactccatagtaacgatctttaatgttctgctgagataactctccagtttcaggcatctcatgtcgataagggcattcagcacctcttgtacattcaccacgcacatagaaactgcagacatgggctcgattcctcttgtaatatggtgccgtcctctgaagcttcagaatggtgtcattgggacgtgccttcccatgggaagaatcataatctattccagccctggccttgcgatcatgctcttctgcaaagtactcacggttcacatcactccttgggattgcatcatttgaattaatagaaagtgctgtatccctgacctggaccggtagaccatattcaagatctagcaggcagacctggcagacatttttcagtttgcaacatgtctggcagatctctgtcttcttgtatcttgcatcccggccaggtcgccaacggaagacagtaaaaggacgtgcacatattttgcactctttatcatattctgctctcaacatgcggacgtaggggttgtcgccgaggcaggactcgcagatgatggggaagtcggaccgctcccacccgtccgcctgcgcgtctcgcagcagccggtgagccatctccgccgccgccgcctccgcctccgccgccgccgagaaagacgagaggaaagagagagag

SEQ ID NO: 41834 - DNA, 674 bp, Oryza sativa
  Clone ID: PAT_MRT4530_45142C.1
ctagtggatccccgggctgcaggttttggttttaaaaacaaacaagagtaggaacatcaattccatctatacactctgaatgtgcttgtgtttcttacccactgactgcattagtgcagtgtatatgttggggacctgctgaaattgagctcaattctgaattctaaaattctgaaattatggttcaggttgctgaaatttagctagaaaattcagtctcagatcatgtgcaggtttgggagtttcagttctctgaaactgattttttttactttgatgaagagtacaactgtagattgtgccatttttcctttcaatgtgctttttttgattaattcatagaccaacaccagatctttagaagtgtataaatagagaaatcatgcagttgatgttattcccgtaattagacactttttaggtgcctgtcatgcagttgatgttttcgatatatgaattgtctattggacgtagtttttattaacctgtagtttctgttgactgctgctagttaagctatttcaatggggcttaaacatgtggtttagcaactataggttataggagtagctattatatgtagtagttgtgacacaatattcttcttatttgtacataatacatcaacatgtgtataacatagactgatctgtatagtgaggatgatgtattct

SEQ ID NO: 41835 - DNA, 503 bp, Oryza sativa
  Clone ID: PAT_MRT4530_45143C.1
tctctctcactctcggagcacacgagcacgagccgcggctggtgtgagatggtgagtctaactagggtttgatcgatcccatcccttccccccatccacctatcgccgccgcctccgacctcgccatgccccgctccgtcgtcgtctagggttagctcgatcgctagctccaccacaaccagctacaaccgcgcgctcccgacgacggaacatgatccgcctccgcgccgccgccaaggctgccgcgtcgctggcccgcgggcgcaccaccatcgccaccgatgctggctggtcgtcacacctccgtgctgtctgtcaccaaccgctctgagctgctgcgccaggggcagggggcgacgacacgggaggccgcgtcgctcgccgccatccaggacgacaccagagcggtggccgcggtgaacgccgtgctcttctccaaggacgtcgccgtcgccaaggagacgggctggcgccgggacgccaagatcaccgtccgcgggcgc

SEQ ID NO: 41836 - DNA, 954 bp, Oryza sativa
  Clone ID: PAT_MRT4530_45144C.1
ccggccgggatcactgcagtgcctttgagctttcgttctctagagtgtctagggtgaatcttgagcgagtgagcgagcgatctctgtgttgtgtagtttgtgagctagggtgatggctaacaccggacttagcatccccatggtgaatggtgccacaatccacctcctccctggtttccggttccgtccaactgacgatgagctagtcatcaaatacctctacccccgtgcttttcatgtgccactgccctgtgcgatcatcaccgatgttgacatccatcatcacaacccctgggacatcgtcccagtggcggagagggagaaagggaagcacttcttcacaagaaaggaggtcaagtaccctggtagccgccgtagcaaccgtgttgctggtaatggcttctggagagcagcaggctcggaggtgcccatctattacaaaccagaaggtgctgctaacgacatgctagttgggatgaggcggactctagtgttccactacggaaagtcacgatctgcagagcgcactgaatgggccatgcatgagtttcagcttgctggtgctggtctccttcctcaccctatgatgagctcatgggtgatctgctgcatctacaagaagaggcagcaaaacacaaaaaacaaatcagaagatataactgacaaaaacaatggcagtccgtctgctgcccatactcatgcccctctggtggaaaccatggtcgaacctgataattcttggatgatatgtcgcatttacaagaagaggcagcgtgcaccgcaggtcatcatccctccgtccattggcaatgcaagggaagctgtcctcgccgttcctgccattggcaatgcaggcgatcgtcaagtcacttcattgacttcccagggcatagatgtttcgaggaggggagtgatgagtctgccaatgtcatcacaaaggacaagggcagtgat

SEQ ID NO: 41837 - DNA, 954 bp, Oryza sativa
  Clone ID: PAT_MRT4530_45145C.1
atgtcgtcagacgccggcgacgacgacgatgtcgtgctcgacttccgcccgctcatcgtggtgtacaagagcgggcggctcgagcgccccctcgccacgccgcccgtcccgcccggcacggacgccgccacgggcgtggcgtccagggacgtgcgcctctccgccgcttccttcgtgcggctctacctcccgccgccctgcgccgccgttgcggggggcgagaggctccccgtggtggtctacttccacggaggagggttcgtgatcgggtcggccgcgtcgcccgcgtaccaccgctgcctcaatgacctcgccgccgcctgccccgccgtcgccgtctccgtcgactaccgcctcgccccggagcacccgctcccggccgcgtacgaggactccgccgccgcgctcgcctgggtgctctccgccgccgacccgtggctcgccgtgcacggcgacctctcccgcgtcttcctcgcgggggacagtgccggcggcaacatctgccaccacctcgccatgcgccacggcctgaccagccaacaccccccgcatcgcctaaagggcatcgtgctgatccacccgtggttctggggcaaggagcccatcggcggcgaggcggcggcgggggagcagaaggggctgtgggagttcgtgtgccccgacgcggcggacggcgcggacgacccaaggatgaacccgaccgcggcgggggcgccggggctagagaacctggcgtgcgagaaggtgatggtgtgcgtggccgagggagacacgctgcggtggcgcggccgcgcgtacgcggaggcggtggtgcgggcgaggggtggcgaggcggcggcggtggagctgctcgagtcggagggcgtcgggcacgtgttctacctgttcgagccgggccacgagaaggccgacgagcttctccggaggatcgccgcgttcattagcgccaaatga

SEQ ID NO: 41838 - DNA, 1976 bp, Oryza sativa
  Clone ID: PAT_MRT4530_45146C.1
atggccggcgccgccgcgctccggcgatccgcgcgccgtgtcgtcctgccaggcgcctacgccttgtcccgggcgctacagcaccctgagcgcctcctctcctcccaggcttcgccggaccgcggcggggtgctgggttcggagcttgggctgtatcccccggagagggtcaggaacttctccatcatcgcgcacgtcgaccacggcaagtccacgctcgccgaccggttgctggagctcaccggcaccatcaagaagggccatggccaacctcagtacctcgacaagttacaggtagagagagagaggggaatcacagtcaaagcacaaacagcaactatgttctacagacatgctaacaaccaacttcctgcatctgatcagccagatgctccaagctatttgcttaacttgattgatactcctgggcatgtggatttcagctacgaagtatccaggtcgcttgcagcttgtcagggtgctcttttagtagttgatgcagcccaaggtgtccaagcacaaacaattgcaaacttctaccttgcatttgagtcgaatctaagcatcattcctgttattaataagattgatcagcctaccgctgatccagataatgtaaaggctcaactgaagaggttatttgacattgatccaagtgaagctctgctaacttcagctaaaactggtcagggccttagccaggtcttgcctgctgttattgagcggattccttccccacctggaaaatgtgattcacctgtacgcatgcttctcttagattcatactatgatgagtataaaggggtgatatgccatgttgctgttgtggatggtgctctccacaaaggagataagattgcatctgccgcaactggtcgcacatatgaagtccttgatgtgggcattatgcatccagagcttactcctaccggtgtgctttacactggacaagttggatatgtcataagcggaatgcgttcaactaaagaagcacgaattggtgatactcttcatcaagcaaagagtattgtcgaaccacttcctggtttcaagcctgctagacacatggtcttctctggtctatacccagctgatggctctgactttgacgctcttagccatgcaattgaaaaactaacatgtaacgatgcgagtgtgtctgttacaaaagagacaagcactgcacttggcatgggcttccattgtggatttctacaatgataacatatggattgttgatgctatggcaacaatagtcacccagaaagctgagttggacgagaattagtggataaactcaagaaattcatagaacggcaaatgtttgagatcactatacaagccgcagttggttcaaaggttatcgaaactctgtcagcaatgagaaagaacgttctggccaagtgctatggtggtgatattactaaaaagattgcagagaagcaaaaagaagggaagaagcgcatgctatgtgggtgattgaaatatccaataaggccggggcaaaagaactttaaccaagattaaagtatgttggtaatggtcaaggtgactaaccctttggaagggaggtttgtaaaaagcttgccaatttgctgtgtgataactattttaaggatccctttgcaacttttttgtgaaaaacatgcatctttatattcttccaacgatgaaccctggtggatttgctctttgaagacgtggtaatgcaaacaatgttgacctcaaccgagattttcctgaccaattttttaccaacaaccatgaaattaactacagacaacctgaaactagagctattatgaactgggtaaaacaagaacacttcactgcctccgctagtttgcatgggggtgctcttgttgcaaattatccatgggatgggtctagagatcaaagacgggagttcatggaaggatatttgcggcagatacaggtcatcctataccaggctccctgacaattcaaaatagatg

SEQ ID NO: 41839 - DNA, 303 bp, Oryza sativa
  Clone ID: PAT_MRT4530_45147C.1
atgaacagggagaggaagactttgtacgggtcggtcaaaccggacgcacatgtccagtttgggcagcgcttagctagtggccgactggaaaaagaaaagctgtcaaggttcaccggcgtgaaacacatctgcgatgctgaaagccacgcattgtctgacgtgaatgaatcatttggcgcccccatacggtcacctaccgtcgcaatccgctgctccacgcggttttggttgcgcgcaggtgaggcccgtgtctgtctgtgtctggtggtgaaaactggtgacctcgtcaccgtgacgccaggc

SEQ ID NO: 41840 - DNA, 1239 bp, Oryza sativa
  Clone ID: PAT_MRT4530_45148C.1
atggaggtggaccacgcggaccgcgacggcgcgcggcgccggtgccgcgagtacctgctcgcgctcgaggaggagcgccgcaagatccaggtgttccagcgggagctccctctctgcttcgacctcgtcacccagactatcgaggggatgaggagccagatggacgccgccggcagcgaggagacggtcagcgaccagggcccgccgccggtgctcgaggagttcatcccgctcaagcccagcctctcgctgtcctcctccgaggaggagagcacccacgccgacgccgccaagtcaggcaagaaggaggaggccgagacgtcggagaggcattcgtcgccgccgccgccgccgccggaggccaagaaggtgacgccggattggctccagtccgtgcagctctggagccaagaagaaccccagcagccatcgtctcctagcccaactcctaccaaggatttaccgtgcaagccggtggcgctgaacgccaggaaggccggcggagcgttccagccgttcgagaaggagaagcgcgccgagctgccggcgtcgtcgaccacggccgcggcgagctcgaccgtggtcggagacagcggcgacaagcccaccgatgatgacacggagaaacacatggagacggacaaggacaacgacaaggacgccaaggacaaggacaaggaaggccagtcgcagcctcaccggaagcctcgccggtgctgggcgccggagctccaccgccgcttcctgcaagcgctgcagcagctgggcgggtcccatgtagcgacgcccaagcagatccgggagctgatgaaggtggatggcctcaccaacgacgaggtcaagagccatttgcagaagtatcgtctacacacgaggaggccgagctcgacggggcagagcagcgccgcagccggcgtccccgccccgcctgcgccgcagttcgtcgtcgtcgggagcatctgggtacccccgccggaatacgctgccgcggccgccgcacagcagcacgtgcagcttgccgccgccggcaataatgcgtccgggagcgccaaccccgtgtacgctccggtggcgatgctgccggcaggcttgcagccgcattcgcatcggaagcagcaccagcagcagcagcaaggacagagacattccgggtcggaaggccggcggagcggggacgccggcgatggcagctcgtcctccccggccgtctcgtcgtcgtcgcagaccacctccgcttga

SEQ ID NO: 41841 - DNA, 144 bp, Oryza sativa
  Clone ID: PAT_MRT4530_45149C.1
atggcaggcgcggcggcgaagtggtcgagcaggtgcagcgactgggcgtcctccgcctcgatttgggcgtgttcgcggcggagcggtggtgccgtgggggcaaagcgggtggagggggacggccactcctcatcccgccgttga

SEQ ID NO: 41842 - DNA, 300 bp, Oryza sativa
  Clone ID: PAT_MRT4530_4514C.1
aaagagaaagagagagagagagagcggcgagatgcggaagcgggatctgggcatcctcctcctcgccgccttcgccgtcttcttctcgctccagcacgacggcgacctctccttccgcgaggcctggtaccacctctccgatgccgactaccccatcaagcacgacgccgaccgcctcccctctcccctagtcgccgacctcaacggcgacggcaaacccgaggtcctcatccccacccacgacgccaagatccaggtcctccagccccaccccaggccctcccccgacgatgcctcctt

SEQ ID NO: 41843 - DNA, 1926 bp, Oryza sativa
  Clone ID: PAT_MRT4530_45150C.1
ccccgggctgcaggaattcggcacgagggttgacaatctcggcggaaagcggcggcggcggcgacggcggcggctgcgggtccgatggatctggtggaggcggaggcggaggagcagccgccggacgaggacggcgacgaggaggggtacgtcgaggcggaccccgcaggccgcttcatccggtatgatgagatcgtggggtcaggggccgtcaaaacggtctacaaagccttcgataagctggagggtgtcgaggtagcatggagccaatcccggatcgatgactctgtcatggggtcctctaagaagatgaagcaactaaacacagagattcaacttttgaagacactcaagcataagaacattgagaaaatgtttgcttcatgggttgatggggagaagaagactgttaacataatcacagagttgttcacatccgggagcttgacacagtaccgcagaaagcacaagaaagtgaatatgaaggctatgaaacgatgggcaatacagatattaacagggctagaatatctgcacagtcagaagccagcaattatacacagggatttaaaatgtgacaatatattcataaatggaaatcatgggaaagtgaagattggtgattttggtttggcaacattcatgcagcaacagaaaaaaagtataaaaggcaccttagaatttatggcaccagagctgttaactgggcattacaatgaattggttgatatatattcatttgggatgtgcatgcttgaaatggtgacatgcgaatacccatacagtgaatgtcaaggcatggcccatatattcaaaaagattgatgagggtaagaaaccagctgcgttctacaaaattaaagatgcagaagtaagatctttcatagagaactgtttagctccagtagagaacagaatgtctgcaacagagctgttgaaaagctctttcctccaggatgatgatcttatctcagtctctctggtcaagaatatgtctgaagatgggcagcagcctgtcagttgcatgcttcgtaagggcgagtttctgctgacaggaaatgttgatgtagccagccatgttgatttatggctaagatttcctgatcccagcggttgtttcaagagtgttgaattcccattcaatttgactgaagatacaagtctttctgtggctgtggaaatggttgagcaatttggactgacacaagacagcagaccgatcatcgcgcagttgatcgatgcattcttggtcatcctgattcctgaatggacaccgtgtgtcgccatccgtcaggtggtttctgagggtgcaaacggcttgacaattgagaagcgctgaccgagagtgattctgcttccccaaccgctgctactaactaatagtcatagttggcttcgctggttatgtatccttatagtattttcttttagatggagtggaccttatgctttagccacctgtgggcactcatattacaatgccctcgagatgtgctgctgagcatggagttcctccggtggtgatgatgatgaaagttaggtctagttcagataatttatttgctaggaaggagcagcaaaaatgagagtaatcagtcggaaatgttgggttttttttcatctttaatgcaattgctgaattagttgtggcacgtctgaattcataatcagattggctgtgcactttgcatttgtttccatcggctttatgctgccggttttatttattgcacattctccttccctggatttaggatacatgattagaagtcgaaagtggaaaacgagataatccctccgtcccaaaaaaaagacaaactctgggtttccgtgtccacctttgattgttcgtcttaaataaagtttttttataatttgtatttttattgttgttagatgataaaacatgattaatattttatgcgtg

SEQ ID NO: 41844 - DNA, 615 bp, Oryza sativa
  Clone ID: PAT_MRT4530_45151C.1
tcagccactgcttgctcctacatcaagatgctgctggctgccaatcgtttgtaactttggcagtgacattgggtcaagccggcaggtgagcacaacaccaccagcctgaggtattgagagctgcggggaattaatggccttgaagagaggagctttgtctacattgcccctgatctcgagctcgagctccatctgtggccacctttgccagctgcgtgcttgagctcgacctccgcctaacatgccacgtgctcgagctccacttgcaccgctgtggcgcctcaactgccgcgccttctctgctcgtgcgccgcattgggcgtgcccgtgcgccacaccgcgtgggcccgccgccgaccgagccaccgaaaacccgcgccaaagccgcgccgccacgggagcgcgcatcagcaacgtcgcgtcgcccatcgtctcggagccgaggggtaacggccgcgacgtcacccccacaccacccctaaaccctatccaaccgcccttgtgagcatgcttcatcatcactggttggagccgaagccggcgtagctgaccgcgggagctgcgtgcgctgccgacgtcgattcgcccctgcttcacccgcaccgtgccgcgcat

SEQ ID NO: 41845 - DNA, 1026 bp, Oryza sativa
  Clone ID: PAT_MRT4530_45152C.1
ctaccgtggtagcagctgcttaactttgcccaccggccaccgttcaggggccattaatggcgtgcagggccgctgctgctgctgcttgctcttgctcttgctgctgggtggagtgagcgagagatcccatgtggcattggagcgctgtctcctgctgctgcacagtctactctcacctgctccgcctctcccctcgttaattcttggcggctgtgtggcgaggaagaagaagcggtgatggcatgctgatgggctgcgggttcttggatgcatttgggtggatatgcggacatggtggaagctgtaatttgagagcgatgggagcatcttcttagggacactcttccactggctagcctacagctgtttttctccttcattggtactccaatcttggctggaattttgaatcttttggccgggaagtgataaaatttagaaagacaacacaaccattggcacttcttacagttgtgagcgctaagctgagcctccaatggcgtggcattttactgcggctttcatgatcgcaacctgtttgatgttattcccaagaagcgagcagtcctcgcagggtgaggtgctgcagcagctaaggaagcagctggagtacccaaggcagctggatgtatggaataacccaaacagtgacccctgctacacccagcctacttcggtggtcaccgtggcatgcgaggggaacgccattacagagcttaagattatcggtgacaggatcaccaagccaccaaagttcagtggctatcctgtctccaatatcaccctctctgaagcctttgttctcgattcgtttgttactacattggcaaggttacctgccttgcacgttgttatcctagtatccttggggctatggggtcctcttcctgacaagattcaccggctgtcatctcttcaagtgcttgatttgagctccaatttcctttatggatcgattcctccgaagctgtcagccatgccaaagttgcgcaccttgacattggatgggaacttcttcaatggtac

SEQ ID NO: 41846 - DNA, 456 bp, Oryza sativa
  unsure (1)..(456): unsure at all n locations
  Clone ID: PAT_MRT4530_45153C.1
caggaaaactttatcgacatcccatagactggcagatctaaaaataaaggcacatggtgacatgttaatgactggattcttgaaacaactatatctacacccctaggcactacagtgccatgtgaaggacaagctaatagcacaaaaactatgagatcttccaaatgaaacaaatgtttgatttgctcttctacattttatgcccttttaattgttggacttgaatccacacatcagcatgtactctcaccgtttgatttcatttaatcctcgattcaggcgagaggcgtctatgacaggaagcgcagatgctgatgccaacgaacgcaccaaggacagtccaaccacttgatttgatcttgttcatcacgctgctacgtttcagagaataggcggntcataccactactgtcaatacttttaggcagcctattatgattaaattggtgatgtata

SEQ ID NO: 41847 - DNA, 205 bp, Oryza sativa
  unsure (1)..(205): unsure at all n locations
  Clone ID: PAT_MRT4530_45154C.1
ccctgtttgtaagccaaagaccaatnacccctgacgccactttttgataagactgagaattatcggagacctttcaggttcacttggtacatattaccgtgtagaatgtacttgtacatttcacatgatgagtagctattctcatgtaatctataccagattaaataaaatgcatctacatttggtaaaaaaaaaaaaaaaaaaa

SEQ ID NO: 41848 - DNA, 772 bp, Oryza sativa
  Clone ID: PAT_MRT4530_45155C.1
atggacactgctattgtttattctctttggttttatccttttgatcttatagcattagtagatttcagtttgtacgcagcaaacaccagtgaagaagtttcagtggatggactctttgaagcattctcacattgtgctgaattgaaccccgatcctaatgctgagagtgatgaagagaatggctgggctcatagagatgaaggtgatgaagatatgactggtggaagtgatgctgaatgtgagttttcagatgtcaacccgataggtcaaactgatgaacatgatattactcatgctgtagttgagcttcagatcaatgaccaacgttttgaggatgcagaggaagcagaacatgagacgcatggaaatggacactaatgcagattaactcctttgggccaccttgtaaacttgcatcaatggcaacgtatgggagaaaaaaggtcttgctactggtcaagaaaaatgtaagctgaaagcatgctggaggtctttgtatgcgttgtcttctgtaaaatacatgtatgatcatgcaacttcatattcagagatattttgacaatgtgctcatggaaaacatccatactttgtaagtgttcaagcttaattgtcagatttttttttatttacatccttgatcgaccaaagatgtatgctgatagctgagcaacaaacatttccttttctgtagcatttgctactgatgaatggtcctgtgctcaatgtccaaggacttgcagcagaatccgttagctcgttttattgctgtcag

SEQ ID NO: 41849 - DNA, 935 bp, Oryza sativa
  Clone ID: PAT_MRT4530_45156C.1
ccccttcaacaaggcccaacccacctccccttctttcattgggctcataacccacctcccctcttctcctgaagggtctaacccaccttcccccttctttcattgggctcataacccccctccccctgaagggcccaacccacctcccccttctttcatgacttataatccaccttccacccctcctcctcctcctcctcctcgctcctcgcatggcaccgcgtcgctgcagcctcaccggagccgtcttctttgccagccgccgccgccgcctccgtcgaccccttccgccgccgtcgaccccttctgcccccgctgccaccgccgtccccttccgccgctggacacgccagagccgacttcttcgtcgccatcgtcccatcgctcctcctctcatcctcctcgcctcctcgctcctacccgcatgtactaacgccgcgccaccgcagcctcaccagagccggcttcttcgccagccgcggccgccgccaccaccggccccttccaccgccatcgccaccgccgccgcgcactccaccttattctatgccccctccctctaacccacctcccctcccccaagggggcaaaacccacccccaccgcctgtggctccgggcagaccacctcccacaaaaccgccgaatcaagcgctcccaactactggctggccgccttgcctctcgtcgctgccagcgatgccggacttgaagaatggcgcaccgccaagcgcgctgagcccggacatatgcccgctgccgcatgatcgatggaagctaagctaagccgccgccgccctcgccttctccagcatcatagccgctgtcgccgctgctgccctcgccttctcccgcatcgtagccgtcgccgctgccgcctcctcctctcccgcctcgccccggcggcctccgccccagccgccggccggcttgcca

SEQ ID NO: 41850 - DNA, 657 bp, Oryza sativa
  Clone ID: PAT_MRT4530_45157C.1
ggccgctttttttttttttttttttcacgaaaaccacattgattaatcattaaaacaaaattattgcagtatcatcaaggcctgtatccggtttaaggcaaggaggcatcacccaacaaagcttgaggtcacttgacaatacagagacaactaaatacagtcatagtagtgaaatttgaaaataaaaaaagaaaaagatgaaactatgtcatgattcacttgagctataaaaataaatgtgagctgccacacccactcctagaccaaatggttacatcagcaatatacaatggttcagagatcaacatttgttgctcctgcaaaagccatcatcttgtacatgtctgctcattcactctgtatctgaaccaccatcctctcagacttcctcccaaagcaggggagaaggtgaccaccggaggagtcaactgccggaggagagagcgtgccgtcgccgtcgcgtcggagtcgcgccgcgccgtgcagccgtccccgccgcagcgccccctctcgttgcgtcgctgcgtcgagaggatttttttcctcgccaccagagaagctgaatatttcccggccgatgacgaggggaaaacactggggtgggccgggataaaatctcgcctggacttaaccgaacgcctatacttgcatgggctg

SEQ ID NO: 41851 - DNA, 1280 bp, Oryza sativa
  Clone ID: PAT_MRT4530_45158C.1
tcaagcgctggatttcttcttcttgttgcagaggcgctcgtgcaccaccccgcgcagatcatcgtcgatcttctcccagacggcggccggcagcgtggcgcaatctgtccacagcccgggatgcacgtacgcctggcgacacagggtgtgggccatcgagttgccctcccgatatatgtgtcgcacctcgacgtccgcgaagcagcggagcaggtccaggatttcctcgtgcatcgccgccgggatcctcgtctgcgtctcctcgccgcggatgagctgaaccagcaccaggtcgtcgccctcgacgacaagccgctcgacgaagcacgccagcgcgagcctcagcccccggatcatcgcacgggcctccaccacgccaaccgtccagtgctccgtgatctccgcgaaggcgagcaccacgccaccgtcgcagccgcggatcacgccgccgatgctcgctcgccgggatccgtcgtcatacacgctgccatcaaagttgagtttgcaccacccccccggcggcgcccaccatctgacgatcacccggctcggcttaaatggcggcgaggacggggacagcggagtggagcagcggggaaccggtggtggcgaaggaaagatcgacggcaagaaagccaaaccaccgccgccgccgcgaccgtcatcagggacccggagcctcccgccgtccacgcacatcctctgcccctcgacactgctcctctgccgctttccgttccccttcttggccaagaagaaggcctcgtcgccgcggccgtgatccgcgagaagattccacggcggcggcgcgctcaggggatccgcctcgaggatgtcgccgccgagcgggaggggctggccctggaggcgccggagcaggcagcggccgacgagctcgtcgtcgctgggatcgagcttgaggcccgggaggagcccatccgcgccagccgcagccgccgccatcaactgaggaatggaagccatggaaaagcgcccgattggagatcgaggtgcagagggagatctgctggttcaattcataaatcatagatgccacggataccagcctttttcttaatttctttctttatttttttttcgtgatgtacaaaatatatagaaaattggtagaatacacatactcatagtcatagggcagggtgtatatatacgatatatatactgttatacatattcttttgtttgtcaattgtcatagtatattttgctgtgacaccgttatataaaagagggtttacgtttaatgagaagatcacagt

SEQ ID NO: 41852 - DNA, 938 bp, Oryza sativa
  Clone ID: PAT_MRT4530_45159C.1
cctcccagcaccgtcgccatagccatccctgccccctaaacagttgtcgtcgtcgccgccttccgcctccttacgccgactcccgccgccccgcgccctccgcctccctcctcccagcgccaccgtcatcgccgtcgccgccttccgcctccccacgctgactcccactgccccgcgcatgccgcctccctgcgccgcctccctcctcccagcgccgccgtcatcgccgtcgccgccttctgcctccccacgccgactcccgccgccccgcgcctgccgcctccccgcgccgcctccctcctcccagcgccgccgccatcgccatccctgctccccaaaccgttgtcaccgtcgccgccttccgcctccccgtgccgcctcccgccgccccacgcctgcagcctccccgcgccgcctcccgccgcccagcgccgccttccgcctcctcgtgccgcctctccgcctttccaaccggatgctggccaaaaccctccctccactagccaaatttggccactctatttggctggccaatggcgggccccacacaacccatctcctccatccctagttccccacaccacaaccgcaaggaaggagcacgaggaggaggcgctcgccacaaccgccgccccgctcgccgccgccgccggcccccgcgcggcgcggccgctgtcccgcgcccacggtgcggccaccggcctccgctcgccgtggccgcccgcccctgctcgccgcggccgccgtccccccgcgtggcgcggcccgccgtcacccgctcgccgcggccgctggcccccgctcgccgcggccgcggccgccgtccgccgcacgccgcacccaccgcctccgctcactcccagcttgtcggcgccgcctgcttccaaccaacgcgagaaaaaagagaaagaggggaaggaaggggagaaagaagaagg

SEQ ID NO: 41853 - DNA, 1605 bp, Oryza sativa
  Clone ID: PAT_MRT4530_4515C.1
atgcctacctcctcccccgtggtggccactgtcacatgcgcctcgtctccacgctcctcccttgcatcccttcgcctcccgctccatgaccacgcggtcacgctcgtctgccgtgtccatccctctgtgtccctcaaggctacgctgcggatccacggcgtgggtaggggcggggctgggctcggtcgtagctacattcctaggagagagaggggagaggtggagagatggggaaagaggagagaagggaggaggaagaaggtcgagctcgtcagctcccttgcctccctcctcttctcctcctccaccatagaccaccgaagcctcctcatcgtcgacctctcactgccactgcccctctccccgctggagttccaattcttccagggggtggagcaagagatgctcttgctatcccatggcggtggcggcgcggcggcggctgcctcggacgacgtgctcgcctaccatgtcggggtgctaagggacaaggtgcagcagctggagccgctggtcggcattgtcgtcgtttcccccgccgcgccgcacggccagctccggcgcgacgcggcggcgatggcggcgtcgagcgcctgctccgtcctgcaggagataactgccgccggctccgccgtggcgcaccggctggagcaggccaacgccgcctcctccgcctccttcaggcgaggagtggctttcgccgacgacgcacacgccgccggtggcgtgcagatgttcgcggcgggcgcgcacggcggcggccaaggcggtgatgacgaagccggcgcctcgctgttccaccaccacgggccgccggccgtcggcgcgcccaccgtgttccgcgccggcgccacgacgacggcggccgcgtcgagcagcggcggcggagacgacgacggcgacggcgacggcgaggtggacgtggtggagctggaggcgtcgtacctgctggcgaggtacacgcactactgccaggtgtgcgggaaggggttcaagcgcgacgccaacctgcggatgcacatgcgcgcgcacggcgacgagtacaagacggcggcggcgctgacgagcaccggcgccggcatgagggcggcggcgaggcggtgcagctactcgtgccccgcggaggggtgccggtggaacaggcggcacccgcggttccaggcgctgaagtcggtggtgtgcgcgaagaaccattaccggcggagccactgcccgaagatgtacgtgtgcgggcggtgcggcggcaagcagttcgccgtgctctccgacctccgcacccacgagaagcactgcggcgagctccgatggctctgctcctgcggcaccttcttctcccgcaaggacaagctcatgggccacgtcgccctcttcgccgccggccacgcccccgtgcccgtcgcgccggaggcgtcgccgtcgacgacgaccaccggcaccacgacggacagatcaccggtggcgggcttcgctggctcgacgacctcgtgcggcgctgcggccgacgagaaggcggagcgggcgggcacgaggcgcggcggctccctctcatcctccactgccttcctcccgagtagatctggccgccgctccaccccacacgcgtag

SEQ ID NO: 41854 - DNA, 493 bp, Oryza sativa
  Clone ID: PAT_MRT4530_45160C.1
gatgcttcaaaaatatagcattttcttattgctgcaatgtgtatcagaaatcattgaaaaaaaatgttgagcgagctccgtcagctagaaatactcatgaaacaacgggatctaataaaggattaaatgttgcacagccacataaagacgaaatggcactgtatttttgtacgtgctggaggtgaagcaaccaagctccgagctgcatgggaaagatttttcttggccaacctttttccaacagaatatttgaaagcacgattagtactaactttcatttacaatagcagtctcctaatgtcaccaaaattctgtgacaactctgtgaaaaacttgcctcctacttgaccatcaaatacacgatggtcagcggacaatgtcaagctcatttttgtaaccactgtagccttctcggttccatcactgtccaccacaggctcgataatcttattaccacgcccaacagcaagaattccagactgaggaggattga

SEQ ID NO: 41855 - DNA, 2143 bp, Oryza sativa
  Clone ID: PAT_MRT4530_45161C.1
atgttcttctcaagggtcaagactgacaacagacagatcacactgagatttccaaatccggtgccgctgggctagcgccagaggaaaagaaatctccccgtctccttctccttgcctcctccgctccttctcgcgccgccgccgccaagacgagtcgcgtcgcggctgaacaggggagggccgggcggcgatctccatctggcgagcagcggaggggagggatcctgatcctggattttgggcaaaggtgggggtgaatttgcacgagggttttggttgatggcgaacattcgggctcttctcatcgggttggtacgtgccaggggttccttggtggacattgggcgatgcgtttcttcttcaaggccttcatatctagcgtcactgggcagacattacaaggttcccatggaaattcgttggttatcctcaacagggtttcctcctcatctggtggttgggatgcctgcattatcccctactatgaatcaaggtaacattgcaaaatggagaaaacaagaaggtgaaaagatagaagttggtgatgtgatctgtgagatagaaactgacaaagctacgcttgagtttgagagccttgaagaggggtatctggccaagatcttagcacctgaaggttcaaaagatgttcaggttggacagcccattgctgtcacggttgaagatcttgaggatattaaaaatatacctgctgatgcttcctttggaggtgaacagaaagagcagtcaattgcaagtgaagcacaaaaggttgaaacggatgctgcaaaagagagctcgataataacccgtataagcccggcagcaaaattgcttatcaaggagcatcgtctagatcagtctgtactgaatgcatcgggtccccgtggcactcttctgaaaggggacgttcttgctgcattgaagttgggtgcctcctcaagttcaaccaagcaaaagaatgctccagctgcaccatcatctcagccaactcatgatttccaagctcaatcagtcaccattccacaacaaaatgatgcatacgaagatatccccaacagtcagatacgcaaggtgattgcaaaaaggttgcttgaatcaaagcagaccactccacatttatatttatcacaagatgttatactggatcccttgctcgctttcaggaatgaactgaaagagcaacatggggttaaagtttcagtaaatgacattgtcataaaggctgttgcacttgccttacggaatgtaccagaagcaaatgcatactggaacaatgacaaggaacaagcccagaagtgtgtttcagttgatatatctatcgcagttgctacagagaagggcctgatgactcctattataagaaatgcagatcaaaagactatatcagcaatatcctcagaggttaagcagttggctgaaaaggcacgtgctgggaagcttgctcctaatgaatttcagggagggactttcagcatctcaaatttgggaatgtacccagtcgaccacttctgtgcaatcatcaatcctcctcagtctggaattcttgctgttgggcgtggtaataagattatcgagcctgtggtggacagtgatggaaccgagaaggctacagtggttacaaaaatgagcttgacattgtccgctgaccatcgtgtatttgatggtcaagtaggaggcaagtttttcacagagttgtcacagaattttggtgacattaggagactgctattgtaaatgaaagttagtactaatcgtgctttcaaatattctgttggaaaaaggttggccaagaaaaatctttcccatgcagctcggagcttggttgcttcacctccagcacgtacaaaagtaaccaattattttttatttttttaataaggttaaatctgcatttccaagttttttttcttaattaataatactgggattaatgccccaagaattttgcagatacagtgccatttcgtctttatgtggctgtgcaacatttaatcctttattagatcccgttgtttcatgagtatttctagctgacggagctcgctcaacattttttttcaatgatttctgatacacattgcagcaataagaaaatgctatatttttgaagcatcaaaaaaaaaaaaaaaaaaaaaaaaaaaaa

SEQ ID NO: 41856 - DNA, 1075 bp, Oryza sativa
  Clone ID: PAT_MRT4530_45162C.1
gcaaagtccacacaggtgatactagttgggtatcctccaaggaggacaacggtggcccaggtgaacgccagtgtgccgagggcgttgcccaccctctcaacggaggcaacaacttgaacaaagcaattcagctgctcttctggcatcgcgctatgccagctcgcctcaggggcagggtcgtaggcaatcaggagacagctgacacgagagcaccggttaatccaatgatgagtcagcagcaacttcgattactacgcatgcgaagttccctttatttgtattattctcccgatagagctggagcatagttttcttgactgacatccctgtgttcatcttcttgcaaaatgtcacagctgatggcatcttcctctctatctacctaagagttgtacgcattacagaaaaaaaacaaacggaagagagtaaactccaaactccagaggtgttggattaattcattggtcattggtcacgagagcaccggttaatccaatgatgagtcagcagccacttcgattactacgcatgcgaagttccctttatttgtattattctcccgatagagctggagcatagttttcttgactgacatgccaatgttcatcttctaggaaaatgtcacagctgatggcatcttcctctctatctacctaagagttgtacgcattacagaaaaaaaacaaacggaagagagtaaactccaaactccagaggtgttggatttggtgattggtcattggttgcggcggcgccgccggcctaccgggcgtggaacaccgtacggccggagaatgatttcctcgttgcgcggcacgaaatgtactcttccattcctgaagctacgggtacggtttctgcttaaagaatacactgaattctgcatgtataaagcctgaacccgtaggtcttcagctacccggcagtgttcagataagcaacccggatgattgttttggcttctggatttatcaaatgaagtcattttgcctgttgactcagacataggattgcttgacgtacccatgatcaagtaacatgtatatataaaatccgagacaatgttatgtgatct

SEQ ID NO: 41857 - DNA, 218 bp, Oryza sativa
  Clone ID: PAT_MRT4530_45163C.1
atggcgtggggcccacgtgccgtggcgggggggtgtgtggcgacgttcttagatgttctcgtcgggttacatgagaagcgagtagatcttctctctcgcccttctctctacaacgtccaaaagtttgaaagcaatattatgctgtttgaaagcaatattatgctggagaagagcgaggcgataggtatgttcctcttcgaagggctgacgacgatcgg

SEQ ID NO: 41858 - DNA, 520 bp, Oryza sativa
  unsure (1)..(520): unsure at all n locations
  Clone ID: PAT_MRT4530_45164C.1
tttcaccttcagcgcgagccgcgagcgagagaggaaaagggaagcgacgatctctgcccttctagaaggttcgcctcgtcggtccccttccccccctctcctctcaagcttcagagccctctctctcccttacacgaggcgagatctgctccccttctcccgattcaaccaaccaccacctcatctccgattccccctcttcttcttcttcttcttcctcttcttcttgggggggtttggggatttcttgactggacgacctcgtgcgatttcgggaggcaggagccatgaacggcaataagcagtccctgatatacagcttcgtggccaagggctccgtcgtgctggccgagcacaccgccttctccggcaacttcagcaccatcgccgtccagtgcctccagaagcttccccccaacacctncaagtccacctactcctgcgatggccacaccttcaacttcctcgtcgaccgcggcttcgtgtttctcgtcgttgccgatgaggcccgtggaaggag

SEQ ID NO: 41859 - DNA, 174 bp, Oryza sativa
  Clone ID: PAT_MRT4530_45165C.1
atggcgatgaccggtggggatggagacgatgacgatggctggatctgggagaaacggggcagcggccgtagattgataatgtttgggtttggtgaatttgaagggggtatactcaccacctctaatgatgagtggtacatgatgtacccatcgatactgaggcacttgtggtga

SEQ ID NO: 41860 - DNA, 1627 bp, Oryza sativa
  Clone ID: PAT_MRT4530_45166C.1
atggaccaccaccagcggtggcaccccacggtggcgagcgacgcgaacggcgaacgccatggaccaccaccagcggtggcaccccacggtgaacgagcgcgagttcatcgacgcgcgccctccagtccgacctccgcgtcgacgggcgccgccccttctacttccgccgcctcaagatcctcttcggcagggaggacggctccgcggaggtgcagctcggggacacgcgcgtcatgggctacgccacggcgcagctggtgcagccgtacaaggacaggcccaacgaggggacgctcgccatattcaccgagttctcgcccatggccgaccccgccttcgagccggggcggccaggggagtcggcgatcgagctcggtcgcgtcgtcgatcgcgggctaagggagagccgagccgtcgatatggagtccctgtgtgttgttgctgggaagcatgtttggtcggtgcgcgtcgaccttcatatcttggataatggagggaatctcattgatgcatctaacattgccgcgctggcagctctgtctactttccggaggcctgaatgtacggtcggaggggaagatggtcaacagctaacattgccgcgctggcagctctgtctactttccggaggcctgaatgtacggtcggaggggaagatggtcaacaggttacagtacatgaccctgaggtaagggacccactccctttgacaattcatcatctccctattgctgtgacatttgcatattttggcgagggcaacatcatggttattgatccgacatataaggaagaagctgttatgggaggacgaatgactgctacaattaactcaaacggtgatgtatgttccatccagaaagctggtggagagggtgtcatgtcaagtgttatcatgcagtgtttaagaattgcttcagttaaagctgctgatataacaagcaaaataaagaatgaggttaactcatacacctctgcgaaggcactgcagaaagtaaagcgtttgccagcctcagcactgaaaaaggataatgctcctgatgtggctatgaaggaaagttctgatggtgcattggaaactcaaagtacaaaaccatccagcgatggtcagcagataaacaaagaaccaccatctgtggttgaggacaacaagcaggaggatgttgaaccaatgttatctgaatgtaatcctgagccgcaaagtgaatcaaggttgactgctggagggtcagatgagacgcaggaagctatatcgccaaagagtctaaaagacgctgtcaagccaaaacacaaaataaagaaaaaacaacacagcaagagttaaatttcatgtaacttataggcctgtcagcagtgttagatagcgcaatgtttgtgggcatggttggcaaaattccgttgttctcttgatggtgtacatgctagattatacagcacgatgtattttcatgagattcaaatcaacgtgggaagtttctatgcatttttagttcctctatttttttgtggaaatacttcactaccaccatttgttatgatgttgatttgggtttgcagtccatgtctgaacatctctgtaactcatacatctgccaagctttcctgactgaaaagatcccttcaccat

SEQ ID NO: 41861 - DNA, 663 bp, Oryza sativa
  Clone ID: PAT_MRT4530_45167C.1
atggaggatcgccgctcttatgcgatccaccgcactccggcgttgccacgcattgtcagcaattcatcctctgtcgcgacggcagaggacgcccacagaggaggtaattacaagcagcggccgatatgccggggggacgagcggttgccgatgccgccgctacacagcaagcgccgccgcgacgaacaccaccgccgggactaccactacgacgacgacgactacgcctatcgtgcgagcaagaagaagaagcagcaggcggccgctgaacaggcggcgcgcatgccgaacaacaggacgaccagaccgacgacgcggcgcgcgtcgtcgtcgcgctcgcgcaccaaggaagagagccatgcccgcggtggcggcgccgcgccgcgacgcgagaacaaggatcgcaaggacggcgccggcgggcgccgctcgcagcggcgcgcaccgacgatcagcggaccgcgcgtcccgccaccggcgacgccgcctccggcggcgctaccggactcgttgacggcgcaagacgcgctgagcgcggccgcggcgagagcgagggagatctcgctgatgcgggaggaggcacggcgggagctggccaagatggtcaggaccgtcgagttcaacgatccgtacatctcacccatggacgcgctcaagccctga

SEQ ID NO: 41862 - DNA, 360 bp, Oryza sativa
  unsure (1)..(360): unsure at all n locations
  Clone ID: PAT_MRT4530_45168C.1
tgggttttttttttttttttttttttttttttttttttttttttggagcttcacatcatcggtggttatcataactggaataacagggcagatggggcataaaccaagtatatttcggagttctaggttatttataatatcagaatcaccaactgggaaccatccacaggatgggcgggggactactgatcagaatctactcctttgagggggggatgggaaacacgggggagaccattaaatccacgccacatttgttggggacgttggagcccccgcagatcttgaagtcccatgcccatgcttatggctctnnntggcgatgagggagacctgtcacgatttggggccccctgagta

SEQ ID NO: 41863 - DNA, 138 bp, Oryza sativa
  Clone ID: PAT_MRT4530_45169C.1
atggcgattggcggttttccacgtgacgtctcgcacggcagcacgcgggtgacacgggtgcgtgcagatatagagctgcctaaactttacgcgtgccagatgatgaaaagggagaaagggaagatggcgacggtctag

SEQ ID NO: 41864 - DNA, 849 bp, Oryza sativa
  Clone ID: PAT_MRT4530_4516C.1
atgttcatctgcacacctggatccttcgggccccttgccgccccaacagagggcggcaagggctttcctgcaaaaaaaccctccctccgtcaccgcccgtcccttccccgtttgccacgtcagcttgccgctccaaaggtgggcggcaggctcatccccacgaccaaatctcgccgtctccgcctcgccgccgccgccgccgccgccaccgccaagagggggggaagcaacccgcagccgccgcgcggcgagatgaacaccgacatcaccgcgtcggtgaagccggagtacccggtggtggaccggaacccgcccttcaccaaggtcgtcggcaatttctccgcgctcgactacctccgcctctccaccatctccgccgtctccgtcaccgtcggctacctctccgggatcaagccggggatccgcgggccatcgatggtgacgggagggctcatcggggtcatgggagggttcatgtacgcctaccagaactccgccggccgcctcatgggcttcttccccaacgactccgaggtcgcccgctacaagtacaagctgtagtgagaaactttatcgattcgctgcgttctctctctctctctctctgctgctgcaagcgtttacatcttttttttctttttcctgatgatctcgttttagcgtcacttgttgatgtgcgagatgtgtggccttggctgaataaatgttgtacgctgcacgcttgtgaggaattcgtgctacaatttagctccctttgccatggtttagtggcaatttggttgccgatctggtaaaaatttatggaactgaatgtgaccccctgcctgtgaaatttggggattttgttct

SEQ ID NO: 41865 - DNA, 105 bp, Oryza sativa
  Clone ID: PAT_MRT4530_45170C.1
atggctcgcctgccatgggatgggtcagggtaccacgtgtttcatgggctcaggccgactaggattctagatcctagggctcttcaagcagaacactgggcgggg

SEQ ID NO: 41866 - DNA, 399 bp, Oryza sativa
  Clone ID: PAT_MRT4530_45171C.1
atggccgtatattggcaaacgtttcgtcgtctccgtggccgtcccgtgtggcctgcgcgggcctgcgcgggaggcaaggccggcggaataaaaacgctcgctctccgtctccgtccttttcaatctctcgcctatctgaagaagaagagaaagaaaagcagcgttgctgctgccgcctatgcgagtccatcggctccgtcggttccgccacactggcctcctcgccgcgggcgaagccacacccacctcggcccagccgggcagcctcagccggccctccgcgtcgagctccgtcgcctccgcctccgcgccacaagcgacgccgcactcgcctcgcccgaggccgcttcctcggcaccctccgcgccgcaagtgacgccgcggcttctgttcaattag

SEQ ID NO: 41867 - DNA, 1872 bp, Oryza sativa
  Clone ID: PAT_MRT4530_45172C.1
atgttctccggtgtttgcaaaccgtggcgatccatcgcgcagcagcagcagcagcagcacccgccgtgtaacctcccatggctgctcatgccgtccaccgccgcgacctcattgttctgcgtcgtctccgaggacacccaccgccccgggctcctcggcgacgcgcgctgcgcgagattctgcggctccttcccgggtgcctggctcgccgcggagctccccgagtcgcgcggccgcggccccgtgctgctcgacctatgcaccggcgagtgtgtcgccctcccgagaggctgtgaggccggagaatcttcctccgccgattctgcttcgtcaccgtcgacgacatcaggaagaggctggagcacggcgacgggcagcagccgcctcactagaagaagctcgcaatcggcgcccctgagcggccggaggatcttcctcagacgaggctgctacttctccgtcgatttgtgcaacccctgcccgctccacatctacttctgcgacgccgccgcgagcttccatggtgcttgtgacgtccagaggctagatccaagcattggaggtggtttcactggaggcgcctgccaggtgttcggagaaatgccgagctggctgggagctgcacacgcgtctttccctggaaatggtgctaacgtgatgcccaccaagtgttcgacgttgggaccaagttatgccaccaccacgtcaggggccaagagcataccagctgcaacagaacgcgtgttcccagccactaaagcttcattggcatcctcaacttcatcaacaaccatgacgactccggcaccttccaccgagaccaaggatgttggggctggcatggacaaggaggtgttgaaatcagagaaaaccactcaggacttgaacactaagatgatggccatgatcaataaaatgttggagacatgccgtaacaccaaggaggattataccgtgagtgtggattgcaatggagatgccacggcactaagcgttaacattgatccagtacccatcttatcagaggtcagtaatgaggctaactcaactcatcttgtcaacactaacaagcttagtatggtgacagtgaaaccaaccaagggtttgacaaaaagcaaaaaggaaaaggttgatggtgatgtcggtggtatggtcactgataattgtgtcaagtttaccaaggtggataccaagctcatttttgtgttcagaccatttacagatgggcagatttcacagctagaccgcaatgtttctgaaaatatagtgtatgatgtgacagggactcctgtcatgccaagcaaatggatccatgttgtagcagttgggaggacatggctattatctgcttttgccctgataaatttcctagatgctgggactgtgcaattggcagtgaagcttgtgcatgtcaagattgctgagatgacaagaataagatcttgggatccaggtattgtcaatttagttactataatagcttgccaaatttctacagaagtgaagaagggagggagtgatactcttgatctcagctcagtttgcaaaaagcttgggactagtatcaagatccctaactataattctggacaaatggaggtgcaatgcatccaccagagtgcaagttttgtcacttctattggcatggagtcgtctcttgtggttgcattttatggatcagctggtgcttacggattagctcttgatgatcacttgcagctaccctgggatcctggaggcactgatcttgagcttcaattgcatcagcttggggacaagctgattttcaaggcggggagaatgttatgtaattgggtcggattggtatgcatattgagctcagggctggctaggcccaatccgctgcgctaa

SEQ ID NO: 41868 - DNA, 816 bp, Oryza sativa
  Clone ID: PAT_MRT4530_45173C.1
atggagtgggttcgtaacaataaggtatcagagccaacaatccgtgggattccataccagaaggcaaggtggatgacacacagtggcagcagtgacgtccagaggctagatccaagcattggaggtggtttcactggaggcgcctgccaggtgttcggagaaatgccgagctggctgggagctgcacacgcgtctttccctggaaatggtgctaacgtgatgcccaccaagtgttcgacgttgggaccaagttatgccaccaccacgtcaggggccaagagcataccagctgcaacagaacgcgtgttcccagccactaaagcttcattggcatcctcaacttcatcaacaaccatgacgactccggcaccttccaccgagaccaaggatgttggggctggcatggacaaggaggtgttgaaatcagagaaaaccactcaggacttgaacactaagatgatggccatgatcaataaaatgttggagacatgccgtaacaccaaggaggattataccgtgagtgtggattgcaatggagatgccacggcactaagcgttaacattgatccagtacccatcttatcagaggtcagtaatgaggctaactcaactcatcttgtcaacactaacaagcttagtatggtgacagtgaaaccaaccaagggtttgacaaaaagcaaaaaggaaaaggttgatggtgatgtcggtggtatggtcactgataattgtgtcaagtttaccaaggtggataccaagctcatttttgtgttcagaccatttacagatgggcagatttcacagctagaccgcaagtag

SEQ ID NO: 41869 - DNA, 299 bp, Oryza sativa
  Clone ID: PAT_MRT4530_45174C.1
cagaagattagaccatttattaattgattccatcattaaaatccaatgcagtaatgccgtacaagaccgtagtctggtgttgccatcgaagcttgaatgaaagacaactcagctcctgcgttggtatttcataaatggccatgcattcccttctcgaaaacaccgcaccgtgagtatcaatgaacatcctatcctcattcgtgcaaccatgttgcaaaattaggccaggtctaatagatgatcagatacgccggtcgcatggctcgtgatgtatacaccgacacgtttcattcgggttg

SEQ ID NO: 41870 - DNA, 2496 bp, Oryza sativa
  Clone ID: PAT_MRT4530_45175C.1
atggatttcgtgtttgcagggaagtcagctacagctgtggtaatcgtcgacctgatcaaaaaggcctcagcctacctggacacggactgcatgtctgacaggttgcagccctcgagggacaagttatatcaggatttgcagatggtgttggatgtcatcttaccaaatcaacctcaggatttggatagacttatagcacttgccctgagggacgcatttgaggaactcaaggatgcaatcgacgagcatgtctactacaaggtcagggagaaggccaaggagcgcgagaggttagtaagagcagaccaagttagcactctcaaaaggataggggaagggatcaaagctttagaaagggttatcgcagaagcttcaggcttaccgttgatggatcgtgacaatatggtatcagagccaacaatccgtgggattccaggccaggaggcaaggtggatgacacacagtggcagcagcgacgtccagaggctagatccaagcattggaggtggttgcactggaggctcctgccaggtgttcggagaaatgccgagctggctgggagctggtgctggcgctgctcttcatgtccaagtgagccaagtcctttatccggtgactagcgaggtactacatcaagtctacaacggctatggagcagtggcggtgcaagtgctcgccacgagttgttggggcgttgaggcgctagtctggttccgttcaagctgtgacacggaaagggctcgatctgacaccaatgaacacaacatttacgatgggtgttgcctgcttgatgtccagcacacgcagtctttccctggaaatggtgctaacgtgattcccaccaagtgttcgacgttgggaccaagttatgccaccaccacgtcaggggccaagagcataccagctgcaacagaacgcgtgttcctagccactaaagcttcattggcaccctcaacttcatcaacaaccatgacggctccggcaccttccaccgagaccaaggatgttggggctggcatggacaaggcggtgttgaaatcagaggaaaccactcaggacttgtacactaagatgatggccatgatcgacaaattgttggagacatgccgtgacaccaaggaggattataccatgagtgtggattccaatggagatgccgcagcacagtgcatcaacattgatccagtacccatcttattagaggtcagtaatgaggctaattcaactcaacttgtcaacactaacaagctttgtttggtgaaagtgaaatcaaccaaggatttgaaaaaaaggaaaaaagaaaaggttgatggtgatgccggtggtatggtcacggatgattgtgtcgcgtttacaaatgttgataccaagctcatttctgtgttcagaccatttagagatctggatataattaatcaaggcagcgaaggcgtggtggtgaagctcttacaaccctggccaccacctactcaagcagaagttaaagctaaaaagaaagtactgaatttatatggtcaaaaaccggaggttcagattatcgtaacagtgtgttcggtttccaaggctaccataaaagggctacaattgttgggtgaacgaatgttacaggaagagcaactgaaatgtgaggttgtcaagtccaattggtacagtttttcaaatcttttagttggagatataatggatattgctctacctatgcagtcactgagacaagtaattctaagctatggtctagctcaatctcagaatgaaaattcggtgattcaagaagctatgagctactgtcagttcaaattctcagctaattatgtcatgagtccttctcaatggagaaaagatatagtggattctcctactaacaaagggtttcattttcaagaaatgttaaagcaacaaattgatggtgttgacaagaggctgctatactatcatcaaatcagcactgtattttgcagtgtctctaaagatgtagtgtatgatgtgacatggactcctattgtgccaagcaaatggatccatggtgtagcaattgggaggatagggctattatctacttttgccctgatgcatttcctggaagcttggactatgcaattggcaaccaagcttggtgttatcaagttcggtttggacaaattaccaaatcattcagttggaagtatcatggctatggcattgttgcttgcgcaatctttggaggatagatttattgagtgggaatttgtacattcagataagattcttcaagagcaagtacaaccaccattagctacagaatcaccgatgcgagtatcttgggatcctggtgtctccgatgcatcggcttggggacaagccgaaatttatggagggaggaatgtcatggacagacttgttagcaaccaaatcaccaaacaacaagaatttcaccacgaacaactattcagtcaacaatgctatttctggaggtggaagatggggaaatacagggggctagaaggttctggaagctag

SEQ ID NO: 41871 - DNA, 525 bp, Oryza sativa
  Clone ID: PAT_MRT4530_45176C.1
atgttctccggtgtttgcaaaccgtggcgatccatcgcgcagcagcagcagcagcagcacccgccgtgtaacctcccatggctgctcatgccgtccaccgccgcgacctcattgttctgcgtcgtctccgaggacacccaccgccccgggctcctcggcgacgcgcgctgcgcgagattctgcggctccttcccgggtgcctggctcgccgcggagctccccgagtcgcgcggccgcggccccgtgctgctcgacctatgcaccggcgagtgtgtcgccctcccgagaggctgtgaggccggagaatcttcctccgccgattctgcttcgtcaccgtcgacgacatcaggaagaggtcccccctgcccgctatgcatgtacttcctggtgctcgcccgcaacctcgtgctcatggtcatcaggttcgtctcaacgagggagacggcgtttgatgcgcttcaggctggagcacggcgacgggcagcagccgcctcactagaagaagctcgcaatcggcgcccctga

SEQ ID NO: 41872 - DNA, 283 bp, Oryza sativa
  unsure (1)..(283): unsure at all n locations
  Clone ID: PAT_MRT4530_45177C.1
agtacatattggaagcagctgctgaggcctgagggtaggataggctgcccttgagcctggttttccctcgatttcttcgtcctctgcggcagggcttcttcttcttcttcttcttcttgggttgctacctagctcgtactggagtattaaggaaggaatagccggccggcaagaaaagaagctcaacatcatctagctcgtcgctactagtaagtaggagtagttggcaaaatccatccatatatatnatggcaactggcggcggcgatggtcgtcggagggg

SEQ ID NO: 41873 - DNA, 2244 bp, Oryza sativa
  Clone ID: PAT_MRT4530_45178C.1
atggagtggatttgtaacaatatggtatcagagccaacaatccgtgggattccaggccaggagacaaggtggatgacacacggtggcagcagtgacgtccagaggctagatccaagcattggagggggttgcactggaggcgcctgccaggtgttcgaagaaatgccgagctggctgggagctggtgcaggcattgctcttcgtgtccaagtgagccgggtcctttacccggtgactggcgaggtactacatcaagtctacaacgactatggagccgtggcagtgcaagtgctcgccactagttgttggggcgttgaggcgctagtctggttccggtcaagctgtgacgcggagagggctcgatctgacaccaatgaacgcaacatttacgatgggtgctgcttgcttgatgtccagcacacgcagtctttccctggaaatggtgctaacatgatgcccaccaagtgttcgacgttgggaccaagttatgccaccaccacatcaggggccaagagcataccagctgcaacagaatgcgtgttcccagccactaaagcttcattggcaccctcaacttcatcaacaaccatggcgactccggcaccttccaccgagaccaaggttgttggggctggcatagacaaggaggtgttgaaatcagaggaaaccactcaggacttgtacactaagatgatggccatgatcgacaaaatgttggagacatgccgtaacaccaaggaggattataccgtgagtgtgggttccaatggagatgccacggcactgagcgtcaacattgattcagtacccatcttatcagaggtcagtaatgaggctaaatcaactcatcttgtcaacactaacaagcttagtatggtgaaagtgaaaccaaccaagggtttgacaaaaagcaaaaaggaaaaggttgatggtgatgccggtggtatggtcactgatgattgtgtcgagtttaccaaggtggataccaagctcatttatgtgttcagaccatttacagatgtgagtttggctttgtgccagagcaattacattggtgtcaccaaccttcctgttgtctcttctgaatgtgaggttcgctacgatgattttgtctcaggagcagatttcacagctagaccgcaagtagtacctccctggagactagcagttccactggattttcgattcttgccatggccagatatatttaatcaaggcagcggaggcgtggtggtgaagctcttacagccctggccaccacctgctcaagcagaagttaaagctaaagtagaaaaactgaatttacatggtcagaaactagagattcagattatctcattgggacagctagttccaagctacagtctagctcaatttgagaatgaaaatttactgattcagcaagctatgagctggtgtcggttcaaattatcagctaattatttcctgagcaagccttatcaatggagaaaatatattgtgggtgctccagcttaccaagggtttcattttcaaggaatgataaagcaacaaattgatggtgttgatatgatgttgctatactatcatcaaatcagcattgtatattgcagtgtttctgaagatgtagtgtatgatgtgacatggactcctgtcatgccaagcaaatggatccatgttgtagcaattgggaggacatggctattatctgcttttgccctgataaatttcctagaagctgggactgtgcaattggcagtgaagcttgtgtatgtcaagattgctgagatgacaagaataagatcttgggatccagttattgtcaatttggttactataatagcttgccaaatttctacagaagtgaagaagggagggagtgatactcttgatctcagctcagtttgcaagtacaagaatgctcatgatagtatccaagtgggcacagtatctagcatttctctatcactgaccatgtttgccgtccttccatccaaaaagcttgtgactagtatcaagatccctaactataattctagacaaatggaggtgcaatgcatccaccagagtgcaagttttgtcacttctattggcatggagtcatctcttgtggttgcattttgtggatcagctggtgcttatgtattagctcttgatgattacttgcagctaccctgggatcctagaggcattgatcttgagcttcaattgcatcagcttggggacaagctgattttcaaggcggagagaatgccatgtaactag

SEQ ID NO: 41874 - DNA, 122 bp, Oryza sativa
  Clone ID: PAT_MRT4530_45179C.1
atccgtacttttccatcagattacgagccttaccccccgtgagttctcttctaacaaacctctggcccttccacatctatagagctcctctaaggcaggacgccgcaagatagggaggagat

SEQ ID NO: 41875 - DNA, 463 bp, Oryza sativa
  Clone ID: PAT_MRT4530_4517C.1
acgcgcgtcgtaatctctctgtgcaggaactgaagcaaggtttggatttgtagacatacatcagacagtgcaacgatgcagggaatggttagtgcaaggaacacatgtgctactagccatgcccacactttgtaccaggggcgctagatacatacacccagatgatcacaacattccacagatcgcatcctggaccgcggagcgggcgcatcaagagggctcggcgggggtgccggaccgcttgtcgactacgacgggaaactcgcagtgctggacgcagttggttgatgacgctcaccaggagagttctttgaaggaaaccgtaaccaaggttgccaattaccaccaatgttcgagcgcgacttttccccggcccattaatcacatccctggggtcccttttttcacccgggtttcacctttacattggggaaggcagtgcaatttctcggccttggcacac

SEQ ID NO: 41876 - DNA, 131 bp, Oryza sativa
  Clone ID: PAT_MRT4530_45180C.1
acgaaaaaccccgaacttggattttaaaaatgccccaaaaaagggtcacataaacaaacacagtgtcacagacagcaaaaggcttcagaaaaaacccgtggatatatcaaagaaggcaaattggtttttaa

SEQ ID NO: 41877 - DNA, 637 bp, Oryza sativa
  Clone ID: PAT_MRT4530_45181C.1
gcttcttcgtcgtcttcctgaagtttagccgccgctagctgcagccatgaaactcaggatgcagttagcttggctgctcgtcgccactctgctcttggcctcttcggcctgctcgtggtcgcgtccgctaggtatatgtgtgcacaatgtatatcatattatcatctctcgatcgatcgattgatctgagcttcctgatcggtgtgatcgatcgatgctaacgtgcgtgttgcgatcaattgcagctgctggttcagacggcgtcggcggcgagaagctggttagtgcggcgaggaggtcgctggggtcgaggacgccgccggcgccgccggcgccgttaccgaacaagacgaagtcgtacgtgatgccggtgcccggctcgccgccggcggtgttagtatcgttgcctttggttaatcgccatattaatcgatcgatcccaactccgttgtctgcactgccattgctgaacctcgtctgtcgttgttcatcgtctatgtacatatgttgtgtacttgtgtgtcgattcgacttatgttcgtgtgtgtgttgaactctgaagtccttgtaaaaatgtcaccgaggaaagaattctgttccatcgcccttgtttggacagctcaaaaaaaaaaaaaaa

SEQ ID NO: 41878 - DNA, 352 bp, Oryza sativa
  unsure (1)..(352): unsure at all n locations
  Clone ID: PAT_MRT4530_45182C.1
ctctctctctcgccgatagcagcagcagcagcagcagcaatggccgccctngccgccgcatccacngcctttgcngccaagccgcgcctggnngcgctgttcgtccccggccgnnnngttctccgtgtcgtgctccgcgtcgtgcaacatgntggtgcggcggagatggcgcagtcgctggcggtgtcggcaagacgttctccgcggcgctggcgctgtcctcggtgctgctctcttgggtggcgacgtcgcgctccctgtgctgcngcatcgcgggctgacgcgtgaaggagtcaaggcgttcggagggagatagcagtcctaagatgctcagtcgtcgttaagatgtacg

SEQ ID NO: 41879 - DNA, 189 bp, Oryza sativa
  Clone ID: PAT_MRT4530_45183C.1
gtggcagagcaatcttacgggtgttaaaaggtatgaaataaaattgggattagactaaacaactacctgggtcaggggagaagcaacaggcttctttacaagacctgacgcacccgcacgtttactggggcttgcttgctgaccagaagggatttttagacccacgcttgctagccgaaacataccgtt

SEQ ID NO: 41880 - DNA, 1087 bp, Oryza sativa
  Clone ID: PAT_MRT4530_45184C.1
atgcccccaacccaccctgagacgctgagtcagtgtgccgctagtgtgcactggttctacgagcccgagcaccccatgagcggtcatccatcgtgcgggcagtgacagatcccgagttcgcaaatcctccaccagctcggccgctctcctctcctcctccgctcctccccgcctccatctcgccgccacgccaggccatggcgtctcccgcttgtccgtgaggtcagcatgctctgccgctcccgggtcgctggtgagcatgaggaggcagaaggcgaggtccctgaccgtccggtgcgagcagggagccaagggcggcggcggcggcggcggcggtgggctggacgtgtggctcagccgcggcgccatgctcggcttcgtcgccgcctccagtctccactcctgcatcacctcaccaccatggctcagctcctctcctcctccgctcctccccgcctccatctcgccgccacgccagcttgcttctcctcctcttcaggccatggcgtctcccgcttgtccgtgacgtcagcatgctctgccgctcccgggtcgctggtgagcatgaggaggcagaaggcgaggtccctgaccgtccggtgcgagcagggagccaagggcggcggcggcggcggcggcggtgggctggacgtgtggctcagccgcggcgccatgctcggcttcgtcgccgccatcaccgtcgagctgaccaccggcaaaggcgtgctccagaacgtggggctgacgtcgccggtgccgacggtggcgctggcgctcaccggggtggtcggcgtcgccaccgcgttcctcatcttccagtcggcgtcgcaggactgatcggacgatcgccgccgacgacgcagcttcttgctgcttaccaatgggccaatggcgtcactccattggtctccgtgttcttggtgcgttttgcgtgatgcgtgtgtgtggggagatgtgtttcatagggaggggtcaaactgtaccggtgttaaaattatagagatctttcttgttcagaaattactattattatagtactacctctgttttcgtttccaaataaatgacgttgtttagtgcaattttg

SEQ ID NO: 41881 - DNA, 135 bp, Oryza sativa
  Clone ID: PAT_MRT4530_45185C.1
atgatgggggcaagtgtggcgcacaagccggccagaaacaccaacaccacttcagttctcttccctgctttccatgcatggccttgtggcccactcactgacaatgagctcactgcagctagtgacagtccagtt

SEQ ID NO: 41882 - DNA, 390 bp, Oryza sativa
  Clone ID: PAT_MRT4530_45186C.1
acggcacgaggcacacgctgcaccgcgcgcagcctacgagctacgaggagagggagatatggccccccgatggcgaggccgagggcgccgctagctagcggcggatagctagctagctagtagcgcggtggcggcctacctgctacctaactaacctacctacgtcctaccacgcgcaggcctaccgtgccgccgcgctaacgacgggttcgcctacggggacgccgccaccgccgcctaggaaggacaccatacctacgtcgaggcctatacctacgacccgctactgccccgacagccgcgacgcctgggcgcccctacaggctacgccgtacgaccgctacgcccccagggtactccctacatacgtaccacccctataccccctac

SEQ ID NO: 41883 - DNA, 112 bp, Oryza sativa
  Clone ID: PAT_MRT4530_45187C.1
ggaattaagggccgaccacgcgtccggagcgatctttactcgcgcgggatggtgaggcccgggcgacacaaccacctcacttgtgcgaggccaggcaaacacggcaggggtc

SEQ ID NO: 41884 - DNA, 550 bp, Oryza sativa
  Clone ID: PAT_MRT4530_45188C.1
ccggccggggacgtcagttagcttaagtttccatacccaaggtcaaatagctatggagagatgcggtttctgtcgcagttgtataaacattacgcggtacttctatgatgccatggctctatgggacaagtatttaaacgcagcacaagcccatgccatatgtgctcggcatggaagccacagggagcgtagactttatgtgactacaagcagtctgaacctgttcgaaaagcgaggccagaagctgtgcagactgaggtctttgatgaaaacaatggagtattccagtgcacgggtacttatgggattcgacggggtgatgagacacaagggccttgtggcaccatttatacacaagatgctcctggatgcggacctacatatatgcaacgggagagggtctatgggtttaaccttaggcggctgccctgcgacttaacatgtgcaacatggaccttgtcatctcaaggccaacttcctgaggaaaaagttaggcatgagctgcaacatatactctatttatgcggggatacattgtatgcactcgcag

SEQ ID NO: 41885 - DNA, 137 bp, Oryza sativa
  Clone ID: PAT_MRT4530_45189C.1
agaaatcccttgatatggagttgaacaagggctccaatagcaatgccctcgagaaggtgaacggcgccaagggcatcatgctgctaggattggcaagccgagcaaggctttcacctcggagtcccatccaaacatag

SEQ ID NO: 41886 - DNA, 650 bp, Oryza sativa
  Clone ID: PAT_MRT4530_4518C.1
acccctctcagatgaggcatattctgaatatttgcaacttcaggaagttctggacagtttgaatttacagtcagggatgggagatgcttggaattttatctggggttcagataagtacacagctaagaaattttataagctaaactattctgcattgcaacaccccaggcccatgatttggttatggaaaataaaatgtgtcatgaagatcaaaggttttgcctagctcatgttctgtgataggctcagtacaagagatatgttggatagaagacattgtgccaaagaaaatgatgatctcacatgtgttttgtgcaatgcgaattgcagagagacaaggctacatcccttctcctcatgtccattcagtatcaggtgttggcaatacctgggaattgagtggaatcatgatttggagtttttccaaatgatcaccctagcaagactcaagtttgctcagaggggtttcctagaaattttctttttggcagcttggcacatctggaagcaaaggaaaagcttaatatttcagaatgttcaaccctccttccaagcatggagatcttttttttgtcaaagaagttcttctgcttatgtgcagaatgaaagatcctttaaagcaaactgtttttaattggttacaaacctta

SEQ ID NO: 41887 - DNA, 378 bp, Oryza sativa
  Clone ID: PAT_MRT4530_45190C.1
ggtgtttttttttttttttttttttttttttttttttttttttttttttttttttttgaaaaaagaggtatgtcaccctaaataagaatttttgttccccaaagccaggttttttggaagcatggtcagacctaccaaaaatgcccaagcttattaggggcgctgggggtcccccattgacaaacattcagatcaactggtggggggggggccgcccaaaaaagggaattcaaacaactttttttgtactatcagacaactttaataacaaggatgatgttggggaacccccctctttggggtactaacccaaacttttgcacaaaaaggggcggggcccctggaggggttttgcccccaaacccaaagaagcccgaa

SEQ ID NO: 41888 - DNA, 393 bp, Oryza sativa
  Clone ID: PAT_MRT4530_45191C.1
gagcaaagaacgagagagcttggggagctgcatagatagccccctacatgatggcgtcggcggccacgaccgtcgctaccttcgagggtctcatgtacaccgtcagcatgcccgtcgcccggcgctccggcaactgcagcttcggctacatctgcaatggcggcaggatcaggtgcatgcacgtgtggccgcttgagggcatcaagaagggcgagaccctgtcctacatgccaccgttcaccgtggaggacctcctgaagcagatcgagtacctgctccggtccaagggggtgccctagctggagttcagcatggtcggattcgtggaccgtgagaaccacagatccaacggatactacgatggcaggtactggaccatgtggtagctgccat

SEQ ID NO: 41889 - DNA, 369 bp, Oryza sativa
  Clone ID: PAT_MRT4530_45192C.1
atgaactccttcgcggcggaggcgacggcggcagggtcgggggagacgagcgtccgagggagggaaagcgtggcggtgaaggcgaggcgggagaggttggagacaagtgccgcgagggcgcccgagggcggcgaggtcgaggcggacgaagtcgaggaggccgagggctccgagggcggcgtcgtgggtggcgggcacgtcgacgaggcagaggtgcgggagaggcttgcagtgaaccatgcgggcggcgcgctccgggatgcggtcaaacaccttgtgcggcagcgcgcggccatgagtttaggacgttttggatcaatgaaggtttccagaattaccgtcatagaatacaatttgctcttcttatga

SEQ ID NO: 41890 - DNA, 706 bp, Oryza sativa
  Clone ID: PAT_MRT4530_45193C.1
tcaccacgtacacgaggacgatggatcgacggcactggtggaggcggcggcctcaagtccgcaaggggggtgcgctggtggagatgatgcaagcatgcagcggcaacgcgacgctctagagcctcctgctccgcctgtaggagcacgagcgtccatagagcagacacgggatgcagtgtcgtcgtggtcgactctgttgtagtggcggaggatttggttcctagcgccgcattcgggtgtcacgccggcgatggctgtgctgctgcagccggtttgctggagtaacgagacgagctgcctcggcaagcgtccgagacagagcccgaggaggaggctcccaagcgtgtttgcgggtttagcggcgatgatgacggcggaggatggcatgtcgttggacaagcagctacgtcggtggtggtggcaggacgccggcctacccgaacatctcctgaagggctccctcttccaccaagtcgtggccgctgcagacctgctagcccccgtcctgaagcagtgctcatatcactgtgcggtgctccccaacctctgccacaaccttcctcaccacgcctctactcagcttccgcgaagtggtgatggcagcagcagtggtgtgggggcgaagggtgttccaacattggtggcgtgttgccaccgtggtggtggagaggtgggggtcaggttaggaggcaccgtgcctaactag

SEQ ID NO: 41891 - DNA, 396 bp, Oryza sativa
  Clone ID: PAT_MRT4530_45194C.1
cccacgcgtccgatccgatacagatctgcttacgtagaatttttacataaagaatcagctgagacgtgctctttcattgaatggaacatcattcatggcacgcatcctcaaggtactatggtcaatgaccaagctttgtccttttactttctactccctgcatcccaaaatattgtaacctggtactggattattggacacaacttagaactacaaatctggatagagcccatgtccagattcgtaatactaggttgtgtctaatctagtacttaggtagctatattttgggacggagggagtatatctctctactgaaaggggagtttgaatatagagcacaatcctgctaaccaaaattcagagcttaatccaccttatgtttctgaattagca

SEQ ID NO: 41892 - DNA, 211 bp, Oryza sativa
  Clone ID: PAT_MRT4530_45195C.1
cacactctttcctctgtcgcatctggactgtctgcgacaaccttaagctgcccagcagatgtaatcaaaactaggatgatgaaccagggcatggatgcaaaagttctatacaggaattcttatgattgtttggtcaacgactgtcaaacatgaggggttgacagcattgtggaagggattcttacctacatgggccaggcttgttccatgg

SEQ ID NO: 41893 - DNA, 3246 bp, Oryza sativa
  Clone ID: PAT_MRT4530_45196C.1
atggcccctcataaacctgctcttgctttggccattggtcctgatctggggaagattggcagagatcacaccggatatctcggcgcttcacttatcaatgagacggagttgacgaagctggttttggctagggtcgtggccgaaggacaagccttcgctcctggcaaggtggtggtgaagcttggggacaaccaaaccgtgatacttcggctcttcgagatcgaattgccccaacttagcccgtgcgctctggttcgggtcgccatcttcgactgggcatgtcgaaccgcgggtttcgagccgaccgctgagctttttggggcgatcttttatgttattgtcaactcgaagacggtggtcaccctggccggcacctggaggacggtcttcgggagcacaaactttaatttccgccctgagctctccgatttgtggcccgtgaatgcatcgatgcctaagtgggatcgccattggatgccgaaaaggttttacaacagcattccttttgaggccgcatcggatgcagccaaggccatgaagtggcagcgtagggccatcattcttcccctttcatggacatggcaagtcgaagttgacaaggaggaggaggcggatggcttgccgaggctggtgctccctgagggggtgaactatgatgccgaaccatctaggaagggcaagcgggcaagagggaaagctgcaccgcggaaacacagaccggcatcctttgctgactctgatgctgacgaggaggaggccgaaggcgaagaagagggggaggaggatgccgtggatgagacgggtgcttctgcttctgccgaaggcgtcgtggaagcggcctttgtggcattcgaaccccctcttcccggcccccgcctttcgccacttgaacccccatggggaaaacaggcagcgactgagaccttgggttcggacaactcgctgtccgccccccgctttgtctcgtctaacttcgagacccgggcggagcttgttccttttgtgaagggggtgttgcaccttatttcgccggtgggcggcctcgttccttttacggagctgaacgagtttgatgaaggatgcactgcggcaaaagcctgctcgttcggatcaaaagacttaggcttgagctcaagaggaaaaaaaagggaaactcagggccttgtggactactataatgattccgagagcaagatgaaggctcctcgccaggaattggagtcagagaggaccgccactaaggatgttaccgacgaggcgaagaccgcctgccataccctccggttggcgctaactgatttgggggccaaggctgaggttaaacgtttctatgatgctggttttattcggccttgccgatatgctgagtgggttttcaacatagttccagttatcaagaaaaacagcaaagtcagggtgtgcattgatttccgagacttaaacaaggctacacaaaaggatgagcatccaatgccggttgccaatcaattggttgatgctgcttcagggcacaagatattaagttttatggacggtaatgctggttataatcagatttttatggcagaagaagacattcataagatagcttttagatgtcctggtgcaatcggcttgtttgagtgggttatgatgacttttggcctaaaaagtgttggagctacatatcaacgggctatgaactacatatatcatgatctaatcggctggctagttgaagtctatattgatgatgtggttgttaagtcaaaggaaatagaggaccgcatagccgatttgaggaaggtttttgagagaactaggaagtatagcctgaagatgaaaccgacaaagtgtgcttttggcgtatcggctggccagtttttgggatttcttgtttatgaaagggggattgagataactcagaggaatgttaatgcaataaaaaagattcaacctccggaggacaagacagaattgcaggagatgatcggcaagataaattttgttagaagattatatttatcggccggtgagaagtcaatcggctcggtcttgattcaagagcttgaggggaaagaaaaagttgtgttctatttgagtcgtcggcttttggatgtagaaacaaagtattctcctgtggaaaagttgtgtttgtgcttatatttctcctgcacgaagttaaggcattatctattgtccaatgaatgcactgtaatatgcaaagccgatgtggttaagtacatgttatcggctctgaatctgaaaggaagggttggaaagtggatatttgctttgacgaaatttgatcttcggcatgagtcatcgaaggcgattaaggggcaggctatagccgattttattgttgatcatcgtgatgactcaatcggctcggtcgaaattgtgccttggactttgttttttgatggatcggtatgcactcatgggtgtggtatcggcttggttataatttctcctcgtggggcaagttttgagtttgcctatactgtcaagccctatgcaactaataatcaggctgagtatgaagcggtcctcaaggggttacaattgcttaaggaggttgaagccgatgctgttgaaattatgggtgattctttgttggtaatcagtcaattggccggggaatatgagtgcaagaatgatacattaatggtttacaatgaaaagtgccgagaattgatgggtgaatttctgctagtaactttgaagcatgtatctcgagaacaaaatgtcgaagctaatgatttggcccaagaggcatggggatataggccgatgataaaggatgtcaaagtagaagttgccgcaataagagccgataattggaggtatgaggtgcatcattatttacagaatccatctcaatcggcttctcggaaattacgctatgaggctttgaagtataccttattggatgatgaactatattatcggacgattgattgggtgttgcttaaatgtttgagtgccgatcaagctaaggttgcaataggcgaggagtttgttcaatttgccgataacatgggtatcaaattgctgaattcttcgccatattatgcacaagccaatgggcaagccgaggcatctaacaagaatttgattatactaattaagaggaagatttccgattatccttggcaatggcatactagattggccgaagcattgtggtcctatcggatggcttgtcatagttcgacccaagttcctccttataagcttgtttatggacatgaggctgtttaa

SEQ ID NO: 41894 - DNA, 549 bp, Oryza sativa
  Clone ID: PAT_MRT4530_45197C.1
atgggggttcaagtggcgaaaggcgggggccgggaagagggggttcgaatgccacaaaggccgcttccacgacgccttcggcagaagcagaagcacctgcccggagctcccacccacctcaccggcagaaccagctgcggtggcggcggccggcagactcgggcttcacccggctggcgaagtggggctccttctgcgaagaggggacgagctcgaagctgcccccgcctcgacgtgctcatggcctgggtcgtgtctgggggagaacagatattcacccgtctcatccacggcatcctcctccccctcttcttcgccttcggcctcctcctcgtcagcatcagagtcagcaaaggatgccggtctgtgtttccgcggtgcagctttccctcttgcccgcttgcccttcctagatggttcggcatcatctgcgtcgatgacgacgaccttgataggcctgaggcagtgaaagcactgtcgaaggagcaccagcctcggcaagccatccgcctcctcctccttgtcaacttcgacttgccatgtccatga

SEQ ID NO: 41895 - DNA, 801 bp, Oryza sativa
  Clone ID: PAT_MRT4530_45198C.1
atgcctgaacttagttattcctatgattctgtttcattgaaccttcctgaagaagaaacattttgcagcgctctcaccaatagtctggagggtatgcttcttggaagatttttggttggaacagggatgggattaggtccaccagtagcttcactgtacataacagaggtttctcctccttcagtgaggggcacatatgggagctttgttcagattgcaacctgccttggaatcgtagtatctctcctaattggtacacctgtgaaggatattgatagatggtggagggtgtgtttctgggttgcagctgttccagcaactttacaagctcttggaatggagttctgtgctgagagcccccagtggctgtataagtgtggaagaacgactgaagcagagatacaatttgaaaaacttctaggtcctcttcatgttaagtctgctatggcagaactctcccgatctgaaagaggcgatgatggagaaaatgtgaagtattcggaattgttttatggtcgcaactttaatggctcaattgtagctatgcttctaatggacaaactaggaaggaaagtacttctttcagggagcttccttggcatggcctttgcaatgggacttcaggctgttggagcaaatcgtcaccaccttggttctgcaagcgtatatctttcagttggtggcatgctattaccatccatttcacatcaacccaaaggatatcatttctcttatacctcattagagttgtttcattttgattcccctgacttcaccctcagcgttgttgtgcatccttag

SEQ ID NO: 41896 - DNA, 397 bp, Oryza sativa
  unsure (1)..(397): unsure at all n locations
  Clone ID: PAT_MRT4530_45199C.1
gacccagcgnccgggaaaaaangggggaggaccgcgactgcaggacaacacaaagcaaacagcggccggaggcaangaagaaagaacgcaaaggccagagagggacagccaangaaaggaggacaaagacaaggccaggaggaaggggaggaccgacaaaccagcaaggaacaaaactngaagggaacgagaaggggggcagaccaaaaagganaccgagcgccagncgcacaagcaaggaaggagggnggagaagcaaaggcgnacatgccagggacggagcaggaccacggacaggggaaacnaggagacaccagaagggngggaacngcnngaagggcagacaaacccgggagcaagcggaaaaaggaagcangagaaaacacggaaagaaacg

SEQ ID NO: 41897 - DNA, 372 bp, Oryza sativa
  Clone ID: PAT_MRT4530_4519C.1
atgtttaaaagcggcgttcgggccaggacgttccactgccacagacgcgacggagaccatggctacgagcgtaccccgtggcacgaggacgcatgcatggatcggacgatttgtcaggataggttagataggtttaggaggcatcaggaatcaacgagatgtaaaaatacgtcattgaggatattgcctatactcgcagttagcgtggacacacggccactcacggtcatagaagcagggatccgaatcctctgcggtaatgcagaagatccggattctaagaagcagcacattacccataggcgatcaaccgggaaatatttgccgtgggctgaggtggttcatgtgaccgtgaacatgcgagaggtgtac

SEQ ID NO: 41898 - DNA, 548 bp, Oryza sativa
  unsure (1)..(548): unsure at all n locations
  Clone ID: PAT_MRT4530_451C.1
taaccagaattcgaataataaaagccattaaaccaccccgcgaggtaatactaccataccataccatccatgcatccctacatgcatacntcatccatcnatcgatncaatcaatcaatcatcatcatcgatcatcaatcaatcaatcatcatcatcatcgtcatcgtcatcatcgtcatcatcataataatcgtaagtactcatngtantatgagaagtancgaccacncgttttagatactcacctatctaaactagacagtgagtaatcaataagaacgaacgaacatagagagcataacatgcacgcgtgcacagcctgttctacctgatgatgcaaattgttataccgctcacaattccacacaacgtacgagccggaaacataaagtgtaaagcctggggtgcccactgagtgagctcactcacattaattgcgttgcgctcactgccctctttccagtcgggaaacctctcatgccagctgtatgtacntgaaatcctgctcatacagcaacagagggtacatacgtggctgggntctttg

SEQ ID NO: 41899 - DNA, 2478 bp, Oryza sativa
  Clone ID: PAT_MRT4530_45200C.1
ccccgtctcaggcccctccaaaggagtcaggcgccgagggcccccacggcctgtccaagcaccacagccccacgacacgagcgcatcccccgccatctccgctccgctcctctcctctctccgtgctacgccaccaaacccactccccccgagatagagagagagagagagagagagagatccacagcctcacagcatcaaatcacctcccctttctcccagatccaagctgccgctttcaccaccccctcgtctcaccccctcctgctgctgcctgcgtagcgttgggtcgcgttgtctctttctccggtcagcgccgatgcggtggaagcttaagtcgtcggcgtacaagcgcgtgccgtccagggacgccgccatggatctcgacgtcgagacgccagcgaaaatggcggacggcggggccccgtcgtggcgcatgtcgctgccgcacgtgtgcgtcgccacgctcacctccttcctcttcggctaccactccggggtcgtgaacgagccgctcgagagcatctccaccgacctcggcttcgccgggaacaccctcgccgaaggccttgtggtgagcatctgcctgggtggtgcgtttgttgggtgcctgttcagtggatccatcgctgacggaatcggcaggcgtcgcgcgtttcagctcagtgcgctgcccatgatcatcggcgctgccgtaagcgctctcaccaatagtctggagggtatgcttcttggaagatttttggttggaacagggatgggattaggtccaccagtagcttcactgtacataacagaggtttctcctccttcagtgaggggcacatatgggagctttgttcagattgcaacctgccttggaatcgtagtatctctcctaattggtacacctgtgaaggatattgatagatggtggagggtgtgtttctgggttgcagctgttccagcaactttacaagctcttggaatggagttctgtgctgagagcccccagtggctgtataagtgtggaagaacgactgaagcagagatacaatttgaaaaacttctaggtcctcttcatgttaagtctgctatggcagaactctcccgatctgaaagaggcgatgatggagaaaatgtgaagtattcggaattgttttatggtcgcaactttaatgttgtttttattggcacaacgctctttgctttacaacagttatccggcataaattctgtgttctatttctcatcaactgtgttcagaagtgtgggtgtgccccctaaccttgcgaacatatgcatggggatagcaaatttatcaggctcaattgtagctatgcttctaatggacaaactaggaaggaaagtacttctttcagggagcttccttggcatggcctttgcaatgggacttcaggctgttggagcaaatcgtcaccaccttggttctgcaagcgtatatctttcagttggtggcatgctattgtttgtcttgacattttcgttaggagcaggtccagtgccaggacttcttttgcctgagattttcccaaacaaaatacgggccaaggctatggctctgtgcatgtccgtgcattgggtggtaaatttttttgtcagtttgttgttcttgcggcttctggagcaacttggtccacaagttctgtacacaatgttttcctcagcttgtgtggtagcagcaatatttgtgcggcgccatgtggttgaaacaaagggaaagactttgcaagagatagaagtttcgcttctacaaacacaataaagatttcatcagcgagtttgaggcaacaacaacctacatgattagcatctgacactatacttgttgctgaatacctgctgggaaagtctaccgtgaaagttgatcactgaaccaagccaacataccacggacaggcagcgccctacactggaccagggaagtacccagacatgcacctgtgaccagtaagggcgacctagctcgtgcataaaccatccatgtagtgaggttgcatctgtatagttggtcttctgctagatgtatctggtaatctgtgttgtcttcatcatttgtcatttgtacactgtcagtatggagaaaaaaagacgggaagtgtggttactgatggccatagtttgaaccgtggatacgttttttttactgtttaaagaggaataacagcactggctctgccagctacatgaaaataaagtgcgttctgcctgagctaaaaaaaaaaaaaaaaaaaaaaaaaagagaaaagggggcgggccccctcctgcaaaaaaaaaaaaaaaaaaaaaaaaaaggggcgggcttctcgcgatctaaaactggggcacctcagtaccattaccacttcttggcggggtcttgtaatgagttttaacagtataggggttcggaagttaaaaataagctcaaaaatcattatatgtgacatgtgaaactttgggggaaaaaaaaaaaaaaaaaattttcttttatatttt

SEQ ID NO: 41900 - DNA, 384 bp, Oryza sativa
  unsure (1)..(384): unsure at all n locations
  Clone ID: PAT_MRT4530_45201C.1
attaccactttacccatagtagttgatgtgatattataaatagatttgatccattggattaagaaaggaaaaagtacgaaataccccccgaactatcgcggtcgttcgaattaccccctaaaccacaaaaccggacattcttgaccctcaactatgcaaaccggacgaattacccccctcgacccaatccgcggggggtttgggctacttgggggacacctgacagtccactcagtattctttttattaaaaaaaatgtggggcccatctggcatactcctcttccattcttccactgtctctctcttctctgtcaccctcnaagaaacccccccgggtggcgctgaaaacaaagggagtgggaacccccccccttccttagcc

SEQ ID NO: 41901 - DNA, 197 bp, Oryza sativa
  Clone ID: PAT_MRT4530_45202C.1
actcaaaaataattatgatcgagaaaaaaaaattatgtacaggttcataaacacatacctaccggcaggatacaaacgcaaatgaaaactaagggacacaggacgcgtttaactttgatcaatatctgatcaacaagcggggtcatgcgtacacctcggaacatttccacttgtggataggggcaggcgaaactttt

SEQ ID NO: 41902 - DNA, 1378 bp, Oryza sativa
  Clone ID: PAT_MRT4530_45203C.1
atctcctcctcccaaatcaacccacacccgtgggatccactccgctgctcttcggatggcgccgcccagctgcttgctccgcgttggctggctaccagcggctctgtgcgcgctcgcgctcgcgctggcgcccgcctcggacgccacgtcggcgtcgctggtgggcatcaactacggccgcgtggggagcaacctcccgccgccgcaggccgtgctgccgctgctcgagggcctcggcattggccgcgtgcggctctacgacgccgaccctgctgtgctgcacgccttcgccaagaccggggtcgagctcttcgtcggcgtgcccgaccagtccctggccgggctcgctgacccgggtggcgcggattcgtggctcaggtccaacgtcatgcccttcctgccggacacaaagatcgccgcgctcaccgtcggcaacgaggtgctcacgggcaacaactccgctgtcacgcgcgctcttctcccggcgatgcagtccctgcacggcgcgctcgccaagctcggcctcgacaagcagatcgccgtcaccacggcgcacaacctcggcgtgctcggcacgtcctatccgccctcgtcgggtgccttccgcagggacctcctcccgtacatctgccccatcctcgactaccacgcgaggaccggctcgccgttcctggtgaacgcctacccttacttcgcctactccggcgaccccaagggcatccatctggagtacgcgctgctcgaggcgggctacgccggcgtcccggacccaaactccgggctgcgctacccaaacctcctcgtcgcgcaggtggacgccgtctaccacgccatcgcggcggcgaacaccgcggcggctcaggtggtcgaggtgcggatctccgagaccgggtggccctcctccggggacccgggcgagacggccgcgacgccgcagaacgccgcgaggtacaacagcaacgcgatgcggctggtggcggaggggaagggcacgccgctgaagcccacggtggcgatgcgcgcgtacgtgttcgcgctgttcaacgagaacttgaagcccgggctggcgtccgagcgcaactacggcctcttcaagcccgacggcacgccggtgtacgagctctcctacaagctcccgcgcgacaactccacgttcggtggcgccggcaactccggttggagattccccggaggtggtggcggcaatgtcagcggcggttacgacaacaacggagttaacagcggctactacgacatctcggcggcatcgccggattccgcggtgagatctactcttcctccatctcgcttgttcgtgcctgcattgcatggttcaggcattgacttgccggtagtattgtttctgaaaaggagatga

SEQ ID NO: 41903 - DNA, 698 bp, Oryza sativa
  Clone ID: PAT_MRT4530_45204C.1
atggagctccaccaccctgccgtctccaactcctccccaccgcaccgccggctcggagcttcaccaccgtgccgtctactccggctcctccccacggatgagaccgagggtagaaggagaaaatgcatgtgccggaacaaggaccatggctcacagctccacgaaaaggagcggaggagcacagggaggcgcgtgcctcgcagaggagtcacgaccttctgctgggagatggctccggccggaaaagcgacgtttgctcgatggggtgaacagggctatgctccagggacatcccgctatttaaaacattgggtccctgccgtccgtgtccgtttgttggaggagaaggacgacattgagggcgacgccagaggtagacaatggagtcgggggcgatgccactggcaaagggccgcagcatcagcgaaggacagcgccgaggacacggatgtagttttcgccatgtgtggtcacaattttcttcatgcctactgccaggcaagtgatctgagggcgcaggcgtgtggggatgttgtcaagccgcgcatttggagcaacctggcggacgcttttcttttcgacttgctgatgggaactggatgctgctgggcggtctgcattaactatgaaacttcggatggtttcaccggttctttggcatatcaagcgaagcacaccgtcaataccgccgactgcca

SEQ ID NO: 41904 - DNA, 718 bp, Oryza sativa
  Clone ID: PAT_MRT4530_45205C.1
ctagtggatccccgggctgcaggttttttttaagggtagaaaaaatctgagtgatttttggttagaaatcatccgacaaagggatagacagttccagtcagaaaaataaaaagaaaatgaaagaaatgaaggcctcgaagcctcgtcgtcatcgctgcttgacggagaccgccgctcgccgttcttgattcttcccctggtgccccgccgttctcggctcttccccctggcgcctcgccgttcaccaccgtcgtcagagtttgaggccgctgaatccagatcctttggagccatggccaccggatctggcccgtcgcaccttgtgaaggacagaggtgcagtggtggctagcgaggaacacatcaccggcaatagcaagaccgaggggaagacaatggaggcggcagcaacatcttccatcaagtgccgagatccgggtattctcgtcaagcccttcttcgtcccgtcctcttcttcctcctggatctgtccgagctcgagcacaaggctgctagctagttggatctggcgatgtggagctgatgggcgccagtcggagccgttgaagaagaggggaatcgacagagacgacggcgaccgagcgacgaccaatggggtgggcgagcgaacaaatgagacgagggaggcgaggggatgctttgacccctccgcatcgcctgcatccactcatcccacgcttgcacccccgcgtgtatga

SEQ ID NO: 41905 - DNA, 876 bp, Oryza sativa
  Clone ID: PAT_MRT4530_45206C.1
atgtggggcctcgtcgacgccaagctaatccgcgtctccaccgcgatgcaccgcttcgcctccgcctcctccctcccgccgccggcgccggcgacggcggcggccgcggcggcgcaggctgcggctctcaggttcggctccgccgccaccactcgtgtcccccgagcgctagccctgaccgcctccacttgcccatggcaccgccgacacctctgctcctcctcctcctcctcctcgtcggcggcggctgcggctgctacggcggcggcggtggaggaggcgcggcaggggcggaagcagctgggcgcgacgacgcagctctacgagtacctcctcgccaacgtccgcgagcacccggttctcaaggagcttcgtgaggagacggcggccatgagagggagccaaatgcaggtttcacctgcgcaggctcagcttctagcaatgcttgcgcaaattcttggggctcaacgatgcattgaagtcggagtctatacaggatattcgtcgttagctgtagcactagctcttcctgaatcaggtcgtttggttgcttgtgagagggatgaaagatgcctagaagttgccaagaaatactatcagcgctctggtgttgcacacaaggttgatgtcaaacatgctttagctgcggattccctaaagttactaattgatggtggtgaggttaacagttatgactttgcattcgttgatgcagacaagagaatgtatgaggagtattatgaacttctacttaagctagtaagagttggtggtttgattgtaatagacaatgtcctttggtatggtagagttgctgatccactagtgccaatcggggacgggatgacaatttgtcggaagctagtagatacctga

SEQ ID NO: 41906 - DNA, 354 bp, Oryza sativa
  Clone ID: PAT_MRT4530_45207C.1
gctctcatggcttagaaattctcctgcttgttgactgccaataagggtttcctcggggtttcagccgatgaattatctggacgttgcattggcttacaaggattgcatccaactggtttctactggatattattattgttatattatatcattatcagtcgatcgcctttatttatatcaagtgtcagattctacatcaaacacataaccgatagctcaaaaccctatcgctatcggctagatcaaactgactagcacgcctgcacctcaccaagatttggacctgcactagagctaagcagatctcccaagccagcgtatgtttttcacgtcaacaactatacaaaggaaaaa

SEQ ID NO: 41907 - DNA, 138 bp, Oryza sativa
  Clone ID: PAT_MRT4530_45208C.1
atggcagcgacgcagccgggagcgggtgtgaacacggagttagagcttaaccaaacagtttcaactccaactaaaataggagtgaaactgggtgcagcgctccaacaaaacgctaaagatatggaaatgagtttatga

SEQ ID NO: 41908 - DNA, 1507 bp, Oryza sativa
  Clone ID: PAT_MRT4530_45209C.1
tcctgtcgcgatacgacttgattcggcctctctctctccgcgcgcgcagcagcagcagccgccgatggacctccccctggtggacctcgcgccgtacctcgaccgcgccgtcgccgggggcggcgcggcgggggaggaggcggtgcgcgcgctgtgcgcgacggtgagcgccagcctgcgggacacgggggcgctgctggtgaaggacccgcgctgccccgccgccgacaacgaccgcttcctcgacgtcgtcgagcactacttcgcccgatccgccgactccaagtgcctccaggagcgccccaacctccactatcaggttggtgtgacacctgaaggcgtggaggtacctcgcagtcttgtcgacaaggagatgcaagacaagatcaagagtatgcctgaggagtttcagcccgccactcctaagggtccagacccgaaatggcggtatatgtggagagtgggtcctcgcccagcgaatacccgttttaaggagctgaattcggaacctgttatccctgatggattgcctgaatggaaagagaccatggattcctggggttctaaaatgatttctgcaattgaggttgttgctgagatggctgcagttggatttggattgccaaaggatgcatttacctctttgatgaaggagggaccacacctcctagcaccaactggaagtgaccttgagcggcatggttctgagggcactgtttttgctgggttccattatgatctcaatttcctgaccatacatggtcgaagtagatttccaggcctgaacatctggctaaggaacggcaaaaagatggaagttaaggtccctgttggctgtcttctaattcaatcagggaaacagctggaatggcttactggtggggagtgtttagctggaatgcatgaggtagtggtaaccaagagaacactagaggcaatagcattagcaagagagcaaaatagaagcttgtggagggtttcatcaaccctgtttgcacacattgcttctgatgcaacccttaagccattgggccactttgctgaagcatccgatgctcatagttatccaccaatctgtgctggcgactacgtcgaacaggaactatcagtaatcaatctgaaaggaaagaatggattctagacgttatgcagatttctcgttaaccttacaattcatatgatcagcaaacggaacaacagtccaggctgatatgtatcttcattgctggaggctcacatgctgaaactgttgggttgttccctgcacagcccgtacatgtccatgcttcaaacctcttgttaagatagattgtctctcttcaaatgtactaaactggtatcaattgtgcaaataaaatatttactctttaacttccgaacggggtgttggacgggcctcacctgtgggtgatccgttttgggatgtgttctttgtaattgtaaatatttcttcttagtgaaatgaagcacaattctccagtgcatttgggaagaaaaaaaaaaaaaa

SEQ ID NO: 41909 - DNA, 393 bp, Oryza sativa
  Clone ID: PAT_MRT4530_4520C.1
atgtcgacgacaactagtgggtcctctagggcacgtactcctaggacagggaacaaaatccctaaggaacgggtcatagggaggcagaaatttagtattatgcaagatgacatcaagctcgtgccggccgcagagaaggacattgcttggctaacgttcaaggatctattcgacctctacagtctccgagcggcggccatgggacagggaagctccggcccagtctcgtgggatgctgctctagccgtctcctacatcgccgacgtcgccgcaacctgcaagcacatggaggccggcgggtgcaagctgcacctcctgacagcgttgcgggactgcgtggacaagccgcgctgggacgacgacgacgacgacagcgagagtgtcgaaacatga

SEQ ID NO: 41910 - DNA, 782 bp, Oryza sativa
  Clone ID: PAT_MRT4530_45210C.1
aactagtggatccccgggctgcaggctttgctgtatatctgtggatagtagttaaatgccaacagaatcgagaccatatcctaattatattctgttgtttatccatcttccttgacagttcttgcattgtatgtgtcagctcatgtgtgaagtgttgtggttacaaattagtttttgacttttatctctacttaaatttgatgtttcatagaaataaaggcctaactaaaaagttgaagcaatataagatacaaatcggtcaagttatggactataatgatatatacgatcgtgaacttcgattttatcaatgtgttagcattccaaacaacacattagcattgctttcttgcgttgagcgcatgcgaggctttctcccggttgggccaatgtctcccgattttgggctaacaagtggtatcaaagccaaacccacaatctctagtgcttgtgcacactcagggtggagtaagcccaaagcccagtggaccagtgcttgtgcacactcagggtggagtaagcccaaaacccagtggaccacgggtgtgaggcccgagacacggctcttcgtcggccgttgcgacaagtgcatgttccttccttggcttgcggcaatccttggcaaaattcccacgtatgccacagttgtagcacttccctatcttcctgtccgacatgcgcccgttgtcatcggaattatcacttgcatcgtcgtcattgttgtcattgcggccacgaacgaatgccactgtgaccaccaccagccttgtggttcttcttct

SEQ ID NO: 41911 - DNA, 621 bp, Oryza sativa
  Clone ID: PAT_MRT4530_45211C.1
catctcatcgtgtatctatttcaagtcacagcagagtgctccgacaaaaaaacaagattgtttgtaaaccatgcaagcgggcctttcttttcttcgttatgtatagagtctaccctaaagtagtttaattaaattaaaatacaaggtgatgataacaaatttcacagaaccatagaatcctgactcgggccatataattctgaatttaacttataacatcagtgcaaagcattgccagctgccattaacttcaaaaaccagcgcagcctcgcgacgctaaatgaatccatacaaaccctgaatcttgcaagctgcattagaaaacctaacgatatcgaggtaatgcctgcgcttactcctttggattttcatgagatctgatcgtcttctgaatcagagggccgaatccacaccggtgactgcaaccccgtagatgttccattcgcgggacttttcccctttctagtttttgataaagctttctccaggtccgattgcttcaaggatcttgttttatctgcttgaccttcatctttctgagcttcacacagcttcctgatagggtagactcctgcttgcttgcacagttctagaatgtctgatccagtaaatccctcgcat

SEQ ID NO: 41912 - DNA, 1753 bp, Oryza sativa
  unsure (1)..(1753): unsure at all n locations
  Clone ID: PAT_MRT4530_45212C.1
gnaattgtaatacggctccctcttgggcgtttcgggcaccgggcccccccgcgcggcttctttttttcttgttgtttgggggaaaaccatgcaagcgggcctttcttttcttcgttatgtatagagtctaccctaaagtagtttaattaaattaaaatacaaggtgatgataacaaatttcacagaaccatagaatcctgactcgggccatataattctgaatttaacttataacatcagtgcaaagcattgccagctgccattaacttcaaaaaccagcgcagcctcgcgacgctaaatgaatccatacaaaccctgaatcttgcaagctgcattagaaaacctaacgatatcgaggtaatgcctgcgcttactcctttggattttcatgagatctagcaaaaggattagattaaggtgaagatggctcttgcggttccgactgactgttctgaactattcgagacatcagcttagatatctcaaaaattgcgctctgtacctgatcgtcttctgaatcagagggccgaatccacaccggtgactgcaaccccgtagatgttccattcgcggcccttttcccctttctagacgttgataaagctttctccagatccgattgcctcaagggtcttggtttatctgcttttcgcccatctttctcattgttcaacagctccctgatagggtagaatgctgcttgcttgcacagttctagaatgtctgatccagtaaatccctcgcatagaccggcgatgtaatcgtaattaatgttaggctcgacattttctcccttcaatacaaccctaagtatcttgcttctttcactctgaacaggaatcccaatttcaaatatctgagtaaagcgcctgaggatagcctcatctagctcagagggtctgttagtagcagcaaggaccataacacgggcattttgatcagtggtgaagccatcccagagggacatgaactcagtcttcatattagtcatagcttcgtggtccgttgtccgtcgctggcccaagaaactatcgacctcgtcgataaagataatagccggctgcagcttgtgtgcgagactaaatacagcagacacgagcttctgggcgtcgccgaaccacttgctcatgaggttggaaatcctgacattgatgaagacggcgcctgactccttggcgatggccttggcgagcatggtcttgccggtgccgggggggccgtagaggaggacgcccttctgcgggctgaggagcttgccgaaggtgaagagctcggggcggcggagggggaggatgacgagctcgtagagcgcctgcttgacgtggtcgaggccgccgatggaatcgaactcgacgtcgatgtggtcggggttgatgacatcgcaagcaatcacatcctcgtagggggtggtggagacgagggggcggccgaggcgcttggcgatctccttcttgtgctggagggccttctgggaggcggcgcggttggggtcgagctggcggaggccggcgaagaggacgaggcagctgagggcggcgctggcggcgtagagcaccagctcctgcacgaaccgcgacgactccgacgacctcatccaatccaatccaacccaatccaatccaatctgcgggcggcggccggcggcgagggagggaggagggagaggttctccccccacacaccggatgatctgcggccgccggagccggagcgggaggaggggaatcgacccctcgtgccgattcctgcagcc

SEQ ID NO: 41913 - DNA, 108 bp, Oryza sativa
  Clone ID: PAT_MRT4530_45213C.1
gtcccgacaaccaccgtgagctcaaatgaagcttctgtgctggcgtctcgctccacgacggcgcacaagagcgacccgtacacaagatcattggaatgtgcttgctag

SEQ ID NO: 41914 - DNA, 924 bp, Oryza sativa
  Clone ID: PAT_MRT4530_45214C.1
atggccatagttctcttcgtcggcgttcttctgacctgcttcctgcttctttcctctgcatttggcaatggaagcggcttgcaagcaggcaaatgtgttggtgcaatgggaggaacagcggtctgcaaagagctcgttaacggatactacatcattcatgagaagggtaatgagaggactgggtacataacaaacacatatgaagtgcgctatggatttatagcaacgatggatgtttatggcttctcgttaaccccaggccaattggtcaaaccaggtgatgaacgccctgtttttgacctctattgcaagacgtcggatcttagctctccgttaacagatccctcccatatggacgaagactgccctggttttcgacccgagaggggcgcatacatacgtcctggcgacccaatccctggtatctcacaaccaaatggagccaagcaatacatcacacttaaagtattcaaggatatggcatcaggggattggttggtgcactatgggtttaataacaagcatcctgaactcgtcgggcgcatccctttgtcattcttcaaaagtctatcttactctgccatcaatatgtggtttggaggcattgtagttactaatgtaacttttcaaccaacacctcttccacctcctatgggcaatggttacatggcagttgacggtggcaatatggcagtatccacgaaaaaccttcagttcattgatgggcaaggacgagcttggtcggcagagaatgatttgattggcttctccaccaatgagaatatctacaccttcacatctattgttggtgaccagtttttctacggtggcccctttcggcaggctagcttgggagccatattgcgcactcatgtcctttactcctttttgcaaatgtttttcttttactatcttttgtcgtag

SEQ ID NO: 41915 - DNA, 297 bp, Oryza sativa
  Clone ID: PAT_MRT4530_45215C.1
aaaaacttaacaccatccaaagagaaatcattgggattacagggacatcagttaaataccaaaaattggatacttgaacaaaaaacttctagggaacaaacaaaaaaggggacccatgagttttaaaaaaagagacgggggcaaaggggcgatctttgaaaactactttttgggaggagtttggcccccgctttttgcccaaaccaacaaaaggggggacaaaacggcgtgttggactggaaccgcttgggggcccggccccggggccttcaggtcctggcctgctttgccaccttt

SEQ ID NO: 41916 - DNA, 747 bp, Oryza sativa
  Clone ID: PAT_MRT4530_45216C.1
aatcttcaatcctcagagtctttgcacaaaacaccatccgaaggcaaggaaattctagatcgaattctagaaaacacctccttcgtagtgcaatattctgaatccgtcaagaaggcatcggtgtcaaaacaagacgaaccttcgacaaccaaatctgaatccaatctttccacattattagtttcggctaagaaatcctcttccgagccatcagcaccggcgaatgaagaaattcgagctccgagatgcactcttgacttcagggatgatcctcatagtgattatgaaaacaccttgactgacatccatcctgataatgtgccgatagaggaagtgatggcggttctacttcatgagtcccctgaatctattctagaataggatgatcttcagccaccatcacaaccccctatcgagtccaatccttgtccctctggccctcaagatgttgttctcgatgattgtcaagaaacaaccctgttcttatgcgatgtccctcttgagaaggagaactttcaggccagggacaaatttgagacatcgactctagagcgagagaaaacactccacaaatgagcatgaaagcttctcattcaatattccttaggattcatactcacttaaggaattcctagagtcctacccgataagtaccgcttctctgtgcgaggaccacaaccaccatacggtcctcatttctcgagtaattaagatttacattgtgagaattatgatatatgaaaatgt

SEQ ID NO: 41917 - DNA, 394 bp, Oryza sativa
  Clone ID: PAT_MRT4530_45217C.1
aaaatgcgcttgctgcctaacaaaacaaacggggacggtcatttaatgagttagacaggaagctcctcatatgtccataaacctaaccattctttatactaaaccatgaagggatccatagaacttctcctactcaaaagaactatttaaattaggagacatagctcctgcatcctttttacatatcctaaacaccacccattttaaccaagagggggcctacatagctataaaccaaactcccaacttaagctggaagtgccttgcgggtacattttgcggccgacgaccggacaggcttggactttgtcttcaccttacccgccggagacctgtttgacttggaaaccaccttttttttcctggccttgcacttggtgccagcgggggtggc

SEQ ID NO: 41918 - DNA, 706 bp, Oryza sativa
  Clone ID: PAT_MRT4530_45218C.1
gcacgaggcttactatcccaaagtctgcatgcatgcatgcatgcaaactcaatttgcatgcataaatgcgatgacactacatgtcaaacgaagggggtcaggccccatataaatactatgatgaatttggattttttgatttgctgctggatgtcggcccgtggggaatgaagggagtattagagttgattttgttacactatagcaactggatttcagaaggagggcttagtgattcctgtagtttagagctatttgtttatctaaatatatagagttaaagaccgcgcatgatgatttactggagattagttacactaataaaattttcagttcacattttcgtttcctctttcttgtttgttcccttggtgctgttcaatgcttactcttgcatgcggctagccttggtcctgccgcctgagtgatatcgtgctatatggaataagcatgacaccccgccacttattcagatcatctgatgcgaggaccatctctgtatgatctaaattaattgataatttttattttcaatagactatttgtttcagttatgatggtgcaaacacataatttgtttgtataactacatgaaagcattttggattatgttcaaaatttgctgtagttgtgattaaatggaaatgcctgcttgagcatggatattgactactgcgaatacacagtttgcgtgaagctttattca

SEQ ID NO: 41919 - DNA, 429 bp, Oryza sativa
  Clone ID: PAT_MRT4530_45219C.1
gcagacccaaaacgtttttagtttctggaaggtggatagatcagatgggatgcatcacatcattgtacaatatgagcaagcataggtacatcctgcgatggaaagagagagtggggtacaacgggcgctgggccattcacgagcccagcgagaactgggtggcgtaaacgcaggcgacagaggctacgggggcagcgaggggtgtacgcaggctacacagggggccctggccggtgacgatagggctggacgaacaaagcccacgtggaaaacatggcggggcgggcagttttgatctacaagaccttgagctcggcgcaggtgtcggagctgtccttcggggcagtcagtgtagcatggcggtaactggtccaacaatgtgtttcagtggccgccacgcttcaacagggaagggattggtcctgggag

SEQ ID NO: 41920 - DNA, 1338 bp, Oryza sativa
  Clone ID: PAT_MRT4530_4521C.1
tttttttttttttttttttttttttataaatgtctcctttatttattattgatattaccatccagtatgcatgtatacactccccaatttatccatgcaagttctataacaaaacacacactgacacacatgtaaggtgtatagatagtctacagcttgcaagaacatgagttatatgtgttccgatgtatctatgtcctttttcttccatcgggcggccggcttgctaggcgagttcggcaaggtcatcatgcagtgcggcgtttccgaggggacacaggacaaggcgcagggcttcgtcgtggcccgggagaaggttgaaccggaggaggaggaggaggaggagcagcgtgtcccggctgctgctacgtcggggcagcgcgcgtcgatcaagcgggaggccgcggaccgcgacgaggagcaacggcaagggggcggggacgcggcggggcagccgacgcagcggcggttgcaggactcggccgaggcgcgtgcggccgccgcggcgccgctgccgtgcccgcggtgccggagccgtgacaccaagttctgctacttcaacaactacaacgtcaaccagccgcgccacttctgcaaggcctgccaccgctactggacggccggcggcgcgctccgcaacgtccccgtcggcgccggccgccgcaagaaccgtcccctgggccccctcgcggtcgcccaccataaccaccaccaccgcgcggccgccggcttcgtcctcggcttccccaacccgtcctccccaacctccccgtcgccggggatcacgaacacagatcgactcccgaccgcgttcttcctctacaccgaccggtggccgaccccggagagccgccgcgttcggaaccttccatggggggatcttgaagaccatcttggaagagattttcttttatttgcctgcagcctatctgctggcttcttgaacttgaagcactgaagttaggtggtcctagacaatgctctatttttttttttctcagtcacagcatgggtattctatctccatttgggggaagtgtatgacatagctacttgtggagatatagttgtaaccataggtagcatgtaaatactatttagaaaatagctgtttaaatggatatagctagtatttggtttggagccaggagataagtaaggcccctggttttgtagataaataagaatcattagatggaatatatggcttgaggtatttcatttcttcatcaatctcctttaatagttttctaaggttgcgggtgtaatgtaagaatggaagtgatgaggttgcggaggcaagttgcgaactccgtgcaaaaaaaaaaaaaaaaaaaa

SEQ ID NO: 41921 - DNA, 1694 bp, Oryza sativa
  unsure (1)..(1694): unsure at all n locations
  Clone ID: PAT_MRT4530_45220C.1
cctcacctgcagggagctcgaggcgcgcgcccgcacggcaagggacaacctgaaaaatgcaaagaaagattttgggaaaaccgaggatgacttgaagtcattgcaaagtgtaggccaaataattggtgaagtacttcgaccattggatagtgaacgattcatcgtcaaagccagcagtgggccccgctatgttgttggctgccgaagtaaagttgacaaagaaaagttgattgctggaacgagggttgttcttgacatgacaacccttaccatcatgcgcacactgccacgagaggttgatccagtggtatataacatgctacatgaagaccctggcaacgtcagttactcagctgtgggtggattgtcggatcaaataagggaacttagggagtccattgaacttcccctgatgaatccaaaattgtttcttcgtgtagggattaaaccgccaaagggtgttctgctctatggtccacctggaactgggaagacactacttgctagagctattgccagtaacattgatgcaaactttttaaagattgtgtcaagtgctatcattgacaagtacataggtgaaagtgcacgtctcataagagagatgttttcctatgcacgggagcatcaaccatgcatcattttcatggatgaaattgatgccatcggtggccgaaggttcagtgaaggaaccagtgctgaccgggaaattcagagaacactaatggagctcttaaaccagttagatggatttgatgagcttggaaaggtaaaaatgatcatggcgactaatcgtcctgatgttttggaccctgcactccttcgtcctgggcggttggacaggaagattgaaattccactgccaaatgagcagtcgaggatggaagtcctcaaaattcacgcagctggtattgctaaacatggtgaaatcgattatgaagctgtcgtgaagctagctgaaggcttcaatggtgccgatctgcgcaatgtctgcactgaggctggcatggctgctattcgagcagagcgcgactatgtcattcatgaagatttcatgaaggcggtgcgcaagctgaacgacgccaagaagctcgagtctagtgcgcactacagcgcggactttggcaaggaatgaggctgatttggtgatgtgctgacttctttttttttctccatgggggaggaactgtcatgctgatcctactcctcacttgcaaaaatcctgcgatgatgatgatatacacgccaaattgaattagaaactgatccctctgaggtcaacctgacaaggagttgtgatcctgtcttctatttattgtacttcttgtaactttgggcatactcctatatgggatgattaattcgatttcatttattcccaaaaaaaaaaataaanatttattcaaataaatttaattctanatttttttataaaatataacaatttccctctntttnttanccaacctcggggtggggccgggccccaatttcccctttagggggggattacccggcccactggcctggtgttaaaaaggtggggggggaaaacctggggtccccaatttatacctttgaaaatatccctttttccgggtgggttataacgaaagagcccccaaatccctttcacaattttaaaccttaagggaatgtgaaccccctttacgggcttttaaccgcgggggggg

SEQ ID NO: 41922 - DNA, 1242 bp, Oryza sativa
  Clone ID: PAT_MRT4530_45221C.1
cggccgcgtgggcggacgcgtgggctcggcgcatccacgcaacccacccgtcgcgagtcgcgagcagatcaaaaaccccatcgccgcggcgatcaccggagggaccaggccgggcggccatccgtactccgccgcgatgatgaacgacggcgatgtggcgcggcagctgaagcagatgacggacttcatccgccaggaggccgtcgagaaggccgccgagatcgaggccgccgccgccgaggaatttcaaatcgagaaactacagctggtggaagctgaaaagaagaggatcaggttggaatttgaacggaacgagaagcaaggtgatatcaagaagaaaattgaatactcaaagcagctcaatgcttcccgacttgaagttctgcaagctcaagatgatttagcgatgtctatgttggaggcagcagggaaagagctactgtacataacccgagatcaccatgtatacaagaatcttcttaggatatttattgttcagagcttgctgcgtttgaaggagccagctgtgattctgcgctgcaggaaggaggatcgtgagcttgttgaatcagttttggagtctgcaaagaatgaatatgcagacaaagcaaatatatatcctcctgaaataatggtagaccgtaatgtctatctgcctcctgctcccagtcattatgaggcacatggaccctcctgctctggtggagttgtgctagcttcccgagatggaaagatagtctgtgaaaatacattggatgctagactagaggtggttttcagaaagaagctaccagagattcgtcgaagccttcttgggcaggtagctgcttgaccgattcataaatacaggatgctgcacaataccgttttcttctgcatgatggtgtcaaagaaagcattttggcagttaaaatgatttatcactttgctcaagtctgttacatatatattttttatagggagcccctgtcatcaaactacagaccttagtattgccgatagcgaataaattgatatgttcatgttgctcacgatttctcataataaggcctaagaggtgtagttatcccatttatatgttcatcttttctcacagaagacaatccattgtcatttattcatctgttatttgtttttgttttcatggaaataatataccaaggcctctcttagaatgaataaatagaagattggaagtgcctgcagtgcaagataaactgaaaaaaaaaaaaaaaaaaccac

SEQ ID NO: 41923 - DNA, 693 bp, Oryza sativa
  Clone ID: PAT_MRT4530_45222C.1
atgatgaacgacggcgatgtggcgcggcagctgaagcagatgacggacttcatccgccaggaggccgtcgagaaggccgccgagatcgaggccgccgccgccgaggaatttcaaatcgagaaactacagctggtggaagctgaaaagaagaggatcaggttggaatttgaacggaacgagaagcaaggtgatatcaagaagaaaattgaatactcaaagcagctcaatgcttcccgacttgaagttctgcaagctcaagatgatttagcgatgtctatgttggaggcagcagggaaagagctactgtacataacccgagatcaccatgtatacaagaatcttcttaggatatttattgttcaggataagctgaccaaaaaaaatcctgaacagagcttgctgcgtttgaaggagccagctgtgattctgcgctgcaggaaggaggatcgtgagcttgttgaatcagttttggagtctgcaaagaatgaatatgcagacaaagcaaatatatatcctcctgaaataatggtagaccgtaatgtctatctgcctcctgctcccagtcattatgaggcacatggaccctcctgctctggtggagttgtgctagcttcccgagatggaaagatagtctgtgaaaatacattggatgctagactagaggtggttttcagaaagaagctaccagagtga

SEQ ID NO: 41924 - DNA, 397 bp, Oryza sativa
  Clone ID: PAT_MRT4530_45223C.1
tcaagtatgataaggccggtgaactgtgtcacccactcggtaccggtgcttacgcatcgatctcataccagattgctggcaaatgttaagagactcgaggatcctataccattctggatgtaattttattgatgatcatgcaaactagtaagtagtatcaggtgttattgtcctactcaggtgttattatatatatatgtgagcatccaattttggcataacctgttttatgatgatggtcgccttgtcaatttggtccactctttgtcagccctgtgttttgctgtaaactgcttttccctcttgtagcacaatgcttaaaaaactgggggaaatgaatccctataactttaccaagtgagttatgtctgatgcctaaaaaaaaaaaaaaaaaaaa

SEQ ID NO: 41925 - DNA, 1110 bp, Oryza sativa
  Clone ID: PAT_MRT4530_45224C.1
atggatggggtgattgattctggtgttcttggtttggatttcttgagcagaggcgtcgtcgtctcgccggagaccaccaggccggcgggcatggagtatcactaccagcagcatcagcagcctcccctcttcttggacttctcgcatggagatggagatgggggcaactcgaggaagcggccgcgagaggcggatgcggcggcggccatggttgctgcgccgccgccgcagatgttgtcgctgcagccgcaggcgcaggcgcaggggcacaaggtggtgagcctggcgcagctgcacaacaagcggccgccggcgtcgacggggctccgcctcgacttcgacgacggcgggtcggagcacgtgtcgacgacgaccacctcctccgcgtcgtctctcctctccgacgagctcgccacgcagttcgaccggtgcaagaacgagatggcgcgtatgttccaggatcatacggagaggctgcgccgcgcgctgggcgaggtgaggcggcggcactaccggtcgctgctcggcgcggcggaggcggcggcggcgcgccggatgagggagaaggaggcggaggcctcgaatgcggcgcggcgcggcgccgagctggaggagcgcgtcgcgcggctgcgggcggaggcggcggcgtggcaggcgaaggcgctcgccgaccagtccaccgccgcggcgctccacgcgcagctccagcaggcggcggcggccgcggcgcaggcgaggggcagcaagtcgccggaggacgacgacaacatcaaccccaacgccgccgccgcggacgacgccgagtcggggttcgtcgacccggacagagtggaggagcagcgaatcaatagcggaggagtggaggaggctttgttgggccgtggtgtcaggcctccatctccaccaagagcaagagaagatacagaagagatgatacaagaaggagcagaagaggaagaggtgctggagcctgacgacaaggaagcagatgcccaggaacaaggaggaaaaccagacttcaagaccaagaagaagcaagtaccagtccagcttgggccaagagcaaggaggcccaatccacgctacaagggtgaccaatgggtccagtaa

SEQ ID NO: 41926 - DNA, 2654 bp, Oryza sativa
  Clone ID: PAT_MRT4530_45225C.1
atcaggacggcactgttcattgttcgacaaaagtgctgggacagatgtctactgaatacttcaagacaatcttcagtgcagattctaacctagattattctaaggttagaatctaaatgttcggtgaatagattgaggccaatcttggatgagattatctctgttaatcagagtgcttttgtccctggatgaatgactacggataatgctctcatcgctttcgaatgttttcattacttacagaagaacaaaaatccagaaaatgctgcttgtgcgtataaactcgatctgtcaaaggcgtatgatcgggttgattggcactacctggagcaagcaatgatcagactagggttctctcatcggtgggttggctggattatggagtgcataaccgtggtgagatacccagtgaaattcaacggaacccttttgtctgcatttgctccaactcgtggtttgacgcaaggtgacccgctatcccccttcctctttctgtttgcagcagatggcctttctcttctgttggatgaaaaggtccagagtggtgacatcactcctgttcgcatttgtagacaggctccaggcatctcgcatctgctgtttgcttgatgatacacttctcttctttagtgccgataaccatcaggcagaggtggtgcaggaggttctagataactatgcccagagcaccggcgaagtgctctgtcatgttcagtcctgctatccaaattcggtttgcaatatgatcagaagcaccttgcaaattacacaagctagttttgacgataagtatcaggggttcccaatgccggaaggaaggctgtacaaagggaaattccaaaccatgcagagcagaatcttgaaacgtctggttcagtggggtgaaaatttcctatcgatagggggtaaggaggtgctaattaaagctgttattcaagcaattcccgtttatgttatgggtctcttcaaaccgccagactcagtttgtgatgagttaaccaaaatgacccgtaacttctgatgggagttggaaatgttcgacaggaagacctgttggaaatcatgggagagcatgattaaaccgaagtgcagcagcggtattggttttagagacttcaagcttttcaaccaagccctgctggcacgacaagcatggaagctccttatgttccctgaaacactgtgtgcaagagttctcaaagcgaaatattatcccaatggctcgcttatcggcacctcctttggtggtaatgcctccccgggatggcgggcgattgaatatgtcctagacttactgaagaaaggaattatttggcgagttgggaatggtaaatccatccgggcctggcgtgatccctggattcagagagatcactccaggcaaccaattactagaagagggaactgtcgtcttaggtgggtgtcagacttcatcactgaagataatgtctgggatgttgagagagttcaacgtttcttctggcccattgatgcagaaatcatactgaacactcgcatttcctcatgggcggaggaagattgtgtggcctgacatccggataaattgggtctgttctctgtcagaagtgcataccggttaggatttaggcttaaatatgagaaggagagttcaagctcctcgtcggctaggttggaaaaagcctggaagtcagtatggcagtgtaaaatcccccagaaaatcaaaatcttcgcgtggaaggcagtgactaactgtcttgccaccagagaaaacaaattcatcagaaagctggatgtctcccctatttgtgaagtgtgcggtacagaggtggaggacaccatccatgcgctgtgtcgatgccccctcgcaggatctctttggcaagctatgcaaaaggaaggtactattcctgtctcactggacagtttgagaaccgagccaaactggatttttgatcaattggatcctctctctaatggccaaagggagatgtttcttatgataccgtggaggaattggtttgttcgcaacgagataacccatggcaaagcagcccctccagttgaggtgtccaagaggttcatccaaagctatatccacacactgttggaaatccggcaaaactctgtgatcaacctagagaagggcaagcactttgttaatcctaatctgtgcccccctagagatgggaacctccacctttgggctggatgaatgtgaatgtagacggttctttcgatgacactaacaaaaagggggggaattggaatgattaggagagatgacggagggaatcccattactgccgcgtgcactttcctgaatagatgctgtactgctcttgaggcagagttgttggcaatcaaggatggtatcacctttgcgttgcaatggacgtttcggccgattgttcttgaatcggactgccttatagccatacagatgatcaattcaaaagagaggtgtttatcagaattggccttcgttgtcagggaggtgcgtgacctcatgaatggagacagggagattttgctcaggaagattcaccgcagccaaaaccatgctagccattctttagcttaataaggctagggctgagtcatcttcaattacttggctaaatccaaactgtgatgatatatcacaaattgtaaaggatgattttattcctgag

SEQ ID NO: 41927 - DNA, 144 bp, Oryza sativa
  Clone ID: PAT_MRT4530_45226C.1
atggcgagctatataagcgaggtttactcaggatggttctcacagcaggcaatcgctcctgcagcaagtcttgatagagcccgtgatcttcgtgtcctcatcttcaatgcagagagctgcagtgaaaatggtcagcatgtgtga

SEQ ID NO: 41928 - DNA, 270 bp, Oryza sativa
  Clone ID: PAT_MRT4530_45227C.1
gcagtgaggccgcgcccccaccatggaagctgcaaggtcgcagtggacaattggccgatgttggtggtggaggcaaagcggagcgagaggttatgtggtggtggcagatccgacagcagggagcctctggaaatggagaagatggtaggacgggggacctgcttgaggaggaagagagccgggaatgaaggggaaggtctagtgggcctcgtcaacaccattgacactagtttcaagcggaggcaaggtgaggggcatgcatcgcagtaa

SEQ ID NO: 41929 - DNA, 267 bp, Oryza sativa
  Clone ID: PAT_MRT4530_45228C.1
acaaagcgcgagaccacaacactggcgctgacatgcacagctggagcacatagcctcatacgagcacgactttacatagcgatgcatgtaagccagtttgcttcatgtacaatgctcagctcgagggatggcgacgggtcgggtcgggcacgtgtagagcaaaaccatgcccgaccccatgcccgttatcgcccgccaaaaccgtgcccgtacctatgcccgacgggcacgggtatatccggcgggtacccaatggacctcacatga

SEQ ID NO: 41930 - DNA, 478 bp, Oryza sativa
  Clone ID: PAT_MRT4530_45229C.1
caaggccggaattgggtcccaacccaattggggttcgaacaaaccccgagtttccttcggagggacagacaaaggttataacactcttgcaaggacaacgcctaccttgtttcgagtttatggcaagtgaagcctggtaccatcttcgataacatcctcgtcaccgactctgttcaagaggccaaggacttcgccaaacgagacattcgagaagaccaatcaagggtgagaaggcaagccacaaggaggccgacgacaagaagcaagaggaagagagaaagaaggctgaggagcccgccagccgagaaggataccgaggtaggatgaggaggagtctgagccacaaggacaaggacgagctctaaatcaattttgttacaactaatatattatacttatacaaactcaaacaacaaaaacaacaaaaacaactgaaaaataaaaaataaaaaatatataatgtaaaaaaaaaaaaaaa

SEQ ID NO: 41931 - DNA, 2086 bp, Oryza sativa
  Clone ID: PAT_MRT4530_4522C.1
gggcagcgcagcctccacctcctcctccttctccggccacggcggccggcattagaagcagcggtgggggtcccggggcgaagagcggcttgctggtggcggtggcggcggcggttgggtaggtgcggcggccggcctcggctgcggcggcggcggcgatgtataagaaccagctccaggagctcgcgcagcggagctgcttcaacctgccggcgtacacctgcctgcgggaggggccggaccacgcgccgcggttcaaggcggcggtcaacttcaacggcgagcagttcgagagccccgggttcttcaccacgctccgccaggccgagcacgccgccgcggaggtcgccctcgccgccctcgcccgccgcggcccttcctactccctcgccgcccgcatcctggacgaaacaggggtttacaagaaccttctccaggaagtagcacagagggttggagcaccattgccttcgtatacaacagagcgatctgggcttggccaccttccggttttcacatgcacagtagagctagctgggattacatttacaggtgatcctgctaagaacaagaaacaagctgaaaaaaatgctgcttcagcagcttggtcttctctgagacaattggtacgtcaggaagcgagttcatcaaatgaacctgagagcaatgatgagcaggagcagatcaggattgctcgagctcttctcaactatcgcctgaaggagaagatggcgatggccaataatccacatgcttcacccttcccaaagaaatttccgatgcagcccgagaggaggacagcatttcctcaatcctctcactccagctactcgaagattctccctctatttcgccccaagtctaattcaaggtcaaggccagagtcgccagcagcgtctgatgcagcatcacagactcctttccggccaactgaaagtccaaatccaaggtcaaggttccccgctgcagaggcggctccttatgtcccagttgggcacttccgtatgccttgccatagcatggctcctccagtcacagtcaggacttctatccctgttttctctgctccacctctcccacccccaggtgcgcggacacaacagcttcctcctctcatgagccacccgccgccaattcgaatggcttccccggttcgcatcaggccagctcctcctctttttactccttcagcagtccaagggccgaaacctatgatgcctgttcagataaaggatgtgcaacaccaacaaataaaggaaacccggtcacctgtgatgcctgttcaggtgaaggatgcacaaaaccagcttcttaagggatccctttcacctgtgatccctgttcagataaaggatgtacaatcccagccaccgaaggaagcgctgtcacctgcgatccctgttcagattaaggatgtacaactccagcctcggaacgaaccagtgtcaatcggtaagggggtggttccattgccagcgattaggcctccggttaaggttgaggctccagctgaagtcaaggaagcttcacaacctgttgctggttcttctgtggtgcaatgcaaggctgatacatcgccggactctcttccgaaaacccagttgaagaccgccaacgccgacaacgctgacgccaaggatgatcatctcccggtggatgctgaagaagtggaggacatcatcaggcatctcgagctcaaataatttcagaaagcgtcaacgaacgaatggggcgtcatcttctgtcagattttgtaattagctgcctcctcctatgcacatcccttttctgttttagttttgtttgcctttggttcggattaggggcgctgggcaagctgcatttctcgtaggggacacctagcttttttttttgttcagaagagagggaaaaaaatggacaagacatacatgcagtggtaggcggtttgcccgttgtttggagatggatggttggttatacttccctggatatgcagttggtggtctgcttttacccccaatgatgaggtggatattgttgttgcctctagggaaggaaattatgtggcgacagttttacctcctaaaaaaaaaaaaaaaaaaaa

SEQ ID NO: 41932 - DNA, 2661 bp, Oryza sativa
  Clone ID: PAT_MRT4530_45230C.1
atgccccaccaccgccacctcactccgtctccctcccacgaggagcacgagaccccaaacccctcgctaacccctcctccaatgcagctcgccgccctcgcctccgacgagcccccgccgccgccgccggagcaatccccccggcggatcgtggtcgcccacaggctccccctgaacgcgacgccggaccccggatcccccttcggcttcgccttctccctcagcgccgacgcccacgcgctccagctctcgcacggcctcggcctcgcccacgtcgtcttcgtcggcaccctccccgcggaggccgcccgcgcgctgcggcgctccgacgagctcgaccgccacctcctcgggtgcttctcctgcctcccggtgttcctcccgccgcgcgcccacgacgagttctacgccgggttctgcaagcactacctgtggccgcgcctccactacctgctcccgcacgcgccggcggccaacggctacctccacttcgacgccgggctgtaccgctcctacgcgtcggcgaacaggagcttcgccgcgcgcgtcgtcgaggtgctctccccggacgacggcgacctcgtgttcgtccacgactaccacctctggctcctcccttccttcctccgccgcggctgcccgcgctgccgcgtcgggtttttcctccactcgccgttcccctccgccgaggtgttccgatccatccccgtccgggaggatctcctccgcgccctcctcaacgccgatctcgtcggcttccacacctacgactacgcgcgtcacttcctctccgcgtgctctcgcctcctcggcctcgcctacacctcccggcacggccgcgtcggcatcaactaccatggcaggacggtgctgatcaagttcctctccgtcggcgtcgacatgggccttctccgcaccgccatggcttcgccggaggccgccgccaagttcagggagatcactgaggtggagtacaagggccgcgtactcatggtgggcgtggacgacgtcgatatcttcaagggcgtgaggctgaagctcctggccatggagagtttgctcgagacgtacccggcgttgcgcggcagggtggtgctcgtccagatccacaaccccacgcgctgcggcggccgcgacgtggagcgcgtccgcggcgagacggccaagatacaggcgcgcatcaacgcgcggttcggcggtccggggtaccagccggtcgtcgtcgtcgaccgcgccgtccccatggccgagaaggtggcgtactacgccgccgccgagtgctgcgtcgtcagcgccgtccgcgacgggctcaaccgcatcccgtacttctacacggtgtgccgggaggagggccccgtcgacgcgaagggcgccgccggcggccagccgcggcacagcgccatcgttctctccgagttcgtcgggtgctcgccgtcgctgagcggcgcgatccgcgtgaacccctggaacatcgaggccatggcggaggccatgcacggcgcgctcaccatgaacgtcgccgagaagcaggcgaggcacgtgaagcactacacgtacctcaagctgcacgacgtgatcgtgtgggcgaggtcgttcgccgccgacctccagctcgcgtgcaaggaccgctccacgatgcggaccatcggcatggggatcgggccgagctaccgcgtcgtcgccgtcgacgccgccttcaagaagctcccgccggagctcgtcaacctgtcataccgcgccgccgccgccgcagccgccggcggcggcggcggcaggctgatcctcctcgactacgacggcacgctggagcccaccggcgcgttcgacaacgcgcccagcgacgcggtgatcgtcatcctcgacgagctttgctccgaccctaacaacgtcgtcttcatcgtcagcggccggagcaaggacgacctcgaacgctggctcgcgccatgcgccaacctcggcatcgccgcggagcacggctacttcattaggtggagcagggacgcgccatgggagaccatggcgagcaagcagctggcggcggccatggagtggaaggcggcggccaagaacgtgatgaggcactacgcggaggcgacggacgggtcgtacatcgaggcgaaggagacggggatggtgtggcgctacgaggacgccgacccgaggctggcgccattgcaggccaaggagctcctcgaccacctcgccaccgtgctcgccagcgagcccgtcgccgtgcgcagcggctacaagatcgtcgaggtgatccctcagggcgtgagcaagggcgtcgcggcggagtgcatcgtgtcggccatggcggcgcgccgcggtggcgcgctggggttcgtcctgtgcgtcggggacgaccgctccgacgaggacatgttcggggctctcgcgagcctctgcggcggcggcaagaacggcggtgcttcgtcttccaccaccaccaccaccgcgctccttgcggcggcgcaggtgtttgcgtgcacggtggggaacaagccgagcatggcgagctactacctcaacgacaaggaggaggtcgtcgacatgctccatggcctggccttctcgtcgccgtcgtcccggctccgcgccgcggcggctccccggcggccggcggatttcgatatcaagtccctcctccggtgtgagtaa

SEQ ID NO: 41933 - DNA, 443 bp, Oryza sativa
  Clone ID: PAT_MRT4530_45231C.1
caggaaatgcgaaaccttggatgctggtgagctacgtagatgaatcgaggtcgcaaagcaagcgattgattccccatgcgaggaatccgaatccgaatccgaatcccaaggggcaaggtgaggagggcaagaaggaatgggggatcgagaggagagcatggtacctggacggcgcggaagttggagaagcggaagtcaaagcgctggccgacgcggtccgacgagcggtggcggtgcagcttgaacatcgtgtatcggcggcgaggcgaggcgaggcgaggtggggaacggtggtcaggcgagattggggtttgctggtggcggcggcggcggcggcgtcggcagcagcagaagcagtgtggtacaagaagaagaaatcattgcggttgcggaacaaaaggtggcggtgggtggtgggtggtgggcttggggaatcctcgtaa

SEQ ID NO: 41934 - DNA, 429 bp, Oryza sativa
  Clone ID: PAT_MRT4530_45232C.1
atggcccaaatgggcaggcgcgcagcgcaggaagagcagagacagaggcagggtgggatgaatggcacaacagcagtgcaggcgtgcagcacccagcgacgacagcaagcaagcgacaagccaacaagccaagcatccatcactccatcaacagcgccggtggttgatatggccgagacttctgtgccgaatcttggcatgaagcccaagatctctgaacggacaagcaacaccaaggccacaatgggcacaagttgctgctcatacaatacatgtgaggattctaccattaaatgcacaatgacccaatttgaggatcagtttagcactataaaacctgatgggattcaagtcagatgccgtaagatgtgctgctgttgctctcgcagtagcaggaatatgaaatttgagagtttggatatgtactga

SEQ ID NO: 41935 - DNA, 132 bp, Oryza sativa
  Clone ID: PAT_MRT4530_45233C.1
atggcgctcttggcttacttcaccgttttcgtgttagcagcatctgttcctgccaccggccaacaaggtgccaattcatataataactggcacctacaagtgcggtgccatatgtaccggtttttatcatga

SEQ ID NO: 41936 - DNA, 138 bp, Oryza sativa
  Clone ID: PAT_MRT4530_45234C.1
atgggttctggtgtaattactcactatgtgccggaaatccggaagctgttcgtcgaggagcacgttgcttgccttgatgtctcggtggatgatcttgacgggggattcctcgtggaggtagaggaggcctctcgctag

SEQ ID NO: 41937 - DNA, 1644 bp, Oryza sativa
  Clone ID: PAT_MRT4530_45235C.1
atggcaacgcacgcctggttccccttcgtccccatgccacctcaagcacctccttcggagcatgaggaagacttgccattggacaatagcggaagcatgaaggatgagatgatccatctatatctgaacaactccaccatggcgttggcgatcccgagagaggcatgcttactgggtgctccgaggtgccatggcattgggatgctggtgggagcattcagtatttgcaaggagcaagagcaagtgcgcgaagccatcttggaagaacggttaatgttaacagcatttttacttacttactctgaaccacatgccggcgaaggggttctcggtgttcagccttgcaacgcaaacaacagaactgtgcttgcgccggaatcatctcagggtaaccagtttcagagtgtaatgcagatgcagagatggccaaattcaggaagacaggaagacgacggaggaggcaaggacgctgaaggggaggagacgccaacggtgccggaggtggagagggcgggggcgacggacggcgacggagagggcagggaaaacgtacggggacggagggagaggagaaggcggcgagggtgggggaggcggacggcgactgaggaggcggacaaggcggcgacggagagggcgggggatacggatggtgacggagggggtggacaaggcggcgacgccgggggaggaatagcgacgagactgcgtgcaacggagtcggaccagggccgccgcgatgtggcttggaggctcgaccgacgacgttgagtggcccgagtggccgttggtgggcggcaaggtggcggcggagtggtggcatcgacaaggccggcggtgggtttggcggcgaggtcgtcttccttgtggttggccaggttaccactatatttaaggagctcttccccttctttatagggagctttgggaagactcaggttgccaaggcgaggttgttcccggtcagatcccataggccggattcgacgtggaggctggcggaggtgaccggtgctatggcagtcttgtcattggcaggactggaagtcggccggtggaggggcgtaggtcaggtgtggcggaagccatgtgccgccggtgttagatggtggattcggattgagcgacggaccacggcagtaggggatttcgagcgaaagcttagcccaatttctttgggccaacagtgaccacgctttcgggcgtggtaagcctcctgagggcattgttgaggtaccccctccttccttggaaaggagctctgggtgaaaaccttatccagttctttggatggatgacgacggcgtctttcggcgtcacgaccctcgtgagggtgtcgttgtagagtcttcgcgccgtggtggtttgttgtcccggtggtgatcggtctcgcatagcgacggccggttccgtgcttggcttcctctctgtagcgtgtttggacggttggcacatggttcgaagcgtgtgctctggtgcacatcctttctcgacagccagattatgtgcaaatgaatttggatcacaacttaatataggttgcactaaaattgctacacttaaacagtatcgtaatattggtctcagattaagcccatcaaggaaaaaattgttgggctttacatgggccgagctggccatcag

SEQ ID NO: 41938 - DNA, 165 bp, Oryza sativa
  Clone ID: PAT_MRT4530_45236C.1
ggattccgggtcgacccacgcgtccgggtatgctttttcctcgaactcccagaagagcactcagacgacctactgtgccgaacggacccccatagagccccgatttccgcggccatcccgaccccgagcagcactgtcatgtcacattgccaacatcgtcgccgg

SEQ ID NO: 41939 - DNA, 895 bp, Oryza sativa
  Clone ID: PAT_MRT4530_45237C.1
atggcgacggcacagtggcggtctgtggaggcggtggctgccgtcggtggcagcggcgacggcgaccatgactatggaggcagtggtgacgtcggcagcggggaaggagtcagagaggcgcagccgatggcagcggaggccggctcggcgcgagaggcgtgggcggcggagatggaggccggcttggcgcgagaggtgcggccgatggagggaggccggattggcgcgagaggcgcgtccggtggaggaggccggcttggcgcgagaggcgcggccggcagtggaggaggtgacctaggtgtgtggaggagctgccggtgggtgtggcgcggtctttggcgcacaaaggctggccggcaagggtcgccggtgcaggggtcccacatgtcggcagagcttgtgtggaggtggagcatcagtgcgttagccgtggattcgcaggtggtgagcagcggtgaaaacccagtcaggccttggtcggaccgacaacgatggttcattccccctcctgagggcgttgtcgtgctgtctcacccctcaagggtgattgccgggcgaaagcccagtcttagctcttttgagccccgacggacggcggtggcggttttccgtcgcttctcttcttgaaaacgtcgttttggcatcccctagggggcgatctcgtctgtgtccttttgttggtttaagtggcggtcggtcacgcttaacggcggccggtccggtgttagtcttctcctgggtttgtgtgttggcgatgtcgatgtgtggatgatggtattttttttcctttttcctagttacgaccatccagggttgtaatcttataatttttttcctgctctattaatagaacttcgcaccgtctcgtgcgaggcgttaaaaaaaaaaaacaaaa

SEQ ID NO: 41940 - DNA, 490 bp, Oryza sativa
  Clone ID: PAT_MRT4530_45238C.1
aggcatcaataaattatccgatagaccatagcatatactccctcgatatttcaaattaaagcaacttacttgcctacagttatcaaatacatcagcactccatcacctaacctaacagatgctcagcaccattagacctaacaacttgtctagaatacatatgcatgcttaaaaatcatctaactactcacacagtttggttggttcgccgaatgatgtcttcctatctgcatgtcttgctctcttgttcatactcctccttccttgactgatgcatgtatccattcctcctgtcagaaaggaaaaaaaacaatcataacacaggccatgtgttaattttccttttttcaatgggcttgtcaactcgaagcttaattcctacaagcagctgatcatcttttaaatccttcatttccctgaacacaacctgaccgctcccaagaaggcagtcttgcagaaatgcagggagcttcctcaattgatccaccat

SEQ ID NO: 41941 - DNA, 402 bp, Oryza sativa
  Clone ID: PAT_MRT4530_45239C.1
atggcggcggtgatggtttctggaggtggagctgagagatttgaaggtctgctaatgaatcaatggatggagacttcttttggggctgctgctggttacaagcagtgtgaagcaatccttggccttctgcaaagacagatgttctattgcacccatctgaattttcctgtgatgttggctacctgttctttgaaatcttacttcctttggtttcaaaatagcagtatccatacagggtctaccgttcgagttgagcacttcctgctcctcagatctaatgggagactccgtggaatcattgtgttgagtccgatgatgcctacaccaaaatctacggctcagcaacttacctccaatttgtgccatttctgtggtaaagctttccggtctgtcaaacggtga

SEQ ID NO: 41942 - DNA, 228 bp, Oryza sativa
  unsure (1)..(228): unsure at all n locations
  Clone ID: PAT_MRT4530_4523C.1
acgtcccggcaanggaaattttaacccgatnccctttcggggccaacacgtggtcncgctctctgcccnggttancccgtcccttnngatcggcttancnatgtgcaagtgccgttcacatggaacctttctcctcttcgnncttcaaagttctcatttgaatatttgctactaccaccaagatctgcancganggncntccggccangctcgcgccccgggttttgc

SEQ ID NO: 41943 - DNA, 379 bp, Oryza sativa
  Clone ID: PAT_MRT4530_45240C.1
catattataaggtagggttgttcgtattgggctaactgatcatgtggaatttccaatatgcaacctttctgcattagccaggaagcacactgctagagacaccccatgggcggatctccttaacgtggaaaactgtgattatcactaaccacatcagtacatatccacggcggggttggaagcaattacataacttaaacacttaaacacccagacaaccttaagactgattaagaggagccccactcattatatacttcactgaagctcatgactcaaaggggaacgtatgcacgaaacgtcatataaactgatcaggttgggcggacggggcgagcatattgagatgcgatcaagcatgtgcaagaacagctggagc

SEQ ID NO: 41944 - DNA, 2844 bp, Oryza sativa
  Clone ID: PAT_MRT4530_45241C.1
tcaatcagctgcattttgtgagatgaagagctcctgcacaatgtcagcaatgagctggtcgaagatggcacgttcgagcttcctccccaaaacataggaatcctcatgcaacacctcaatccatggcgatgtccaggcctctcgtgccaccatgctctccactgtctgcgtctcctgctgcaccggagggttcctcacactctgcacctgctgccacacatcgacgagcagcttcctccccggcgacacgccggtgctgtcgacgacccaccgccacagcgacgacccggtcttcgtgctacccatcatggtgatctcaagcgcttcgttcgccaggtcgaacagcatcctgtgatcagctgcatcttcttcagtgttgtaggtctcctctacctcgtcgaagacgtagtcgcagatcggccttcttgccattgagtccacccgggcattgttcatcatcgatggagacgagtacgacgacccgtcttcgtatagtcccacggcaatgaggacttgctttatgtacgccatctcagtatagctctcctcggtttcagttgcgttcgtcctgttcttgcatgatgatgattcattgctggctatgggtgttgtatcaaattctgaccaacttttcgggctcagttctggcaagttgcagttcagatcgctgaagaaatggcgggaactgctgcctttaacctccaacggggacaccgggctaggaggcagctcggtgaaattctcctgaaacaaatgcagcaaaggaagtgaatccattgtacaaaagaaagttattctgatcctctcaaggtcaggcctgaaatacagatttgattttgacaaatgtagtacagtgcttgcctgtgcaacgatgaaagggctcaaaatttcaggaggtgacggtggtaacatgccgatcgccatcttgtgtgggtggaactcgcccaacgatggcttcagtgaccaatgcgtcttcttcccgaacagcttgttggctctcgatctcaagctgttccgcagatttgacactgtccctctcaaactgaagctgctgctgttcttgctcgctgctactgctgcaccttcagaaaccgcgtctgaattcccatgcctaccgctgtccacattattgtcctctgcaaacaggcgacctcgagagatccctgacgccggtgcagagaatgaccggactagtgcccgtggcgacacgacgttggcgtcagcaaacttgcattctcctgtgtagctttggtcatcaaagccagaagctggaactgactctgacactgacactgacagaggcatatctgtcaacgaccttattcttcctctgcttcttctgattattggaggagaacaatcattggacccttgattggttccactggttcttgaggtgacactcgtcggactgacgtgctccggagatgcatttcttgcagcagtagcagcagcgttgcgcttgcggtcactcctgaatgctctgaatgattctgatcgggagtacagcctcttaccaagatcctgccttctcactgtctctctgatctgcttcgcgatgtctcgagcgatttgcttcgggtcagtagtaccccagcttctcctgacaacctcacttttggacttgagcttgagctctttcttgagcctctccttcacctcctcaagaaactcctccatgttcccttccctcttcaccttggatgaactgaacaacgattcttggtcactggcaacaatgtcacaagtactaggcttgaggagcactatccgtttctgggaacgtggtttcgcagacgtgcttatactgttattatgttcatcctccaaatctctgaacttgtccggcatcgttgcacagtggctcacccttaaaacctttatgaccttatctccaggagatatgttagattctgctgcagcttttgctgaagtaatctctgtatcactactattatctgtagcattcttcagggtgtctttctctgccatggaaatcgtgcagcttccatagccaaatttggccatcttttccttgtgcaggttctcctgtgcaagaatctgaatgtacctaccttcttccatgcggtgtctactactagtaatagtaggacaccctgaagctgtaaaaacggttcttgcattctccagtgctttggatgtttgccatgcctggaaatcctccctgatcttctcaagcagctcctcctgtggatgatgctgacgcgaacgacttcttcgcggtctcattttcttgagacaatgcctgtaagtgtaatcaacactgctgctaccgtaggagatcaggctgcatttggattgcctgaatgttgcagaacggggtgatgtgacagtgatcatttccagtttacttggcagcttcaggttgctgacttcttctgcatggatcatcacttcatccctttttgcagataccgggattgtgccgatgcccatcagacgtgcaatgacactcggctggctgggaaaaatatccttgtggatcacattctttgcagtggttctgtcttgaggggtgcttcccttgggtggcttctgcctcatagtactagtcatggtgatggtggtatggtcgtacagtggagagtcaaggctattccggggagcttcagggcctacaacaacaactagtagagtctccattaaccattcagaggttatagcacaaaatgctggaagaatggaagctcttaagaagatcaaactcttcaagagaaagagagagtgcgaaaccttcttccatttcttccatgtatggattaaccggaacttgccctggctcatgtcgtctttatgagggttgggtttttcaccggtgttcat

SEQ ID NO: 41945 - DNA, 339 bp, Oryza sativa
  Clone ID: PAT_MRT4530_45242C.1
agtaaattggaaggcattctgtgttgaaagtggggtgggtttaattacttgggctgcattttggagatatgctttaagcgttcgttaagtttttgccccaccggcccatggcactcgttggcatggacaccgttgaatatgctgctgcgcaaatgtggcacctgatggtgtacgtgcagtgttgaaaactgcgttgtaattgtgctgatgtgcaggtgtaaaaaacttgggatggctgtctggagtgcttatgtggtgtggcacacttgcaggtttttttggaatgcgagtacttacagtgctaaatcctttgctctttaaaaaaaaaaaaaaaaaaaa

SEQ ID NO: 41946 - DNA, 746 bp, Oryza sativa
  Clone ID: PAT_MRT4530_45243C.1
ggccggcccgggaagaaatccccgcggaaaagagaagcggcgggacaagatcgccagagattccacggacggacccaagtatgacaatggaggggagtttgagattggggtttctgttggttctatgtatcttggccttcttgcgccctgctgcagctattcgcttcgtgatcgatagggaagagtgcttctctcataatgttgattatgaaggagatacagctcatgtatcctttgttgtgatcaaggcagagacgccatggcattataccgaggatggcgtggatcttgtgaacatttcagcgccttgtttgagcaaattgcaaagttggatgaagccctctacaacattcagtttgaacagcactggttggaggcccaaacagaccggcaagcaatattaaacgagaacatgagtaggagggcagttcacaaggcattctttgaatcagctgctctcattgcagccagtgttgtgcaggtctacctactgcatcgcctctttgagcgaaagctgggaacatcgagggtctaattctctgatagtaggtctccttagactcaccaacccaactgtatttcaatgctgcaaaatgtgtttacaatatctgttacatcctgctcagatatttagcatttttgttcagaattttgtaattcagttatttacagtactgtgctgcagtaacttgccgcctcatcagattcatttcagcgcagtagaaaaaaacaaaatatttgcggcc

SEQ ID NO: 41947 - DNA, 174 bp, Oryza sativa
  Clone ID: PAT_MRT4530_45244C.1
atgcatcccacctccagatccctcctcccgttcttcctcgccgagtcgccggtcgcacgtacagtggccgtggaaggcgaggcagctatggggaagggattgggcgaggtggcgacgcccgtcggcgtcctctgtccaaagattgatgatatgcgggcgtgccagtcagtttga

SEQ ID NO: 41948 - DNA, 448 bp, Oryza sativa
  Clone ID: PAT_MRT4530_45245C.1
tgtgtttttttttttttttgtgttttttttttttttttttttttttttttttttttttttttttttttttttttttttttttgaaaaaaaaaaaatttttttttaatttttttagggggcccaaaaccaacttggttattttttggggggaataaaaccatttttcccaacccaaaaaaaacgaatttggtgggcccaaattcctcccaccccaattaacccctggtaaggtgcggggccccattttattttgcggggaaaaaattgggggggtaccccccacccttttttttaaccgggtccgggaggggggccccaagggtttttagggggccctttccggggaaaagggcttggaaaaaaaacccacttggggaaaatgggggggggggccctttttatcttttttaacttggggttcccgaaacccctggggggattggggggg

SEQ ID NO: 41949 - DNA, 801 bp, Oryza sativa
  Clone ID: PAT_MRT4530_45246C.1
ttattttctactccatatgtagattccggttgctattactacaccacctaatgctccaatggatgccaaaattttcatctttgaagcaccttgcttagtcactggtaataccagtaaactttctatctcgattggttgttcccaatttttctttattccagaaacatgcccttttcctacaactgccaccaccgaggaatgttcctttgctaccttcaataatttggaggacatatacatatcacgttcatgtaggagtgtctccatcaaggtaggaaatgccttactcatctcttgaataacaagtgttagcatgtcaacatcctccatgtccttcagctggacagggcgatctccaaggataactttgccgccataactcattgcttcctcaaatgccactcggaattcggccccaggtaacacatcaagttggctagcaacctttgcaagaaaccagctgtagagtattccaaaagtgttcatcttctttttcttccacatgtcaatcatttcgttcatggtaggaacctgaaggttttgtggtgtcagaatggcgactctgctggcacagagctccaagaaaacagcctgaggtttcaggtagtcgatgacggcttttacttggtcacatgattctcgaggcacaccacccccttggcgagctcctcgggcagctccttcctctccctctccccctccccctccccccgcaccacctttttccccgcccgtctccgcgtcggcgaactccgacgcgtcctcgtagcccccgccctcgccgtcggcggccggatccat

SEQ ID NO: 41950 - DNA, 530 bp, Oryza sativa
  unsure (1)..(530): unsure at all n locations
  Clone ID: PAT_MRT4530_45247C.1
gagattgnttctggtgttgcagttgganatcgnacatttgggccgttcaggcgacgaggtctggggcgtggggggctctcttccataaacaatgcttcaggaaaataagcatatgtccttgcggtaagggtgctgccagcaaaggcaggaaaatcgttgcgcttgaacaagctgtgcgtgacgatgcaagcagaccatcaactcagttgatccaaccctcatcgttctcctcatcatctggttttttctccgatatcatctcaaaggctaggccagataaactttggaaaccaagaaatagcagccctgtaattcttatgggttctttgccagatacgtctacatgagctcagttgtatgttcatgttccatttatattgttgtgtttttcgccacataaagtgtgtgcctttgagattgtaagagatgccgtggagcatttttaattcatattgttttgtacgtaataaaatgtagcatttttgtgcgtttgtttgcatcaaacgcttcaaaaaaaaaaaaaaaaaaaa

SEQ ID NO: 41951 - DNA, 362 bp, Oryza sativa
  Clone ID: PAT_MRT4530_45248C.1
aaccaaagcttattaagctagctcaagctctaatacacatttagctagaatggcgccgatcaagttcacagccgacgtcggcgttctcctggtcctgctcgtctaggaggcggagggcggcccagaggccgacgtgaccacctgcgtggcgctcgtgctggagctcagcccgtgcctgctcatcttcacggacagggcggtgacggaagctccagaagggtgctgcaccgcgctgaccgaccatcaggatgggctgggccggtgtgcctgcaccacactagaggaccacacgctggagcgcggcatagacgccgacaggcaccgtcgaccgggcgttggctctggttcgggacgtatgccgg

SEQ ID NO: 41952 - DNA, 2360 bp, Oryza sativa
  unsure (1)..(2360): unsure at all n locations
  Clone ID: PAT_MRT4530_45249C.1
caaatttagaagcttgcatgattaaggntctggttttaatgagacaaaacaacattaatgctgttagaaacagccattatccccaacatccaaggtggtatgagctgtgtgacatttttggactttatgtaattnatgaagccaacatcgagacgcatggctttgatgaatctagccatttcaaacatcctacacttgaacccttctgggcaagtgctatgcttgatcgtgttgttggtatggtggagagagacaagaatcatgcatgcattatagtatggtccttgggaaatgaatcttcgtatggaccaaatcactcagccatgtctggctggattcgtggaaaggacccgacaaggcccatccattatgaaggaggtggttctagaacatcctccactgatattgtatgcccaatgtacatgcgtgtctgggatattcttaagatcgcacaagacccttctgaaaataggcccctcattctttgcgaatattcacatgctatgggaaacagtaatggaaatattgatgcatattggatggccatagacaacactgttggactccaaggtggttttatatgggactgggtcgatcagggtttactaaaggaagatgctgatggatctaaaaactgggcatatggtggcgactttggagacactccaaatgacttgaatttttgtcttaatggcattgtatggcctgatcggacaattcacccagctgtgcatgaagttaaatatttataccagcctatcaaaataacaatgatggataacatgcttaagattgaaaacgtacatttttttgagacaacagaagctttggacttcagttggctacttcaaggagatggctgtgctttgggctctggttcacttaatgtcccatccatagcaccacagagtactcatctgatcaatatgaagtcatcaccttggtttactatttggagtacttgtgtcgtaaaagaaatatttttgtccattaacgtgaaattgaggtaccaaacacaatgggccaaagatggccatatcttggcttcagcacaaatttgtttacctccgaaaaaaggcttggtccctcatgcgatagcactgcccaggagctctttggtttcggaacgtgttggtgatcatgtactcatcagcaaaagtaatgcctggcaaatcaaagtaaacagtatttcaggaacaatcgatagttggaaggtcaacaacattgagcttatgagcaagggaatacacccatgcttttggcgaacaccaactgacaacgacaagggaggcttctacaccaagccctatgtttcaagatggagagaagcgtctctcgacaacatctcgttctacagcagccagttttctctgaaggaattgccagaccaaaccgtcgagatctccaccatctactacggtcttcctgggaatcaaccaaagcctgatgaaacctctctctcagacgaatccgagtccgtcctcttccgggtgcagatgcgcggccggatctacgactccggcgacgtgatcctggactacgaggtgagccccaagaacgacctgcctcctcttcctcgcgtcggcgtcgtgttcaacgccgacaagtccctgagccgtgcaaaatggtacgggagggggccattcgagtgctacccggaccggaaggccgccgcgcacgtcggcgtgtacgagagcggcgtcgacgagctgcacgtgccgtacattgtccccggcgagtgcggcggccgggccgacgtccggtgggtggcgctccaggacgccgacgggttcggcctcttcgcgtcggcctacggcgagtcgccgccgatgcaggtgagcgccagctactatggcgccgcggagctcgaccgcgcgacgcataaccacaagctcgtcaagggagacgacatcgaggtgcatcttgatcacaagcacatggggctgggaggggacgacagctggtcgccgtgcgtgcacgagcagtacttgctgccgccggcgagatacgccttctcggtgaggctgtgcccgttgctgccgtcgtcgtcgtgccatgacatctaccactctcagctaccctgttgatccgtctgagatgggcaagtgaggcaataaagcagagacgtctatatgctcctgtaaactaccggctgcaatgaccaggttgtttatcgactgtgaaataagcgagcgagcttgatgctattcctcaatcttgactacagtgtcaatttctcctatagatggcaatggggacccatgaccccgatacccgatgggtttttactctattagaagctaactcttatacttatgggtctattgatgggcganaattcttaccacaaaaaaaaaaaa

SEQ ID NO: 41953 - DNA, 981 bp, Oryza sativa
  Clone ID: PAT_MRT4530_4524C.1
atggggtgccgtgatgaaggaggtgaggacattgatgtcggccgaggtcaacgcagatcgagggaaaccattgaagattttgatgaagtagaaaagctaggaaaagggtttatatcggccgatccattagaggaaatagatataggtgatggaaatataccaaggccgacttttgtaaacaaaaacatgaaagccgattataaggttaacgattataaggttaagataatcgagttgcttaaagaatacattgatagctttgcatgggagtaccatgagatgccggaacttagccctgatcttgttgaacaatggctttcgataaaaccaggatttaggccttataagaaaccacctcgtcactttaatcctctattatatgatcgggtcaaggaagagatagaccggttattgaaggtggggtttattaggccatgtcggtatgcggagtgggtgtctagcattattccggttgataagaaggggagtggacataaggtgattagtttcttggatggtaacgccggctacaatcaaatctttatggcggaagaggatatgttttgttttcgcccaatggaggggaaggggaagctaatagaggagttagagaagccggccgcagcggggaggaggacacttgcatctagggtcaccgagggccacgcgccgccgcaactcccttcacgcattgccggggacgccgagggttgcgcaccaccccaatgtcctctacttgccgccggaatcaccgcagtttccttcgtgtcgccaccgaagctccctccctccgtgtgcagcggctaccttcacgcgcacctccatcagcaacacgagccaggccgcactgtgcccatgtgcactgagggtagccagactgtgccaccacccacatgcgctgagggtttgccaggctatgccaccgtggcggagtcagatgatgccaggagggagtctgatgttgcagaagaatatgactag

SEQ ID NO: 41954 - DNA, 1553 bp, Oryza sativa
  Clone ID: PAT_MRT4530_45250C.1
ccggccggggatcagttccccaaatcccccaccctatccaaactcttcctcccccgatccaattcgactccactccatctccctcctccggatccctaatgcacaaggtgtagaattaaattccggggaaatcgacggagtcggaggtaggcgtagcagcatggctggaggagatgactggtcgaagaggacgatcatggaggaatccctgcagccgccggcccacggcgctgcggcgactacaccttgggtcctcctcgacatccgtgctttcatggccaaccaccgcaacgccaccaccgccatgtccgagaccaggagcggccaccccatcgaggtatcctcgtggacggcgcctccgccgcgcgtctcctacatgcgtccactgccctggattggactccaagaagttcgccaccgagcccaccatcatcgccgcggaggccgacctcctcctcatccgcgtcgccatggggcgccggaacatccgcttcaagagcagcttccatgactacttcgtctaccaggccaccaccccaaccccgaaactcaccttgctcccgccccctcccatcgacaggttcatcgaccacgagcttggcctcctgcgctgttgcgcctctcctgattacattgttgctgcactctgtaacaccttcgaatcaggatactttgagtatgacctccacatctactgctccggcgctgatgcttggacctgccatccaatctccctccatggcctggtcgacacatcatttacccatatcaataccaaggcaatcaccattggagggaaggcgggcaccatgggctgggtcgacctctaccgtggtattctcttctgtgaccttctccgcgacaccactaagctccgctacttccccctgccgccgccgctcagtcccaacaactcgttaacaggctctccaaggcctcatcgtgacattgcccttgtccaaggtcggatcaagttcatcgagacgcggcttcatgtcaagccaggttccatcatcaacggcaccttcatctctcaaggttggactgctgccacctggactgcaccggacaccaatccctggaaccaaggttggcgccaggactgcaaactcactgcttccgatatctctgttgatgacagcaagatgaattttgagttgctgcctaagcttttcgatgaccaaggcacacctcagccaaccttggagagacttcatgtgggtcatccaacgctcagcttgcactctgatgacattgtttgcttcatggccaaggccgaccaatgggacgacgatgcttgggtgcttgctgttgatatgaagaacaagaggctaaaagttgtggctgagtttggtgcagaaagaacccttggcattggctatgcctacatgagcagtaacatatcagggtatcttcgtacagctccagagggaaatgatagaaatgagagctactatttagttgtcattgagccaggattttttattttgctggctgcagttctatttacgagggggtattgctggtactttgtaccgaggatgactatctaa

SEQ ID NO: 41955 - DNA, 1758 bp, Oryza sativa
  unsure (1)..(1758): unsure at all n locations
  Clone ID: PAT_MRT4530_45251C.1
tttttttttttttttttttttggaaaaaaaagatacaagtcattacataagctccacatgaataatgttcagagtacattatttagattatatacatgaagttaaagatttaacaatgtatgctattattgatcaaacaacacgtgacacatatatttgaacaataacgatataatatgctatcatttacaagatatatcgataatatcagaccatatcaaggaactctgatttgaaagcttggcccaaccgaattctgagctttaagacaggccattccccgagcaccttagtgagaattggcactaaaacagcaacagagcaaattccaacagctaaccatagcagccgaggggccaatactgtgtataaaccggttgcaaatgctgtagttgttgccatgtacgcgaaccacataagcttcttggtgaaggatctgtagtaaagcaagaaatcgagatcctcccatcttgctatgatgcatatgaacgcaacagcaagtgaggcgcacattgctaaggtatctgatatcaagaatgccttaaaggcaacgttccttgccattataggaagtccctggcttccagcatcactgctgtatcctccaggcagggtgaaagcagcagcaaaggtaattgttgcgatgaggatcgccactagcgaagtgttgcttgtgtatgtttgagtcagcgaccttgcatccttccttgacgcattgatcaacttttctttggcttcctcgtgaagattataaacggattttgcatttggaggatcagctttaatcataagcattgacacttcattccagtttaatgtcttcgcactatccaaggcatcccgtanttcccaagcggctgcattaccgtcactgccaagaattgtcaagtctattttcttgtcaagtaaagcagcaacaattttcggatcacacttctggatggcataatgtagagctgttttccccttgctgctacgcatgttcacgagtttctgatttgacagctttatgaagacatgtccacccatcttttttgcaatatggagcatagctagctgaattggagtattaccatccttattttcttctgtggccagatttgggcgttcaacgatgattcttttagcaatatctggatttccatttctaatagctgcatggagagcattgtagccataggttcctgaatgagaagaaccatcaattcccaacagtttctcaaaaatatctgtaaacttagaatccctcatcatcaacgcaatgtacatgggagactcgccgtatttgttgacatctttggacaaggcaggctgagtcgctatcaactccagtgccaggtccttgtggccgttgcaaatggcatggtgcagtgcattacatttgtgcttgtcctgtttcaagattacctcactgaatccttgttcatggcagtatttgagtagaaaagcagctaaagtaacatggccacttgttatggcagtaagcagtggcgtctcattcatcacattcacagtagtgagtagtttcttcttcacggttggatcctgtggaagtgaaagaacatctttgcaaaattccaaatggccacacatggaagatatatgaagacatgtgtttccttgtggattttttccaagcagaattgtaggatcatgtgaatccatgtacttcatcttcattgacctggtatcaccagatatggccgcttccaggagctcccaatctatggttgcagtactggctgcacaggctgccat

SEQ ID NO: 41956 - DNA, 1255 bp, Oryza sativa
  Clone ID: PAT_MRT4530_45252C.1
attataggaagtccctggcttccagcatcactgctgtatcctccaggcagggtgaaagcagcagcaaaggtaattgttgcgatgaggatcgccactagcgaagtgttgcttgtgtatgtttgagtcagcgaccttgcatccttccttgacgcattgatcaacttttctttggcttcctcgtgaagattataaacggattttgcatttggaggatcagctttaatcataagcattgacacttcattccagtttaatgtcttcgcactatccaaggcatcccgtaattcccaagcggctgcattaccgtcactgccaagaattgtcaagtctattttcttgtcaagtaaagcagcaacaattttcggatcacacttctggatggcataatgtagagctgttttccccttgctgctacgcatgttcacgagtttctgaagtcgtggttccccaaggataaactcaacgaattccatattacctgatttgacagctttatgaagacatgtccacccatcttttttgcaatatggagcatctgggcaatatttgataatctctcgggcaacagcaacatgacctcgatgtgcagcagaaaggaggagaggataaccattttttctgttgataacatacccttgagatctgtcatgtttcaacaatacactcgtagcatgtcgatctttcccccacggtacagctagctgaattggagtattaccatcccttattttcttctgtggccagatttgggcgttcaacgaatgattcttttagcaatatctggatttccatttctaatagctgcatggagagcattgtagccataggttcctgaatgagaagaaccatcaattcccaacagtttctcaaaaatatctgtaaacttagaatccctcatcatcaacgcaatgtacatgggagactcgccgtatttgttgacatctttggacaaggcaggctgagtcgctatcaactccagtgccaggtccttgtggccgttgcaaatggcatggtgcagtgcattacatttgtgcttgtcctgtttcaagattacctcactgaatccttgttcatggcagtatttgagtagaaaagcagctaaagtaacatggccacttgttatggcagtaagcagtggcgtctcattcatcacattcacagtagtgagtagtttcttcttcacggttggatcctgtggaagtgaaagaacatctttgcaaaattccaaatggccacacaggaagcggacgcgtgg

SEQ ID NO: 41957 - DNA, 162 bp, Oryza sativa
  Clone ID: PAT_MRT4530_45253C.1
ctgggaagttctcagatgttccgacatgttcacatcaaactcacttaaaccgaacccgtacgaaaccttccggaatcgtctgatggaggcctatttcctgtgaggacccaactcttcggaaggcctgcttcttgctccgcggagtgttgccaccggattggt

SEQ ID NO: 41958 - DNA, 185 bp, Oryza sativa
  Clone ID: PAT_MRT4530_45254C.1
gaattctggcacgaggctccttccttcgcagctagtgatggaggcgaggccctcaagctcaatgcctgacgaatccaagctcgtcgtcaccaccaatcacgccgtcgtcaacaccgaatccggcgactcctcctcctcctcctcggtcgtcggcggctgcggaggaggaggaggaggtcgccgct

SEQ ID NO: 41959 - DNA, 328 bp, Oryza sativa
  Clone ID: PAT_MRT4530_45255C.1
tgtgggcgccctccttttttttttgggtttaaggaaatatggggtttgcattacaaaattataataactaccatgcacttattatttttgacaacggggcaaccaccttaaagacagttaattatagttcaagggaaaccaccccaaggccaacaatgacttgactaactaggataaataattataacaacacagactacccctagaatcttttggtaagggtacacggataatttgcctttgaaaagggagggatgttgcacagcacgacaggctgcatcaaagaaagcgcctgaggcggccccattttgctacataatgctacaac

SEQ ID NO: 41960 - DNA, 766 bp, Oryza sativa
  Clone ID: PAT_MRT4530_45256C.1
ggcagggcgggcgagaaaagcttgctgatttgtgatggctgccccaactgcaacagctgtttttcttgatgagatggggactcatgcagaatggcctgctggcaagagggctgatggattgaaggccaagccactgaagccattagcagcaaagcaagggcttcaagagaagaaggccctgagggatgtatccaacattggcaagcccccggtgtctacgcggaagcccctgcaggacgtgtccaacaccgccaagccccgagggcgcaacatttctgatggcactaccttgaagaagactgctcttcgcagccatgaggccaccaagaacccagtgaagaagactgtaatcttttctgatgagaccgcaaaatgtcatgaatgggctaaggatggggtggagggcacccacttcactgggaatgattctcagaagttggaaaaggacagtcaagacaaacgtgtcaagaagaaggtggagaaaataatgtcagcattgcacgactggccagacgcggtatttgatcatgtgctttttccatctgaggtggtagcagcgttttttgaagaagtaaaagagatggagctggaacctgagattcttccagagaacaataggcgtcgctcaagttcaggtgataaaatgaagctggctgaagatcctttcacggaagacgagcttgactactacccatttcttgagaacaatcccgttgagtttcagctgagagatgagctaccactcctggagcctggaatgaactga

SEQ ID NO: 41961 - DNA, 240 bp, Oryza sativa
  Clone ID: PAT_MRT4530_45257C.1
acggtggtggttcttgttggtgaaactggtgattcatattacgaagaattgtttggaggtcttcataagagcggcatccttaaggttgaattcaacacatatgcgaatagaattcattctgttaggcggtatgctttacaagatgacgccaggctcgatgacccaaacattatagaaaatggtggttcttgtactgacaacgtgaggtacgctttgaaacaactcgatatacgtgtactt

SEQ ID NO: 41962 - DNA, 300 bp, Oryza sativa
  Clone ID: PAT_MRT4530_45258C.1
atggcgccgtggtggccggggcgcgagggcttaccacgggaaggcgagacggcggatttcggcgggcgcggcgcggtgcggacgaaacaggggcggctagctgtcgacgacagtcgcaggtgttcgacgcctggtctccctcgttcagcggctcccggctccctccaacagcagctacagcaacgcgagcaactcctctccacaccccgccacccacaccggctgagaagccctgtggcggcggcgcagccctcgctcaccaggtttggttccatgcactggcgcggcatgattgcctag

SEQ ID NO: 41963 - DNA, 234 bp, Oryza sativa
  Clone ID: PAT_MRT4530_45259C.1
atgaggttgccggccgtctacgccgcgccgccatcgcccatcgaggccgtcgcgcatcgaggccgtcgccgctatcgcgcatcgaggccgctgtcgccgctgccgctgccaccgcccatcgaggccgtcgcgccgccgtggcgcatcgaggcagtcgccatggactgcgagctctgtcttctcatgagcacgagagaaagaggagaaaagacaaaagaaaaattgaatgggtag

SEQ ID NO: 41964 - DNA, 1510 bp, Oryza sativa
  Clone ID: PAT_MRT4530_4525C.1
atggacggcgacgaccggcggaccccgctgctgggcggcgagggcggcagcacccgcccgccgtcgctgcggcgccgcgactcggcgcgctcgctgcggagcaccttcctgtcgcggctgcccgacaaggtgcgcggcggcggcgaccccgagcgccccgccgccgacgtcgacctcacccgcgccaaaggcctctcccaaggtgaaaaggagtactatgagaagcagttggctacactgaaaatcttcgaggaggtggaggcgctgtgcatgcccggcgaattcgagtcggatgccgaggtgctcgagctcgaggacaaggagcagaagcagagcgagtccgccatgaagatatcaaactacgccaatatcatcctcttggttttcaaggtttatgccacgatcaagacgggctccatggcgattgctgcatccacgcttgattccttgctggatttcttggctgggggtatcctttatttcacacatcttacaatgaagagtgtgaacatttacaagtatccgatcgggaaattgcgtgttcagcctgttgggatcatcgtcttcgcggccatcatggccactctaggtttccaagtcttgatccaagctattgaacaactggtggagaacaaggcgggagagaagatgacaccggagcagttgatatggttgtactcgatcatgctttcagcaactgtggtgaaacttgccctctacatatactgcagaagctcagggaatagcattgtccaggcatatgcaaaggaccattacttcgatgtcgtaaccaatgttgttggtttagtggctgctgtgcttggagataagttcttctggtggattgacccagtaggggctgtgctacttgctgtgtataccattgtgaattggtctggaactgtatacgaaaatgcagttacactggtgggtcagtgtgccccttcagatatgctgcagaaactgacatacctcgccatgaagcacgatccacgtgtgaggcgggttgacacggttcgagcttacagctttggagctctctactttgtcgaggttgacatcgagctatctgaggatatgcgcttgggtgaggcgcactccattggtgaatcgctgcaggacaagatcgagaagcttccagaagttgagcgtgcttttgttcatgtggattttgagagcactcataagccggagcacagggttcggagcagattgccctctactgagccttgagcccttgacagctccagttttactcttgtgcagtgtactgaaattctggtactgtagtacagtcttccactggtttggtttgtcgctgaggcagcagaaggcttatggttacacgtacacggtgacggtaggtcggtagctggcttttgggtagaggaatctgtatgtctgagtgaaataatactggattcgccatttggtgcgtttccttttttgtttccaaaaaaaaaaaaaaaaaaaaaaaacccgaaactaaccaaaaaaaaaaaaagtgccg

SEQ ID NO: 41965 - DNA, 1530 bp, Oryza sativa
  Clone ID: PAT_MRT4530_45260C.1
atgagacaccaaatcacattatccgtcctaatcatcatcctcctagcactaggcgcatcagtcacagacgcgtcgtcccattcccaggaggatcagctcatcaagttcatggagtccagggccttgaagaggctcagaaacaggcccaacaaaaacgggcctggagaagacgaccaatgggccgatcccggcagattcagccacctggcgacgcgcagcgtcagctcaccggagagcaccaaggaggacgacaggatcgccgcgctgcccggccagccttgcggcgtcaacttcgcgcagttcgccggctacgtgacggtggacaggaagaacggccgtgagctgttctactacttcgtcgagtccccctacgacgcctccaccaaacctctcatcctctggctcaacggagtggttttaatcgagtttatagggcctggttgctcgtcgctcgggttcggcgcgatgaaggagcttggtcctttccgggttaaccccgatggcaagacgctaagcaggaacaagcatgcttggaacaacgtggctaacgtgatcttccttgagtcgccggcgggtgttgggttctcctactcgatgaactcctccgactacagtgacgtaggtgaccaaataacggcggaggacacatatgttttcctgctcaactggtttaatcggttcccggagtacaagggccgtgacttctacatcgccggtgagagttatggcggccactacgtcccgcagatcgccaccattgtcacgtttatcaaccatctctttgacggcaatacccccttcaacctccgtggcatctttcaagccagcaagggcgccaaacgaggtggagaaggctgtctagttgtggtccatgatggcaacaacaatggaagatggtggcttggtcaggttggcaatccgctgcttgatgagtacaagaacggggagggtaacctggagttcctgtggagccacggcgtgatctccgacgaggtctggggcaagatcctcgccaactgcaccttcacctcctccgacgactggccgtgcttcgtggcggcgcactcgttccagagagtgaacatagatcgctacaacatctacgctccggtctgcctccacgagcaagatggaacctttcgatccagcggctatttacctggctatgatccgtgcatcgactactacatccctcgttacctcaacaatcccgatgtgcaaaaagcattgcacgcacgagctgacacgaactggtcaggttgcaatggtgatatggattcaatatgctcacttactgcgacaaggtactccgtcaaggaccttaatctgactatcacgcataagtggcgtccttggtacacacctgataatgaggttggaggctatgttcagcagtacgaaggaggattcacgctagcatcagtgaggggagctggacatctggttccatctttccagcctaagagatcacttgttctcctctactctttcctgaagggcatgctcccacctgctgatatcccgaagtaa

SEQ ID NO: 41966 - DNA, 225 bp, Oryza sativa
  Clone ID: PAT_MRT4530_45261C.1
atgagctgaagctctcgtgcgcggcgcgggcgtgaaggcgtcgtcgtcgtcgcaggggcagagcccgaggacgccgtcgccgcgcgccacctccgccaccgtcgagcacacgcggtcctccttggagccgtggctcgtggtggcggttgtgtgttgcaccttttacgactcgtgcgttaactaccttcagaacttttcgcgcaccgttgtctccgcccagtttat

SEQ ID NO: 41967 - DNA, 305 bp, Oryza sativa
  Clone ID: PAT_MRT4530_45262C.1
ctatggcctgcgccaaaccctagctccgtgcgagagagccatcatcgccggatcatcctcaggggggagaaagagagcggaggctgctgcaggggcacgacgccgcaggtagggcatgaacccatctatggtactactatacctcatacccaaaagagccactctctaccattcttctattccaaggagaaccgcggaaaacctctatcctccccagttctttctctgcacccactgccagcgccgcaagtgaatttacccaagtataaccaaccactctccggcggctgaggcaccctacctta

SEQ ID NO: 41968 - DNA, 882 bp, Oryza sativa
  Clone ID: PAT_MRT4530_45263C.1
acccacgcgccggccgggatcctctcctcgatctctcctgcaatcctcatcacacagcaaacccaaaccgcgagcggaatcctcagcctgctgagagagcctgagaccaagagggggattcttttttggttattgacgatggcgcagcgcgacaagaaggatcaggagccgacggagctcagggcgccggagatcacgctgtgcgccaacagctgcggattcccgggcaacccggccacgcagaacctctgccagaactgcttcttggcggccacggcgtccacctcgtcgccgtcttctttgtcgtcaccggtgctcgacaagcagccgccgaggccggcggcgccgctggttgagcctcaggctcctctcccaccgcctgtggaggagatggcctccgcgctcgcgacggcgccggcgccggtcgccaagacgtcggcggtgaaccggtgctccaggtgccggaagcgtgtcggcctcaccgggttccggtgccggtgcggccacctgttctgcggcgagcaccggtactccgaccgccacggctgcagctacgactacaagtcggcggcgagggacgccatcgccagggacaacccggtggtgcgcgcggccaagatcgttaggttctgagaggcaaacaaaattaaaaaaaaaatctactgttttagcaagaaatggagaaaaaaattgggaattgaaggtgtggatgttattattatgctgttctcttctcgcaattgtttttccctttttattctttttaattgcaaacgggaggataagtggtggaaaaggaatagtgtaacaataatggtgatgtgaggtggttgagggaaaaagaatcgaagaacaaatggattgggtgtgtatttgtctcgc

SEQ ID NO: 41969 - DNA, 1629 bp, Oryza sativa
  Clone ID: PAT_MRT4530_45264C.1
ttgttctgctcgtcgttgctgcggatcgcggccttacgccagctcttcttgatgccagcgaggacgcctgcctggcaggaggcacactggaaggacgcttttttttttttttttttcttttttttttttatcttttacatgatgataacatattcatctaagattatgccaaatcaaaatctccaatggtacagcacaatacattgctaaatgagggaactactcttgtttcttgcagatctcatcttgtacccagtacacaacagacctaaccctaaacactatagcaagcacaaaaccaaaccagactgaacattctgaaacaagaactactttcctttttcaccacccaaagtgtagctgattccacattccagtaaataatatataagagattcagacagagccttagcaccaccaattgtggtctttttgtacaggcaaaggggcaaaggctcccagttcttcactatctcagaactggaacctgctaggttgagtcttggtcatccttgccataccaaacggctcgtcgttttcgatcctcctggcgttgcggaaagcggcacagccagcaacatacacgatgacgaggatgatcagcacgacgatgttgaggatggcaaccttacgccagctcttcttgatgccagcgaggacgcctgccttgcaggagtcacactggaagcaaagcgtctgctggtcattgctccacttgctgcagtccacatcattcacgacggtcggaacgccagggtttgcggtccagaacgtttcgttaacatagttgtatgtcacacgatgttggtggcttgcagcatccagacttagactgccaagtcttgtcgacaggaacaaacacaaatataagcgaatgcataaaaagatatccactgcaatagtggcaactctgaaacgtcttagtattatttggtcttagcaattgcaccagcaaggtcacctggatgggggagaggtcgcgggcgtagaacatggagggggtctcggggacgagcatgccggtgttggggtcgcgggcgaagcggcgcatggcggcgcaggcgcggccgtcgcggaggcaggcgctgatggtggcccagtaggcggggtcggcgacgcggtcgcggagccatccgttgtagtcggagagctggtactcgaggaaccgccggttcatcaccacctggccgtcgccgcggtcggtgacggcgaaggcgaagacgatgaagaagaggagggcgacgacgatgaagaacatggcgaagaggtagaggcggagcagccacgtctggcggtagcacgcccccgcgaaccccatgagggacaccaccataacggcgagcccgatggcgatgatcggccactgcaggaagcggatgcagtcggtggagttggccctcgacgccagccagattcctccccccaggatcgggatcgagatcaggaacgtcacgaagttgacgatccccagcaagctcgtccctcctcgcaacatccttgctcttgctcttctccttcttcttgaatcaaaccaccacctcctcttctcctgcttcaattcttggactcctcctcctctgcttcctcttcttctctctctgcttcttgctctgcaactgcaaatgagaa

SEQ ID NO: 41970 - DNA, 4050 bp, Oryza sativa
  Clone ID: PAT_MRT4530_45265C.1
atgtcgctgcagccgccggcggtggagccgccggagtggctgcggacgctgcccgtggcgccggagtaccacccgacgctggcggagttcgccgaccccatcgcctacatcctcaggatcgagccggaggcgtcccgctacggcatctgcaagatcgtgcccccgctcccgcggccccccgaggacgacaccttccgccgcctccaggccgccttcgccgccgcggcctcctccaatggcgacccctccccgaccttccccacgcggctccagcaggtcggcctctccgccaggaaccgccgcgccgccagccgccgggtgtgggagagcggggagcgctacaccctggaggcgttccgcgccaaggcggccgagttcgagcccccgaggcacgccgcgccgcccaggaaccccacccacctccagctcgaggccctcttctgggccgcctgcgcctccaggcccttcagcgtcgagtacggcaacgacatgcccggctccggcttcgcctcccccgacgagctccccgacgccgccaatgccaccgacgtcggggagacggagtggaacatgcgggtggcgccccgcgcccgggggtcgctgctccgcgccatggcccgcgacgtggcgggcgtcaccaccccgatgctgtacgtggccatgctctacagctggttcgcctggcacgtggaggaccacgagctccacagcctcaacttcctccacttcggcaaggccaagacctggtacggcgtcccccgcgacgccatgctcgccttcgaggagacggtgcgcgtccacggctacgccgacgacctcaacgccatcagtgagccattatgtgactgcaatagcttgtaaactgtcttatctcctgaggtgcttctttctgctggtgttccctgctgcagattggttcaaaaagcgggagaatttgttatcacattccctggagcttatcattcaggctttagccatggatttaattgtggggaagcatcaaatattgcaactccccattggttacaagtggctaaagaagctgcaatccggagggcttcaactaattgtggtccgatggtgtctcattatcagctgctttatgagctagcactctcattgcgtccaagggagcctaagaatttctattctgttccaagaagctcacgtttaagggacaagaataagaatgaaggtgatataatggtcaaagaaaattttgttggaagtgtaaccgaaaacaacaatttgcttagcgcccttctggataagaattcttgtataattgttccaaacgctgatttcttcgttccatcctttcctgttgcactggaatctgaagttactgttaaacaaaggtttacagctggtccctgcagtattagccagcaaggagcagaaaatatggctgctgatcatgtggctgtagacaaggttacagagattcaggacatgagtggatccttatatccttgtgaaaccagtcttgtgggctgtagcaatagaaaactttatgaaacaaaatatggccaacgggatgctgctgctttgtgcttatctacttcagagattcagagcagaggaattgatacagcaagatcacatccagcaggcgggatcttagatcaaggacggttgccatgtgtacagtgcggaatactaagctttgcatgtgtagccatcattcaacctagagaagcagcagtacagtttatcatgtctaaagagtgcatctcatcgagtgcaaaacaaggaggaattggtgcatctgatgatacctcaaactggattgaccagagtcatgagattagtcctccaccaggtccagcatctggaacagatgataatgtaaagcatgccgtaagtttggcccatgtctctgatcggtgtagagaactatatgccagcaatacagatggatgcacctctgctcttgggcttctagcttctgcatatgactcatcagactctgatgatgaaacaactgaggatgtttcaaaacatagcaagaaaaatgattcagtaaaccaaagcacggatcctcaaatcttggaaacatcagctagctgttccagtacagttcagtgtcaaaagacaaattcacacttgcatgaagaggaatgtgaggcaagagccacatcattgatgaaacctgtaagccataatagtaggcccattagtcagtctaacagggatacagatatcgaccattttatagaactgggaaagtcaggaacacagtgttcaggttatcttgatttggttgatgatctaactacatcagttttaaaatcctcttcagatacttgtgtaagtgcagctaaagcctcaatggatccagatgttttgaccatgctcagagaaaaaaaaacatgtgtttacaactacatgagcaactacaccaagggcataaactgcaaataccctagagcagagtcagcagcaaaagtcatagcagaagaacttggtatcaagcatgattggaaagatatcactttcaaagaagcaactgaagaggacgttaaaaagattcagttggctttacaggatgaagatgctgaacccactggcagtgactgggcagtcaaaatgggtatcaacatatattacagtgccaaacagagcaaatcaccactttacagcaagcagataccatacaattccatcatttataaggcatttggccaagaaaacccagacagtttgacagattatggatgtcaaaagtcaggctcaacaaagaaaaaggtggctgggtggtggtgtgggaaagtttggatgtcaaatcaagttcatccacttctagctcgtgagcgtgaagaacagaacagtagcgtagtgtacggcaaagcaatgttcactactatttcccatggcaaagtacaagatgaagcgtcaacaagatgcaatacaagcaaccgaaccccatcaagaagaacatcaagaagaaaaaagggggtatctgctgagaaatctaaaccaaaaaacaagagatccactgcttctgatgaagctagtatgctttgcagtggccttggaatgaactctggagttatccatgaccaaactgaaaactctgatgattatgacaaacatggcaatggagatgaaattgaggaaggaacaaatcctcagaaatatcaacaacgtaaattgcaaaacgtgaccaggaaatcaagttctaagaagcggaaggatgagaaaagaacagatagttttcatgaactatatgacgaggataatggtgtggattattggcttaacatgggtagtggagatgatgccacactaggtaactctcgacaacaaagtcctgatccagtgaaagtgaaatctggaggcaaattgcaaggtaagagaaaatctagcaagtacaagtccaatgatgatttgttgaatgaagaaaataagttacaaaagatgaacaaaaaatcaagctctaagaagcaaaagaatgataagataaatagacaacttcaagaagatcaaaccgaagatgaccatatggaccacttagttgacgtagcggttgcagatgaagtcacactagacaatgaggataaaattacagaagacaaaattgatgacgtgaaagtgaaatctagaggaaaatcgcaaaatggtaagagaaaaggcagcaaacatcaggctaccgatggtttgcgcgctggaaataaagtggccaaatttccgtgtgatatagaaggatgtgacatgagcttcagtacccagcaggacttgttattgcataagcgtgacatttgtcctgtcaaaggatgcaagaagaagttcttctgccacaagtacttgcttcagcaccggaaggtgcatatagatgaaaggccacttaagtgtacatggaaggggtgtaagaaggcattcaagtggccatgggcgaggacggagcacatgagagtccatacgggggtaagaccttacgagtgccaggaacctggctgtggtcagacattccgattcgtttcagatttcagccgccacaagagaaagactggccattcctctgataagagaagaaagaacagtacataa

SEQ ID NO: 41971 - DNA, 331 bp, Oryza sativa
  Clone ID: PAT_MRT4530_45266C.1
tatacatccatgtcaatacatatgcttttcatacttttgtcgagataatgttacacaaaacaactacaataagtatttgcatagtgtcagtgcaaataacgttatgcaaagtcatagactacatcacaaggggatccaagctagctactcaggtctgcaagaaccaccagaaagttcaaacatccacactgacacgggggatcctattcagcacatagctcatccacaccacacacaattacatacgtgaacaaaacaaaagtgcaccaaggacaaaagctgcggtttgcaattcagaacagaacaaaacaatctcacataaggttcaaca

SEQ ID NO: 41972 - DNA, 311 bp, Oryza sativa
  Clone ID: PAT_MRT4530_45267C.1
acacagccggtggagggacaaaataaattatttatttgcatcctgaacagaaaacggggtcaagcccccaataaatttaccccacaggcttgaaaaaaaaaccttacggggttggtttgcacaaacttccccataaaaacgggaaaactgttttctccacaaagaaaatttcagtagacctgttgcctcaaccaaaaggggggacgattcatcaggtttaattggggaaaatccggggggcttccaggaaagcatcaggcatgaggcttttcatgaccaacttgatgaaacggggacggggggagggaaaa

SEQ ID NO: 41973 - DNA, 348 bp, Oryza sativa
  unsure (1)..(348): unsure at all n locations
  Clone ID: PAT_MRT4530_45268C.1
tgcacgtgtcgtcataggccgtctgtctacatcgccgtcacctcgacctattgctccttagcgccactggaactacagccagagcaccgtctgccactctagctcagttgccgttggttgcggcctcccgtcgcccacgcctcaccactctcaacgccgtcaccgcatcggcctcttaccgttgatgggtgtgccaacctctacgcatgtaggaagatcgaccaaatcttctgttaatatagtagtagtgactgatatgtgaatccgaatccatatgttagtatgtactattgtaccaataatactgcagataatccctaccaaanggaaaaacaattaggtcttggg

SEQ ID NO: 41974 - DNA, 1465 bp, Oryza sativa
  Clone ID: PAT_MRT4530_45269C.1
ccgcgcggcgcagccggagagcacgtgcagagagatggccgtcaactccggcgatcgcgcgcgcgcgcgcgggcaccacggagacgacgacgaggagggtgtggccgtcgtcggcgaggactacccctactgctctgactcggattccgacgacgacgacgacgtcgaccgctacgtgttccttgcacgccagcccgcgccgccggtggaccgcgacgatgccgaagccgacgccggggcggaaggaacgggttgttgcaaacggaagaggcgcgtcgtcgacgacgacgaccatgatgacggtttctcgccgcgccagccggcgttgctggatggcagcggcggccaagcggcggaggaggaggaggacgccgaggggagctctgatgatgatgacgcaatggcgccgcgtggggaggcaggaggcggcggccgcggccgcggggtcgggaaggtatcacgcaagaaggctcgactcgtcgacctgatcagatcgccattgttgccggccgagctggatggttcggataaggcggcgccgccacctccgcgcggcgtgtgtcccaagaagatcgcggtggtggtgcaggcgaagaacaggaagcgccgcaggttcgtcgacggtggcgaggagcaggagccgcagccgcagccgccggtgcgcggcaagagaagcagaggccctgacctcgaggcgagcgagggtttgcaaacggcttcggcggcggcggcggcggcggcggcagaggcggcggagagagcttccaagcgcttcgtctgcagcatatgcgggaggtgcttcggcagccaccaggcgcttggcgggcatgtcctcggccacaagaagaaagccaagaacgccgccattgccgccgcagcgcgcgacgccacgacgacggcggtcacggaggccgtggctccagcaagccaaaggcaaagcttcttcgccgccgacatcaacggacaagacgagcgtggatgcgatggcgccgagggcagccgctacgacgacgacgaggagaagagccccgtcgtcgttgacgacgttgcagcatgccatgacgcggacgtcgacgaaagccgcggtcacggtaaggccgagtcggcctctgccattgatgccggcggggacgcgggcaacaacaaggtcgcccatggtgacggcgaggagaacgacaagatcgccggcgtcgtcgttgcatcaagccacgacggcgatagcgacgtgggcaagatgaagatcgtgcagcacaagtgcgacgagtgcggcaaggtgtgcctcacggggcaggcgcttggcgggcacatgagcaagcaccggcggacgcgaccggcggccaacggcggcgaggggcctgcaactgcaacggtggcggacgggggagcccaaactgttcggctgatcggcgacgatgtttgcttgcagagagcggtggcaatcgctgggtttcactcggctcagtaa

SEQ ID NO: 41975 - DNA, 699 bp, Oryza sativa
  unsure (1)..(699): unsure at all n locations
  Clone ID: PAT_MRT4530_4526C.1
cgcanttctctccctctctcttacttatagcagcagcagatccgcctcccgaaacccagctctttgtgatcctcaagagccgcctccaacccccaatccacgcgcgacccaagaatccgagaaatttttctgtccagaataagagggtttggtttgattttgggagctccagttgttttcttctcctccttcttcttcttcttctttcttgcaatttgaggaggtttgctctggtttggtttggttctttgttgttgctgccgctgccgcggcgaatggtggcgacgcgaggaagggaatgggttcgttctcctgcgccgcgggcgatctgtcgtgtcgagatagtggcgcgccctgacctgagagatgtttgttcttgttgatttttgtgtgtttgtttgactgaaaggtgctcgtccttttcggaaagtgagggggtttgttcttatttctggttcttgattattattaggattagtttgttcctttgtgtgattcgattccttgccgcgccaaatcttggtttgagatttttctcttttccttttctctctcttggattggatcctttgcctccctcgccgcccattcctccgtgcgatttgagtacttcttggagtgagttcttggtgagtgagatccagtactttgaggaggatctagaggagatggtttcgagatcctactccaacttgctgg

SEQ ID NO: 41976 - DNA, 856 bp, Oryza sativa
  Clone ID: PAT_MRT4530_45270C.1
gcacgagggcagtcctcaccagcctatggcgtccgccgccgttgccgccgcggccgcgccgctgcggcgttcgctccttccctccctcaacccgagctgtctcttctcctccctcgcgtcctcctcgcaccgcctatctctaccgcgcgccctccgccccgcgggccctttgccctccgatgtcgaagactcggacgattcgaatgccggagacggcgccggcgaggccctcaggaagagccgcaacgacctgaaacgggaggctcgtcgcgccgtgcagtggggtatggacctcgctaagttctcccctccccagatcaagcgcatcctcagggctgcgtcgctagatcgcgaggtgttcgacgctctcatgctcgtgaagagatttggatcagatgtgcgggaaggaaaaaggaggcagttcaactatatcggaagacttctgcgtggtgcacaacccgaattgatggacactctaatccagtattcgaaggatggcgatgataacaggttacttgcattaatgagtgaaaatacattcttgatggaagatgaggaaatagaggacttgccttgcaatgaagaagagggtgacaaagagcatattgaaattgcagatagatggtttgagggcctcctttccaaagacatttcagttactaatgaaatttatgcgatacataatgttgagtttgatcgtcaggaactgcggaagctcgtgaggacagtccacatggtccaagataatatagaaaatgaacatgaagaggaatctaccatgaagcttttgggagcaaagaaacaacttttgtgcttccttcgctccattgctaaggaggcatacgtcaaatcatag

SEQ ID NO: 41977 - DNA, 1047 bp, Oryza sativa
  Clone ID: PAT_MRT4530_45271C.1
atggcgtccgccgccgttgccgccgcggccgcgccgctgcggcgttcgctccttccctccctcaacccgagctgtctcttctcctccctcgcgtcctcctcgcaccgcctatctctaccgcgcgccctccgccccgcgggccctttgccctccgatgtcgaagactcggacgattcgaatgccggagacggcgccggcgaggccctcaggaagagccgcaacgacctgaagcgggaggctcgtcgcgccgtgcagtggggtatggacctcgctaagttctcccctctccagatcaagcgcatcctcagggctgcgtcgctagatcgcgaggtgttcgacgctctcatgctcgtgaagagatttggatcagatgtgcgggaaggaaaaaggaggcagttcaactatatcggtatctttacttactggactctactggtggtattccccgaggcgacctatatccccaccaatgtgatctccattacagatggacaaatctgtttggaaacagagctcttttatcgcggaattagacctgctattaacgttggcttatccgtcagtcgcgtcgggtctgccgctcagttgaaagctatgaaacaagtctgcggtagttcaaaactgggaagacttctgcgtggtgcacaacccgaattgatggacactctaatccagtattcgaaggatggcgatgataacaggttacttgcattaatgagtgaaaatacattcttgatggaagatgaggaaatagaggacttgccttgcaatgaagaagagggtgacaaagagcatattgaaattgcagatagatggtttgagggcctcctttccaaagacatttcagttactaatgaaatttatgcgatacataatgttgagtttgatcgtcaggaactgcggaagctcgtgaggacagtccacatggtccaagataatatagaaaatgaacatgaagaggaatctaccatgaagcttttgggagcaaagaaacaacttttgtgcttccttcgctccattgctaaggaggcatacgtcaaatcatag

SEQ ID NO: 41978 - DNA, 1387 bp, Oryza sativa
  Clone ID: PAT_MRT4530_45272C.1
ttataaccctggaggatcgtaaccagtaaaaagagaataaaccaccacccacacaccgacatcgtcaacacacaagcccagaaaaaggctagcaccggaccagccgccgctaagcatgaccgaccgccactggaccaacaaagggacacaaacgagatcgtcctcttgaggatgccaaaacgacgtcttcaagaagagaagcgacagaaaaaccgtcgtcgccgtccgtcgggactctgttgacagaaaacacgaggcctgggagatctgcttaactccagtgcaggtccaaagcgtgccagttgatttgatccgatgctccaccaccacacaagctctaccgacacgtgggacccctgcaccggcgtcccccgccagccagccttcatgcgccgaagaccgcgccacacccaccggcagctcctccttacacctaggtcgcctcctccaccgccggcaactcctcttcacatctaggtcgcctcgtccaccgccggctgcgcctctcgcgccaagttggcctccttcaccggacgcgcctctcgcgccaatccggcttccctccatcggccacgcctctcgcgccaagctggcctccatctccgccgcccgcgcctctcgcgtcgagccggcctccgcaaaccgctgcaccgtcgcccgccgccaccaaacagattccttccccgcctccactgccgcatccgccaaatgtcaccgccaccgccaacgcagccgctgctagtaaccgccccgacgccgtcgccatgccctccgccgcggtcgccagccaacgccgccgccgccacgaccgccaccagccgcccagcaaggacgtggagctctcccgcgccagatccgcccacggggaggccggatctgcctccggcgcgcctggatccggcccgccgtcaccagcctcgccgccacctccatccccaccgccatcttcatccctgccgccgacggcccccaacaacagacgcagctcgccatccccaacgccgtcatcacccctgccgccaccccctcgaaggcggaaaaaccaaccgccgagttcgtcctatccaaacgcaacggcgccatttcctatcctcccgcttcctccctcccccccacccgccgctcgccgccggccgccgccgcgcctcccccaatgcttcgcctctccgccaccacgctctcccccctcgcctcgcatcctcccctctccggcctccacctctgcccgcgctgccgccgcctcgtcctccgcctccgcgccctcccggccccggacgcgtcgccctccgcgcgcagcctccgcctcctcgagtgggggaaggtctgcgacgccgtcgcttccttcgccggaaccgcccacggccgggaaaccaccaaggtacgtgaa

SEQ ID NO: 41979 - DNA, 361 bp, Oryza sativa
  unsure (1)..(361): unsure at all n locations
  Clone ID: PAT_MRT4530_45273C.1
cttttgttgttctgggctaacaatcctattaaggactcttgcttctacttcacacagttgatctggtactttgcactccatgtgtattcctgcgctgtgttctacgaatacattggtgtaaagcatcccgcacgctacctggaagcaatgttttatacaatactaacaaccaacggtggcctgatgaaagtacttaagttcatgtttttgggacaagaatgagaaacattttccttgtctggtgatatagaatagggggatattataagtcccgatgtataaatcaaattcaccatgnnggattgcagatgtgatctacttaatgaaatnggggatttataacgttacatgttccttcaat

SEQ ID NO: 41980 - DNA, 286 bp, Oryza sativa
  Clone ID: PAT_MRT4530_45274C.1
agctggcacgcgtgcaggaactggtacgcaatacagcggccgacctacgcgtccgctcacactttcgtccacgcatacaatatgattgaggatgaggggcaacactaggtctgcttgttaaaagatggatgctaatggactatcatcgtgtgacatcctattgcgcgcaagtgcaacgaatctaacgatgaggattataatcacgctgtgccaaagcaagtgacacgacaactcgctggactcgtacaggcaggacttttgatgctagctcaccgaccatgagagg

SEQ ID NO: 41981 - DNA, 207 bp, Oryza sativa
  unsure (1)..(207): unsure at all n locations
  Clone ID: PAT_MRT4530_45275C.1
cggccgtcctcctncggtctgctcacacctgccgccgntaccgcgcgnatctccttcctccggcagtggtggtggtggntcgcgcagntggtgaccgtnatgggaggnaggcgcgcgactacnacgngaggcggtcgtcggggnnttngtcgatggngacgtgatgagtcgtcgnnntacgcgnnnntcaacgnnacgncaacnntt

SEQ ID NO: 41982 - DNA, 423 bp, Oryza sativa
  Clone ID: PAT_MRT4530_45276C.1
atggggtttggttacttggtgattgttgtacaggggaaggaggaggaggaggaggaggctgcaaaaagagataaccaggtggaggagcatcccgtccgccccttcgccgctgctgcatctcgccagagagccgtcgccgtcgtcgagccgagccgtgccgcccccggagtcctgcggccgtcggccgccctcaacaacgtcaaacgtatcgaggtggatggcgaagaagtcggagcagaacgtcgtgtcgccattgttgaacgggacgtcacgcgcgacgcccccacaatccaggcggtcgccattggcaacgcggatgtgaaggccatgtcgggggtcaaggacgacgccggtgcatacggcggcggtggagttgatgaagttgtgcatggagccggagtcgagcagcacgacaaggattaa

SEQ ID NO: 41983 - DNA, 777 bp, Oryza sativa
  Clone ID: PAT_MRT4530_45277C.1
atgacagtccaggctggtgctgatgtgaattatgcttatccaaacactcccttggtggtgtccacgacagctggcttaactgactgtatcaagtacttgcttgaggttcatgcagatcctaacattccagataaacagagcggacttacacctatagaaattgctgcaagtgttggaagaagagatcatgtggagattctatttcctttcacttcccctgtcagagcagtaacaaactggacagttgaaggaattattgctcatgggaaatcgagacgcttgattcccaagttccaaattctgaagataaaacggtcacttgatagctctggtcatgatcatttgaatccccattatttcttgcagggtgagtcatgtagcaaggtcagtgacagaaaggctgagctaaaatcacagggagaaaaagccgttaagagaaaggactaccttgctgcatcaaagatctacactaaggcgcttgagctagactattttgatgcaaccctgtattcaaacagaagcctttgttacctacaaattggaaaagcacaaaaggctttgcttgacgcaaaaaaatgtgtaaaactgcggcctaagtggatgaaaggtcactaccgggaaggagctgctttgatgttgctaaaggagcacaagaaagcattcgaggcattcttgaacgcgctgaaactggatcctgctaatgccgagattgagaaagtgatgtgggaggcagttgaggcgatgaaaaaggatgatgccgctgaagataaaacttaa

SEQ ID NO: 41984 - DNA, 681 bp, Oryza sativa
  Clone ID: PAT_MRT4530_45278C.1
atgacggttttcaccggtattaacagccacaaccgtcataggatgaggagtacaactgccacgccgaagtttggatatggaagttatattctcatccttcatccgtcaacagtggcggcggctgtcgctcctctgcaagccttgctccgctacgcccgccgccggccgccggccacagcccgcctcccggctactgccgctcccgacggcgtcgtcgaaagagagaggaagagaggaaagagaaggggaccgaatctgattcgtatccgtaatatcgggtatctcgacccccaagtactaaaacctgtgcaatttgacttcctcggtggcttaaagggtggttttgccaacgacaagatcaaatcaactggcacgctcacgaacctaaaggcaagattttttggacctgcactgaagttaagcagatcttccaggcctcgtgttttcgcatcaacagctaggccaaacaccgacggactgatcgaggccataggaagtcacaagctgtcgagggtgaatagtcccggtggtaaaatgccattgacgttggcaacccgcaaggtgaagcaagatgatgacgtgatggcatccctagtgtctgttagtggggagcggaagttccggtccaagtactctattcgacattggaaggctgacttgaagttccgatccttcttctag

SEQ ID NO: 41985 - DNA, 951 bp, Oryza sativa
  Clone ID: PAT_MRT4530_45279C.1
atggccgcctccttcctccgccctctcctccccccgaaacccttcctctccgccactcctaaaccccacatccccgccgctacccccagtgccatcgtgcgctgcaccgcggcgcccaagccggccaccggctctatcgccaagcccagccaagaagaggccaacaacaaccaggagcaagaacccaacgccgccgccgccgccactccggacgaggccggcgccaacccgcaccgcatccccgacgacgagaccccgccgtctgcgacggcgaccacgtcgttcgccgtggcgcggcgcgtgccgtcggccatctcccccgaccgccggcgccggacggcgctgacgcagggggagccgccgaactacgagatcgggtggaagcgcaccaagaagctgccgctggagaagcccaaggggtgggccatcgcggacttcatggagaagctggaggggctgatggcgcgcgggcggtacgggtccggggagctgctgggcacagtggccggcgtggtgacggagcgcgcgcgggaggaggccgagatcctggtggcggagggcggcgtggaggagcgcgtcgcgacggagctcttccgcgtgctccggctggtggagatggacgtcgcgatggtcaaggccgccgtcaaggaggagaccgtcaaggagcgcgtcgagatggcgcgcgcgcgctgccgccaggccatcctcgtcgcgctctcgctgtgacgacggacgcacccgcgtggtgcccaactgtaattctgattccttcactgatttctcgcatagccactatacacagttgcaactggtcatcaggtttttcgtgtatgtatacctgaattttcagtagcatttgcaatcaaacactgaaaccatgtatacgagaaatggatgggatagccaactacgtgcacttattatgctgcataaaaaaaaaaaaaaaaaaaa

SEQ ID NO: 41986 - DNA, 691 bp, Oryza sativa
  Clone ID: PAT_MRT4530_4527C.1
ctaagggtttaggttacttaacggacttgaagcctctaagttcaccggagctttctgagaagctgcaccgccacaccttcacctcctcgcagtcgcgacgggttccctgtgcgcgcgctatcttggagcacccctccaccgtccttggcgtcgcacctctcgccgacgaggtctaggccgctcggcgctcatcgccgtttgtgcgcccgcctagctaggccgccgtcgccgccttcgccgtcattccgctcgcttgtcgctggagagaaatgggatcgggagagagggatttgggagctagggttttgcccttctctccctatcggtgcttcatctggcgcggggaatatcggagccgtccattagatcagacagctcagattcacccagcgtcgggccgccgctgccgattacgctgcgcttaatgggccgcggaagtgcatcagaccgtctccacataagtaggccgcgctcagctgctcggcttgcgggccgtcgaattgactcggctcaccgaagatgggccagcccaagtttgggccggtttgggaagacctgggccgaaagtttttaaggtgtcacattatcaaatggtgtttttcccgttgcaacgcatgggcactattgctagtatatacacatatatatatatatatatgcgcgtgacttttatgctatctctaaattcttc

SEQ ID NO: 41987 - DNA, 2570 bp, Oryza sativa
  Clone ID: PAT_MRT4530_45280C.1
tttttccctgtcacgacggtatatagcggcggcctgggtgcgcccgtctcgtgactcatttttttcccgggtgggctccacgcgacgcgatttctctctcctcttcgctctcgcaagccaagtcgcaatccccccaaaccctcgccgccgccgccgccgccgcctccatgccgttcaccccggggccctactccggcgtcagcaccctcgccctcgtggctagggcgtccgcgctcggcgtcggcgtcgtctacggcgccgtcaagctctccatcctcaaggcgacaaaacctaacaaaaaggaggcggcaaatgcgcatcactgaggacaggaacgcgtggcggtaactccaacggaaggatgtcataaattctcattgtaccccctcgtctatacgtgcacctggtttatgatttgtggacctcttttctgaaacccagctgctgggagatacaattaatcttagttttgcttgctaataatttctcgatcaaatgacttgaaacgaagaagggaaaaagatgatccaattttgttttgaactcgtgttagaatttaggccactggaagctatcttgcagttgaggcgaaatttagccttggtattgtgttgataatttcacaacagatggattccgatcttgcaagatgatgttagaattatttatatttactccagggaatgcttcaagttcctgaagcaaatgcaccactttattatttgagctcattagctccacatatttctgcctcattgtctgtttgtcaacataagcaatatccaaattgaacacagattttataggtttgtgatcactatctgttgcttccatgcaagagtcatacagtgatattgaagaaaccacaggacaatccaaggaacactcattccctgaactaactcggctatcacgatataggattctgtcacaccaggcaggaatgcgcctcttctcactgctatcataccctgataagcctgctgtatgtttctcaaatttgtatgtagggggaaacttgaaatccccttcacgtagtccctggaagactctcccagatctcatttctgctcgcagttggtcattattttttagccagtcaaagcatctccgggaaactaagcccattgcatcatcataggaaatatcataaaggcggtaattgaagtcaccaagaaagacaatcatgtccgtgtctgacaactcaggcattcttgatccagcttccatatgagcagcaaaatggcaatttacaaagcaaatactcctatcatgtattctcatcctcaatcccactgctcccttgttgccgattgctcgccctaatccacatgctaccgcagcattatcaatatcaccaatgaactgcttaagatgtgttctgacccatacacagataagcaatccagccatctgcctcgagccaacacgctcaaaagagtaaccctttaactgctgcccaattgcatccaaccaccaatctccgtttgggcttccctctagcccaactgtttctttagctgcagacattgcaagaaaaccagcacccatgtccacctcctgcaatccaactaccactaacccaacctctggtgtcggtaactttagccaagctcttagtgactcataagatgccttttcttgcccgacattccaagaacccaccaacactttcatgtattcaaattgtttgtataatggctcagcctcaatcaaagtagaacgcataatgttgtcaataggccctggagatgacaaattccatccacggactccgccatgaccagccattgtaaagatgtatgaacctccaacagccatactcagaactggactgctatgtgcgatccagcctcctagtaagttaccttccaagtccaacagctgaatactaccatccatgtaaccggcccatattcttgtcccaaagctgaaaatgctttgaacagaacacaaatgatgctgaaactcttgcaaacggttaccgttgccatcccatcgagcaagacatccatttgcagaccctgtccagatcatcccatcaattgacattgctaatgcttctattctttgagaatcatctccaaatcctgctttagcagcaactctccggactgcatcagccgctcccattaaagcatttcgtgatctctggaaaaatccaacaggactgcgagctttatctttccttggagcagagaaaaggttttgctttgtttcatagccaaatggatcctgagaagataagatatcaaaacgagtatcgacttggccatccacgctaatcactttcagaagctccttggtgcaagaatcccagagtgcaagtgagaggtaaccagcactccatacttttgatctagaattgtcagacaacagaagttttacatctacggcaggcaagggacaggcccctccatcactgaccatggctctaaggtcaatgaatgatctttcaactaaaaaggaggtcttacgcttttcttctctttgtaaagaaagggacttctcaattccttcttcataccaaactttgattactcccccttcagagccagaccacaaatcac

SEQ ID NO: 41988 - DNA, 1482 bp, Oryza sativa
  Clone ID: PAT_MRT4530_45281C.1
atggcgaatgggaggcggtggctgtggaggggtggcagcaaccacagatatgcattcagagaaatagagatgcacgcgcaacgcgcgggctatcttcctagttgtcctaatttctcttcgttgctgcggccatcctcggagtgctctgtctctcatatacaagacataaacaccacatggtttcccaacttgtgtgatcttgacattcggagttgccccaagttgtccctgccccccatgcctcatacttccacgctgacacgtgttagtgtgagaaaaggtgatgaaacactcttgtattttcgggaagaagagctgacagcataccattatgatggtgctttggcactccacaacctgggtaaagtaaaagctatggaaattgtagatatgctgcattttccattggctgacctccaaaatctaaactgcctaacacgacattctttcgaggattgcgataacattgacaatactgttgttctccattcagttcagtcgctctatctcgatgattgtcatcttactggaaaatcattgacaatggtattaagcatttttccggctcttacctacttcaatttgagaatgtttggtgaaaatcatgacatagaggaaatagtgctgcaggccccaataacctgctcattgtgccatatgtcgatatcctccagcaagaacctagttctgccagttgaggacggaggaggtctgcaggaactctcctcactccagtcactcaggatttcagattgtggcagaatgttctctcgatggtgcatggtcgatgcaggagctcgtaccagcaagcccctcccttcttccctcagggagctcagtatttgtagagagtcaagcatgcagtcgatggctctgctctcaaacctcacatctctcacacatcttacactattggaatgtgaagacttaacagtagatggatttgatcctctcattacactcaacctcaaggaattggtggttttaaataattgttatgagaacaattattcttgttccatagcagcagatttgctctcagaaatgacaaggaccaaagtattatctgcaggttccttacaactggaagcacttaaggtggacaatatctcaggagtgcttgttccctccatttgcagcctccttgccgccaacctccacaagttaattttcaaatctgacttgcagatggaaagcttcgatgaagaacaagagcatgcgcttcagctcctcacctccctcaagcaactatattttgccgactgcccaagtctgctttccctccccgatgggttgcatcacatttcttctctccagaaattgcacatatataattgtcctaaaattggattcctacccaaggagggcttcccctcttcattgagagatctagtgttatcagagtgtagcgtcgatctacaagatcaattgaagaaattggagacatcaaacccagatttatttgtacaccacatgaggtaa

SEQ ID NO: 41989 - DNA, 141 bp, Oryza sativa
  Clone ID: PAT_MRT4530_45282C.1
acatcaccagcatgggcgatggcaagcaaggatcggaagagtggctggcaacaaggatctctacctcggaacattcgggcttgtagctagattcgtcgacatattttatgcaggtcaaaaacatctacttctgaccaagat

SEQ ID NO: 41990 - DNA, 306 bp, Oryza sativa
  Clone ID: PAT_MRT4530_45283C.1
atggcagctcatcgtggacgcgctgcgacgcggcacggaggcaacagcagtgcagcatcactgcagcttggcttggaggcggcggcgatgtggcgtggtcgactgccgcggcttggtggcgcccctggccttggtcaacgagaggacgagtgtcgtgccagcttccttgctgatgctgacgcccacaggtgcgcgcatgggcagctgatgcgtctgcgcttgcacgtgtcgaggcccattgggaaagcgtcacccgcctggacttgttgtggctaccggtgcctccccatgaagaacactgactag

SEQ ID NO: 41991 - DNA, 2058 bp, Oryza sativa
  Clone ID: PAT_MRT4530_45284C.1
atgacggttctacccctcctcctcgtctgcttcacctccataaaacccccacttgtgcccagggcttcacctcccacgtctgcgaggaagaggcgctgctgtgattgcgagtgcgagattattaagaatcctatagaattaggattcttaataaagatatgcactgttgttgaggatcctcatgttacaaacattttttttctttctgaaatgtgcaatattgttcaagttcctagctctgcgttattggctgaagatggatttcatttacaggttattcccaagaagacgaagtgctgggaaaccatctggtccaggagctttattatgctccatcgcaaaaatggcttctttcacttcttccgaaaaaggagcaccgatgcactgctggtaaagatccataatccagtgttcttatggaaggtttatggcttctcagcgctacttcagaggggagctttagcagccaagtctgctgcatttcattgctctggatacaactggtacttgaaagtgtctccaatgcataaaacccttggtgatggaactccacatgttgctctttctcttgtgctgtcccgactaagctttaagccagattacaccatgaatgcagtgttcgtgctgtcaatgtacaaccattcgaagggaaattttcttgtagtcaaagaggttctcttcctccagaagaagaagtttgtctctgttcagaatctcttcctccagaagaaggatttcactaaaggggattacacctggaccatgaacaacttccctgagttggatttgaagccatcggtcctttcacctgcatttgaaattggcagacgcaaatggttcatcagaatgtatccgcgtggtgatgagtacagcactaattccctttccatgtacttgttcccgcaatcctgggacaagctccttccagagcctgggatgatgatcgaactgacactatccatcctgaaccaaaacaatgcgcaacttcacaaagtttcaggtcgctttgtctttgctagtaagaatggctggggatggtccaacttcatcgcgctcaacaaactcaaggatcttgtcggatcaagctgcattgtcaaggcagacatcaccatcatcgggtcatccagtgagagtcagattgtgtatatgctgaggttaatttactggagacgggatctaaaaagggagctcgaagagagaaccatgggcaacgttgctggacgtgctgcaggtgctttgctcttctgcattacggcagacgatccggatccaagatttatggcttctctgcgttatttcagcgaggagccacatcagtcacctctgatttgttccactacggtgggcacacctggcttgaaggaggatatcgtggtggacacgacattcgagctgtcaatttataaccattcaagaagaacacaccatggaacaagagcgagctacaagttccattatccaaagtactactcagagtacacatacctcattcccctttcgaagctacaggatggttcagatttccttgctgatgatacatgtgtctttggtttggatatattgagagcaagaaaatttaaacctacgaggaatgctaagggtgttactattcagcatgtctttctccagacaaaggggttcatgcaagggaactatacatggaacattgaggactccaaattggacttaaagtccataatctgttctccaaagtttgatattggtgaacataaatggtaccttcgtgttgatccatatggtgattatcgcaaccgtgactatgtctccatctacttatgccttgatgataactccaacatgcctccaattgagtccgcgatcatggcagaattcatcatatccatcctgaaccaaaagaacggaaaacactcgcaacagaaagcccggaccgtgttttcttgcaaaggaattgcttggggatggcacaaattcattcggagagatcagatgaagaacacaaatgcaggatttgttgttggatcgagctggacagttcaagcagaagtcactgtcatcggctcatccagccatgcatga

SEQ ID NO: 41992 - DNA, 336 bp, Oryza sativa
  Clone ID: PAT_MRT4530_45285C.1
atggtgaggatgccggcggcacactcccgcgtgtactacttcgcgcagggccatgccaacggcggtggggccacggcggagcttgccgcggctacggggccgtgtgccctcccggcgctcatgctctgtcgtatagaagtggtacagttcttggtcgaacaggagtccgacgagatcttggatgatctttgcctgctcggcggcggcggcggcgatgcctcggagtcgctagagaagcaccccaagcgcagcaaattgagggttgcattgctagtaaggccccaaacacactcaatcccgctgccaccacggcctcatgagggtcctgagtcctga

SEQ ID NO: 41993 - DNA, 521 bp, Oryza sativa
  Clone ID: PAT_MRT4530_45286C.1
tgataattcacctgcgatccatccgcgcccgcgaggaggagttagccggacgccgcctcgtagagagcaggggagagatggatatggtattggtattgtatataaggaatacacattgctatatgtgtgcattaaccttttaatttatggtagttatttttgttagatactctttgatgttcaacaatatttaaaaatttgatgatatgaattttatttttttcatgttaaatatattcttgtttaatttaatttgtattttttatttttaaattattttattttactttttttttaatttcatttttttattttgtatttttttattttttttttttttttttatttttatatctatttatttatttttccatttttattattttttttttattttctcttatataattatttttttttaatttttttttttttttttttttattttatttatatatttttatttttttttttatatttttattttattaattttttttttattatttttttaaattttt

SEQ ID NO: 41994 - DNA, 500 bp, Oryza sativa
  unsure (1)..(500): unsure at all n locations
  Clone ID: PAT_MRT4530_45287C.1
cgagaagtcgggactcttccgctggctgctccagttcggcggcttcaaggagcgcctcctcgccgacgacctcttcctcgccaaggtcgccatggagtgcggcgtcggaatcttcaccaagactgcagcagagtatgagcgaaggagggaaaactttgtcaaagagcttgactttgtgattgcagatgtggtcatggcaatagttgcagactttatgttggtttggcttcctgctccaacagtgtctctgcagccaccactagcagtaaatgcaggatctattgctaaattcttccacaattgcccagataatgccttccaggttgctttggctggaacatcatactcccttttgcagcgcgtaggagctattatgaggaatggtgcanaactttttgcagtgggaactagtgcatccctgattggaactcgtgtgaccaatgcactgataaaagcacgaaaggctgttagtaaggattttgaaggggaaagcgaggata

SEQ ID NO: 41995 - DNA, 759 bp, Oryza sativa
  unsure (1)..(759): unsure at all n locations
  Clone ID: PAT_MRT4530_45288C.1
cggccgcagctgcantcccttcctcaccatgcgctgcccgctccgcgtcgcccctttcttcccatcgccccccgcccccttatctgcaacaccttgtggccacgtgccccttcctccaagtgaccaatgtgacctaggtgactcacagaaggtgggtcgggctgtgcactttaacaagtgatatcagagctcaggtttgaagcccgaaacaatttccataggtcacatggtgggggaggccaggtaacaagtctccgaatcacatgggttgatgtgacaggggagattattgagtttactcacacatcggtaattaacggtgggggagcacaacttaaaaggtgggggcaactctcatccatcaaactagtcttttgggctgtgtaggcttaggatctaaagttgtggctccggttaggcttgtggtggagcaggctcaatgtgacctgggtgacctatggtagttggaccgaactgtgcactctaacaaacaaactggcaatcagtttagagcatgacgagggccaagaacagcagccacaagcccgcaacacggtggcaccggctagttcacacctctttttctaggactagtaaccatgcacgtgcaacgcacgaaaaggctaaaataaattcaatcaaatatattggctctgtaaatttacaaacaggatagcattaaacatcatttcttttgaagctacgcaaatagacaaaccatattcttttaatcaaatcgtacaaaatggcaaatcttac

SEQ ID NO: 41996 - DNA, 514 bp, Oryza sativa
  Clone ID: PAT_MRT4530_45289C.1
atttgtttggttcactatcaactgcgcttccatcattgacacatctggacctgcaggatgcacctataatagaacctacaacatcatcagatctcaccaatgctggtcttcagcagattaatccaaatgatattattcttggatggaagtgatatcagtgatcaggcattgaagtatctgggccttggaacatgtccactagcttccttatctctgaggggttgccgaaagttaacaaatgattgcataccactcttgtttgctggttctgttaaacagagcttacaggtgttggatctctctagaataccaggtattactgatgatggtatcatgttattagcaaggagtcgaactcctattattgaactccgaatgagagagaacccgaaaataggagatgctgctgtgatggctcttgcgtctatgctagttgatggtggaacccatggcagcagcttgcacctgctggatctttatgattgtggtgcgattacaccacttgcaatccggt

SEQ ID NO: 41997 - DNA, 255 bp, Oryza sativa
  Clone ID: PAT_MRT4530_4528C.1
aaagtcttaagcacctctccaaaaaaatgactgaaatccaaagatcttatcttaagcaagaaggtggtatctccctctcctccaagaagatcctcgctgccaagaccaccaagggcatcagatattacaagaacgtcggtttgggcttcaagacccccagagaagccattgaaggtacttacatcgacaagaagtgccccttcactggtaatgtctccatcagaggcagaatcatcaagggtgttgtcgtttcca

SEQ ID NO: 41998 - DNA, 483 bp, Oryza sativa
  Clone ID: PAT_MRT4530_45290C.1
catgcacacacaacacagagttatgacgtctaccgattatgcattgtgcttccatttatgtaggggtacagtgaagaaaaaaatggaaccagctactgtgatcattcgattttcgtactatggagactggagagtccaaaatgtgagtcaaggatacctgaagcagttacacagaactaatgactggagagtcccaaatgtgagtcaaggatagcgtgtggtaatattacttgtagagatctgaaaatgattggcacttgacagaattaagcttggaatcaagcacgctttgatgagggttgtcaagtttttaaatggaaagtagatggaatacgttttagtcctttatagttttatagttaatagaaaaaatgactcacagtcatagcctcatagggcaccttcgactttgtaaatgccccacatgtggatggctttaaagatcccacgaattgccaaggattttcaaaaaaaaaaaaaaaa

SEQ ID NO: 41999 - DNA, 2102 bp, Oryza sativa
  Clone ID: PAT_MRT4530_45291C.1
gaatctgaatgcaacatgcatatcgtgtatgcgtgttgcgtgatacaagtttacagcaacggataggtttgcatatgcatacaccgcaggaaaatacctcaactggtagagacaatcacacaatagctttataagaaagaaaaatgaaatggtggaggtacaacaggagatgaacactagcaggctagaacagggagattattgtgggtcaagaaaccttaaagagtgatgccttattcttcagtgatggtttcagtgtcagatacaggttcaccattcaaaatccactgttcaagctcatcaagatcatcatcatcatgtcgataccaatcggaggatctatcccaattgaaagtccccaattcttcaccacggcaagccatatgtaagaatggacggcttcgaacaagggcatccaccataaccctgttcaagctgcccgttactcctagccatcgcaatcttgggaaatatggtttcttgaaccaccggattgcaagtggtgtaatcgcaccacaatcataaagatccagcagctgcaagctactgccatgggttccaccatcaactagcatagacgcaagagccatcacagcagcatctcctattttcgggttctctctcattcggagttcaataataggagttcgactccttgctaataacatgataccatcatcagtaatacctggtattctagagagatccaacacctgtaagctctgtttaacagaaccagcaaacaagagtggtatgcaatcatttgttaactttcggcaacccctcagagataaggaagctagtggacatgttccaaggcccagatacttcaatgcctgatcactgatatcacttccatccaagaataatatctgcaatttgggaaggcagcttagagatctaacagcttcatcacccagactcctgcagtccctgagatccaatacgttgagatccttgttgaatgacaacctctcaattccaacgtcagtaaggagattacaccacctcaggctcacatgtgtcaggcaaagggaagtggcaattatgtcatggaaaacaagatctgtgaactggcttccatgggacaccctaagcttatgaaggccagaacaagagtggatgatagccctaaaacctgtgtctgtcacgcgggagaaaccaccaagacagacactctcaagacttgagcacttttcagccattagcaggattccaagatcatttactcggcggaaagaggtgaataagaactcctgacttctcatgagagaaatatgcttcaacttaccatttggattaatctgctgaagaccagcattggtgagatctgatgatgttgtaggttctattataggtgcatcctgcaggtccagatgtgtcaatgatggaagcgcagttgatagtgaaccaatcaaatggtcagtgatgaagtccacggtgaggcataacttttggaggctaggaaagaaaacaggttcctttacatgatgcatgcatcgttgcgattccatagccacagtaagaagttcaagcaacattgtcattggaatatatccgatttctagggaggtcagggcttctgaagcagatgcccacacatggctaaaattggggtcatcgaacattgagaaatcaagggccaacctgagagactccaattgagaacagccattaagcaattgctgcagatcagagaagcttatcggtagtcccctacgctcagcaagggcattcagggaaagcactctgagttcttggcaggtggctccaagctcgcagagcaggcggccgctaatgttatcgcagttgaggagcatcagctcatggaggtcggggcgggcaaggcagtcgatggcggcgtcctcgagcctagcgcagtcgaggcggatgctccgcaggctcgggttcagcggcatcagcgggcggagcagctcgtgcgtcagcgccacctcggagaggtggaaggaggggaggaaggagagggcgtgggaggcgcaggagcggaggcagcggcaggcggcggaggcggcgacgagggagcggacgtcgaggcgggagaggatggtggcgaggacggcggacggcagcgcggagtccat

SEQ ID NO: 42000 - DNA, 331 bp, Oryza sativa
  Clone ID: PAT_MRT4530_45292C.1
aaaaaaaaaaaaaaaaaaaaaaaaaaaaaaaaaaaaaaaaaaaaaaaaaaaaaaaaaaaaaaaaaaagaaggaaggggtaaaagataaaaaaataaaaatcacatacatgcaccaaaaataaaatttcatttaagtgtcgcctaaacttcaatatactggggggggggctttcacctggggcctctggtttagcctgtggcgttccccagctttatcgtttttttgcgcttccccatttggcctgctgcggcgacaagctgaggatcatgccggacataccgtggtgctgcccgacggctatggcggtcatcatggcaaggtccttttacg

SEQ ID NO: 42001 - DNA, 1714 bp, Oryza sativa
  Clone ID: PAT_MRT4530_45293C.1
tttttttttttttttttttttttttttttttttttttttttttttcagaccaccccaactttcagaaacaactcctccctttgttctaacaaccactactagagcttgcttttgtgagggttgaacataacaaaggctaaaacatgaaggaaaatgaagcagccagataaattcttattgtgatctgagaccaggctacctccatgatctctgcctaccctcttcctttcagatcaatcacaacgacactaatgttatctgaactctccctgccgagggcgaggcgcgcaaggagagcagcggcacggtagcagcgaggctcagattcttggcctaccgctgctgccggagcaccggcgctgctggaagcggcttcgccgctcctagctgcgcgacgcccactggtggggctcccgtcttcaaggcattgtcgagcgacatcgctggccgtctcgtttgagatcacatcccacatcccatcgctcgcgaggatgaggcattcgtcgtcgacggtcctcacggttatggtgatgtctggctcacatatgacttcaggctttaggtacttgtctccttttgggccaagtaaactgcttccttctgctaatgctcgcgacatggcgaggatgccacgcaccctcggcccgttgaggtacaccacccggccacccaccgcctcgatccgcgccttctcgtccggccggtccgggtgggccccaccagacagcagcaaagcagctggccccacactctgaccagtcttatccccccacgtgccccgcgcgagagcaacacgtgtccccctccaggaaagcgatggattaaggcccttgtggtcggaggagagggggagggggtcgccggcgcggcagaggacggcgcgggagtcgccgcagttggagacgacgaggcggtcgcggacgaggagggcgacgacggcggtggagccgatgatggcgcccgtctgccccgacagcgggcacggcacgccggcacggtggcgcgcccgcacgcgcacgccaccgccgccagcgcgtccacccggccgaagctccgcgacagcgccgcccgccacggccctctcctcctcctcctcctccatcgccgccggttgccgctgccgcagcgccgccgcctccgccaccatctcctccgccacgatcacgtgcatttgctcccggcacagcgcggacacatgggggccgccatggccgtcgaagacggcgaagaagtgcatcggcgagccgtcgagccaggtgcagaaggagggccggagcgagacggcgtcctccatgtcgcgcatccgccccgcgagcgagacggacccgaacgcgacgggccacaccgcggccgccgtcgacgccccggacgggagcgggagccgccgcgccgcggcgccggcggtggaggagcacccgtcgtcgtcgcggtcggacgagcagtcggaggaagccgccgacgaggtcggggacggggacggcgacgcggaggaggccgggaggctcctcttctcgcccccaccgttgctgctgttgtccccgtcctcggacgcggcggcggcggcggggacgtagcggcgcctgcgcaggcggtggcattcctgggcggccgcgggggggtggtccccatcgccacccggcatgttgacgccggcgctagccatcaccatcaccgatcatgggaagggaggaggaggagagggaagagctcgtgc

SEQ ID NO: 42002 - DNA, 414 bp, Oryza sativa
  Clone ID: PAT_MRT4530_45294C.1
atgggaggattgttcaacgtccgcaactgcttctgcttcgccgccggcaagtcagacgcctcgcgcggtggcgacagaaagaagaatgtcggggccaacaagaaggagatcaaccagccgccggcgacctccacaggagggaagcggcggctagccaccacccccgccgccgcgacgaccagggcggatgtgaggccaaagctgcaaccgacgacgtcgtccaggccggcggcgggtgctgccgccgtacgcgcggacacgaagccgaggaagcacccggcggcggctaccgcgagggctcaccgtggagtggagcatcggcggcgcgcagcttctcgacagacgacgccggcgaaagatgaatctgcgaacttcatgctgatgacgttcacaacattaatctttctaatgtag

SEQ ID NO: 42003 - DNA, 1424 bp, Oryza sativa
  unsure (1)..(1424): unsure at all n locations
  Clone ID: PAT_MRT4530_45295C.1
atgcagctaattcttcttctctcaaagccaagaactctccaacttttccccctcctcctctgcctccttctccttccatgtctctcccagcctctcccctctccttctccttcaccttcgccgtcgccttcggcgtcgccggcgccgccgccatcgctgccgctgtcgccgttcaatgagcggctggaggcggcgtacgtggcgttccaggcgtggaagcacgccatcaccgaggaccccaagaacctgacggaggattggtgcgggccgttcgtgtgcaactacaccggcgtctactgcgcggcggcgcccgacgatccgcacgtcctcaccgtcgccggcgtcgacctcaaccacggcgacatcgccgggtgcctccccgaccacctcggcctcctcgccgacgtcgcgctcctccacctcaactccaaccgcttccgcggcacgctgccgccgtcgatgcagcacatgcgcctcctcttcgagctcgacgtcagcaacaacctcctcgccggcgcgttcccggcgttcctcacctcgctgccggggctcaagttcctcgacctccgcttcaacgccttcgacggcgagctccccgccgccgtcttcggccgccggctcggcctcgacgccatcttcgccaacgacaaccgcttcaacgtgtcgctgtcgtcggcaagcctcaccaactcgacggcgtcggtgatcgtgctcgccaacacccgtctcgccggctgcctgccgccgtccatcggcgacatggcggacacgctggtggagctcatcctcctcaacaccagcatcagcagctgcatcccgccggagatcggcaagctgaagaagctcagggtgctcgacctcagccacaacgagctcgccggtgagctgccggccagcgtcggcgacatggagagcctggaggtgctcaacgtcggccacaacatgctcgccggcgaggtccccgaggccatctgcgagctacccaggctgaggaacctcaccatcgccggcaactacttctgcgacgagccggtgtcctgcctccacgtcccgctccgcgacgaccggatgaactgcatcccggactggccgcaccagcgctcgccggaggagtgcatcgccttcgcccaccgcccgccgccgcactgcgccgccgacggctgcatcgtcatccctccgccgtgagcgatcgatcntggcggccggagtacgtancgttgcatggtcgtcgttggtgacgtcatcgtcctagttggttggtagagactgcaaatctccntgtggttttctaggagggggtagccaattaatattctatcatccatccatgcatccaaatttcagaattaaatggttgttgttaaaaaaactttcgattatcattaattaaaaaaaaaaaaaaaaaaaaaaaaaaaaaaaaaaaa

SEQ ID NO: 42004 - DNA, 423 bp, Oryza sativa
  Clone ID: PAT_MRT4530_45296C.1
aaaaaaaaaaaaaataccgaaacccgggggttaaacagagtagccaaaagtcgacccgtcggtgtccccgggaacaaaaacaaagccccctcccatccctggggttaattaaacccaggaatttttaaagcccctggggccggcttaaaaatatttaccaaatggggggggggatcccgggggggtaaaggcttggccccaagggggggggggggggggccaaagttggggatggcccccttggggaaaaaccccccccccttggggacaaaaaaaccaaaccccccttccttccttttggacaggacgtttatttccccggtttttttttttttgaaggcgtaaaagtggggggccacattcactagggggtccatggccccccccaccgacaggggggggttttcaaaccccttggggccc

SEQ ID NO: 42005 - DNA, 1387 bp, Oryza sativa
  Clone ID: PAT_MRT4530_45297C.1
ggccgcttttttttttttttttttacagtcgaacattattttttttttgtttgcgtacattatttttatttttttttcataccttttactaatgctaataatgctcacattttattaatcttcttccagttcaggctaacaacaaacagctgctacgctataccaaaaacatatacgaatttgtttctcaatgcaaaagttctttcccgaagagcccagcaatggctcgtccagggtcgtcttgcttgaccagggattctcccaccaaaacagcggaaactccagcattttgcacataagcaacgtcatctgggttgaacagccctgattcgccaacaaccaatattcccttctccctgatggtatcaccatgcatatctagcaacatctttgtgtttgaagtatcgacaacaaatgtttcaaggctgcggttattgatgccaataagctgaactccacttatattcagcacacgctccatctccctttcatcatgaacctcaataagagctgtcattcccaactccttacatatgcgaaggaagtactttatgtcgagatcaggtagcacagcggcaataagcagaattgcatctgcgccctgagagcgggcataatagatctgccatttatcgatgacaaactctttgcataggagagggcacttcactcctgacttccgcacctttgcgagattttcaaaacttccatgttccaattccaaatccattaacacatccaattccaaagccacctgaaaatacttctcatcggtcaagatgctcaagcatgcagcaccattcttttcataagcctgagcaatttcaacaggattgaagttctccctgagcacacccctacttggcgatgccttcttgacctcagcgatcaacgctggcataccattgcgcttgaaggctgatgctaaagcaccgtagaagtctcttgcaggaggagcctgccctgcagcctcaatcacctccttgagaggcttcttggcatgcccctcggctacctcaacctccttgtcccaaatgatcttctccaggatgttgcggggagcacccagctcctcctcgatctccttcaaggggacattgggacggcagtgcctgcggatgcggatcccttgactagccgctatgtcgttgatcgacttgccgttctcccactgcgctagctccaccgcgttcaccatgtcgtcctgcgctagctcctcgagtatggagtccttggccccgcagcggaggagcgagcgggcgcgggcgcgggcgccggcgccggcgggcgtgacggcgaggcgagcccgcgacggggagcgggaggcggaggaggcgcagggaaaggaagccctgtagacagagggcgaggcgaggagggactccat

SEQ ID NO: 42006 - DNA, 302 bp, Oryza sativa
  Clone ID: PAT_MRT4530_45298C.1
agcagggcaatcaaaatgagctaaaaggtcatctagcacttgtttgtttaaatccagccgcgatgaggcttggcggaactctattttttccaagtactcgacgcaccactgaaatatacaacattacccaaccccaatccacacttctcgaaaacatcgctgtcacatttgaccggcacatgaaccatgaaaatatacggtagtagctacatgctctgtaaccgagccatttaccacaaaagggtagtagcaatcatagcggccattgtcatgaaggtaccaaccatggcagcagacgaagc

SEQ ID NO: 42007 - DNA, 925 bp, Oryza sativa
  Clone ID: PAT_MRT4530_45299C.1
ccgggctgcaggaattcggcacgagggcgtgccctaatcctctccgagattagtacctatccgaggaaatcgagggttggagcttgggattaagattccgcctgtacgaatcgaagtgcgcggctggatcgaggttgagcacgccatgatggcgaacgcgaggtttcagaagcaggcattgctgccgccgcggagcccgttcccggcggcggtgggggcggcgccgtcgccgtcgccgcacgccgagctgggcccgatcgcgcggccgcgggacgcgccccaccggcacggccaccagcgcacgtcgtcggagagcgtcctcatcgacgagcagccgtcgtggctggacgacctgctcgccgagcccgaggcgccggcgcggccgcacggccgccccggccaccgcaggtcgtccagcgactccttcacgctgttcgacggcggtgcctccgccgccgcggctggcatgtacgacaatgtgttcgatggaatgaggggaagaggtggaggaggacagcaggttggttcttggggtgccgcaccggagttcttcccggaacaaagctcgtttgggcggccgcaagggcaggggggccggccatgggattcgagactgatgctccgacaaggtggtggtggtggcggcggcatgccggtgccgatgaatggtggccatcatggtccaccaagcgcatttggtgatcatgggcatggttctttgccgaatggggtggacaggaaaggccctggagattcagctcatgatcagaggatgggagcagagaggaaagagggtgcacacctaaggcactcccaatcggaggcagacaccaagcgagctaaacaggcgtatctagtggcgatcacaacatggttggagattgaattaatgccgaagatattagcttgcactctatttaagtaa

SEQ ID NO: 42008 - DNA, 2056 bp, Oryza sativa
  Clone ID: PAT_MRT4530_4529C.1
ccgggctgcaggaattcggctccacccccccacccaaccccaccgcgcgcgcgctctccacagaaaataatctccgccgccgccgctgctgctgctgccgcctccgcttccgcctcgcgccttctccttcaccaccatcacccacgagttccacacggaggtcaggaggtgactgattccttggcggcttcctcctcccgcgagctgtgaaaattttgtaactactacgtactggtcgctcgtcggagcagtagtggttgtggtggtagcagtggcatggcctcctcgctggcgtccgcctcgtgggtggtgctgccgccggtgcaggctcgggttgctgcggcggtggcggtggggccgacatgccgcgtgctgctagcctacacgccgctgctgtccgggtcggcgcggcggcgggtggtggggcggcctctcgcgccgccgcggtgctcggcgctcgaggatcccggccccagcgacggcggggaggggaacggcagggtggtggaggagggggaggaggaggtggtgaggaggaaggagcagcctcgccggcggcagcggcggcggccggtgtggagacggatcttgttcgcctccaagaagacccgcagcatcatcatcctcaatgccctcactgtcatctacgcgagtgatattccggttctgaaggaggttgaagccctgacggatcctgcagtcttcaacatggtgcggttcgtggtctcagccattcccttcatcccgtttgcgatccgagcaatcggagatcgccatgtacggaattcaggcttggagctggggctgtgggttagtttagcttacctttgtcaagcaataggattgatctcgtctgatgctggccgagcatccttccttacggccttcacggtgatagtcgtgcctctaattgatggcatctttggcgccacgatccccaagctgacttggtttggtgcaatagtatcactgctcggaattggcctgctggagtgtggcggttctcctccctgcgttggagacgtgctgaacttcttagccgcggtgttctttgggatccatatgcttagaacagagcaaatctcaagaagtacggataagaagaagtttttagctctccttagctttgaggtccttgttgtggctttctcttctgtgctctggtttttgttcaaagatagctatgtcgatgtcaatgataccagctttgaatcatggacatttggtatgtttttggacacggcaacttcatttccttggataccagcattgtacaccggagttttctcgacggtgttatgcatgtgggcagagatggtagcgatgggtgacgtttcagcaactgaaaccgcaattgtttacgggcttgagccagtttggggagctgcatttgcttggtttctcctaggtgaaagatgggataatgctgcatgggttggtgccgctcttgtattatgtggcagcttaactgttcaattatttgggtcagctcctgaaaaatccaagaaagttaagacgcgcagttgcaataccttagaaaccccgctgaaacgacaggattacctctcgttgtctgctatcccagtcgattcaaggaagaatataggaagccgattagagaggaaggacaaaacgttgtagtccaacgccaaggcaaaaaaggcatcatctgaagaagacaaatagagagaggaagacgctaaagttgatgcagaaagcttcctactcccatacgtgcatttgccttttggggcatcgtctgtaatataggaagatgcctcatacatattaaaaatgaggcatcactgactgggtttggggtttggggacaaggagatcaaggtagattagcggcacgcttgtaaattatggggggtaaacactgtagtgttggtagacaaatagatatgcatgtatacacaattagcagattattgtgtacagacaatcatacctttgatgggacatcttactcccatgaaatcatagaccagcgttgctatgaaaaaaaaaaaaaaaaaaaaaaaaaaaaaaaaaaaaaaaaaggggcctcgtg

SEQ ID NO: 42009 - DNA, 679 bp, Oryza sativa
  unsure (1)..(679): unsure at all n locations
  Clone ID: PAT_MRT4530_452C.1
catccatcacagccacccatcacaacccatcctcagctgtccccgccagcacatcgcaaccatccatcccccgtctttgctctccttgcctattcgctcgcatgcagcgcctctgcgcagctcccgcatctccccaggtcaaagtccatagngcaatatcagctgcagtcgcctgtcctgctcacagcaacagcgtgctcagcccacataatgagtccgtcacaggcagcagtatggcatagcggcaagccccttcttgcaatcagctgcgttctcacaccgacaaacaaccaagtctggcaacagctcgcgctggtggcgcaacaatctcactcatcaccgcacatcaacatctcgttccagcgcccataagccgcccgccaagcctaacaaacctccccaagccaagttctcggctcgaatccncctaccctctccgaatccccgaactcnncggcctcaaagcctcaaagctctggttggctctctaacgtgccactcntacacatcgtatctaccctacgtactatggtgcacccagtaccattaccacccttggcgngtgtctcgcaatgacctctcaacacgtatacgtggctctccgcaacctccacaacaactacagccccaccgaatactccactccacttaaaaaaaaaaaaaaaaaaaaaaaaaaaaa

SEQ ID NO: 42010 - DNA, 2128 bp, Oryza sativa
  Clone ID: PAT_MRT4530_45300C.1
acgcgggcccgggtcgataacgcgtgcgcctcacgccgcgcctccgccctcttcctcccccctcggcttcgagggtttttttttttttttgtcttcttcttttttctttttttcttcttctccttttttgtttctcgtttcttttttttttttcagcggtttcgggggagttggattcttgattccttcctccccctgaggccaatccctaataataatctgatccctcacacgtgcgcggacgcggaggaggaggtgggggatcgatcgatcgccggccctcgtgagtctaacaggttgatccatcgacatgcagcatcagcagcggatgaagcaggcggcggcggcggcgcagcagcagcagatgatgcagcaggcgctgctcatgcagcagcagcaggctgcggcggtggcggcggcggcgcatcagcagcaggcgcccttgttccccccgcaccacccgcacccgggcctcctcgcggcgccgcagatagagcccattgttagtggcaacctgcctcctggatttgattcaagtacatgccggagtgtgtatgttggcaatatccatcttcaagtgacggattcactgctacatgaggtcttccaaagtattggtccagtagaaggatgcaagctcatcaggaaggaaaagtcatcctttggttttgttgactattatgaccgtagatctgctgcaattgcaattgtatcactcaacggtagacaattgtttggccagccaataaaagtcaattgggcatatgcaagtactcaaagagaggatacatcaggccattttaatatttttgttggcgatctttgcccggaagtaacagatgctgctttgtttgcttttttcgctggatttaccagttgctcagatgctagggtaatgtgggatcagaaaactggacgatccagaggttttggttttgtttctttcagaaatcagcaggacgcacaaaatgccataaatgaactgaatgggaagtggctcggcaaccgtcaagttcgttgcaattgggcaacaaagggtgctaatgctggtgaagagaaacaaaatacagactccaagggtatgatagagttgacaaatggttcatcagaaggtggaaaggataatgcaaatgaagatggtcctgaaaacaacccacagtacacgactgtttatgttggcaatcttcctcatgatgtcaacagcaatgatgtgcacagatttttccattcacttggggttggttcaattgaggaggtgcgtgtaacgcgtgataaaggttttggctttgtgcgttacagcacccatgaagaagctgctctagcaattcagactggtaatggacaacttattggcggtaggcagatcaagtgttcctggggaagcaagccaactccaccagggacagcatccgcgcccctaccccctccagcaccagcaccattcaatcctggcatgtcggcgaccgacctcctagcctacgagcgcaccctggcgctgagcaagatggcagcgaacccggccctgatgagtcagcacgccgccctaaagcaggctgccgccatggggatgggcgccggagccagccaggccatctacgacggcggctaccagagtgccaacgccgtcttctactagagtgacctgagtacctgaccccccatgaagcagaccaccaccattgcctgcctgcctctgtatgaccaaggaggatgatgatgacccctccacccccttatacatatagtagatgaagccttacctgaacctctccttttctacctttgttatttgccaatctagtaatcttctcttcgctggatgctggctatatatatatatctagaacatatatataatgtttttctgcatttttagagatatggaaacgacctttggtatttggatggttccctctgttactatcatcgtatcatgtcggtgtcatattgtattgctctatgcgcattttttttttaattttaccttgctctcaattaacgatatctgtatgtataattttcttttcatgccaagaaactgtatactctacagaaactgtataatacatttccttaaaagagaaaagttaaaggatgtttcagtttaaaaaacaaactatggtgtaat

SEQ ID NO: 42011 - DNA, 489 bp, Oryza sativa
  Clone ID: PAT_MRT4530_45301C.1
atgtcagccttcattgctttcttcttcctcctctttctcttcctctttctctttctcttctcccacatcagcccatcgacgcgcggcagcgatggatccccgcgcacgcgaggtccactagctcatctgctttctgcggatttctccagcaaaacagagcaagctttgcatctggaattgcatttggacaaaccagaaaggataagcatacagatgccttctccaatactggcttcagacaaaagcaaaggatatcagctaagacagaatgatgatgtcattggcaggcagcagggaagtgttcaacccagatgtgtacagctgaatgagacatttggagatgcagaaagcagaatggctgatgagtgcgaaaagattgggagacttctggtgcatcaggaattaaataaagttttcgtcttacctataatcgaagtatctaggagcaaaaatacaaatgagagtctttatggtaacacagtactatga

SEQ ID NO: 42012 - DNA, 210 bp, Oryza sativa
  Clone ID: PAT_MRT4530_45302C.1
cccacgcgtccgattcaatcccccatacccataggccataggataggagtatgggaggcggcgatggcgatgaggtgctgctgctgccggagccgcgccctcgcaggggcctatcctactagacgctcgatctgctgtagctcgccgacgtccgcctcagacacgacaccgacaagacgatctactgggtctgtgtacactaacattcaa

SEQ ID NO: 42013 - DNA, 1379 bp, Oryza sativa
  Clone ID: PAT_MRT4530_45303C.1
atggcccctcccgccgccggcgcggcgatcccccgcgacgccctcctccgcatcgcggcgccgctccgggactccctcgccgcggcgccctacgcgcctccggagggctcctccacctccaccaagtccctcctctcttccctcctcccctcgtcccatccccaggctccggctggcggcggcggggcccgcagcaaggaggccgcgggcctcctcctcttctgcgccgccgcgcgcgcggcctccccggagtaccccgcgctgcactgggttcccgtggcgctctctgacgctgccgccgccgcggtggaggagatggcggcggcgggcggctggggcgatgtaggggagatggtggtggggatgatgccggaggtggtgccgccgctgaaggatgttgtgaaggccacgtgcgtggacacggaggatgaggaaattggcaaggagaagccgcccaaagagcacgccgttgtcgccgctcaccagttcaggtggctggtgtctcaggttacttatcctaagcttggcgacttgtgttggctagtgattccgtgtgctttgactgccttggaccattggtcaccggaagttaaggaacagggaatggttagcttcatgcacatagcaaagagtgtgaaagcaacagaattaaatttgtatgaagatgcaatacttgacgcatgctgccataacattcccgccgatgatgagttgtggtatcgcgctgttgagttcttttgcattggttccaggtatgatcgtatgctagctgagatgttgggccacctggagcggcaaccattaaataaaaaacgccgtgttgcatggcttacccttattgggccagtttttgaagctatgggcctcttcctattagcacattttcgtctccttttctctctcttctttcaatggatgcatgccgatgatgacaagacagttcttctggtcttagagcgaatccatgaagttattaagctcacatggatcaggaaatcaccttatacttcaaggctggtggatgagcttgtccttttatacaaagagtcagccacaaggagcagccgtgaggtcgtgtggaatcacatcctggaaatgctcgctacactccagaagtaaaaggggcagcaatttgaggaagcttggaagaagcacgaagttgacccagacttgacgatgttgctatcatgtttcaatgaattatgtacccaaaatcattcttcctgatttccagtgtgactggtattcttgttgtaaatactagctgttagatgaaattgagcccttgaaaatcttgccccgttggtcccaaaaaaaaaaaaaaaaaaaaaaaaaaaaaaaaaaaaggggcctcgtgccgaattcctgcagcccgggga

SEQ ID NO: 42014 - DNA, 652 bp, Oryza sativa
  Clone ID: PAT_MRT4530_45304C.1
atggagtggggaaaatggggaagttgtggcactgtcaaagaggtgcaccctttcctaggttgttctcttatttattctgttagtttaattttggtgcgggttcttattcttactttcgcgtgcgtatctgtgtctggtcgtaagcgggaagggaggctcgctgtttctgctagggccgcccagaaccagctcgctgctcacggcactgccgtactcctcccccgtcaccgcgagcccaagctccgccgcccaccgccgatctccggccacgcgtcgccttgggcgtcgcccacgctcccatcctgccccgtggctccgggtcaaccagcggtggagccagcagcacgccgccaaggccctcagctcaggtcgacagagaaggagaggccgctgagctcggcggggaaggagattaacgaagacggccagcggcaggagcagccggaccgcgcagcgagcagatccgcagcgtgcgactacgacgagccgagggtgaggtagcggtggacaacgacgagcagccgaggtgtatggatgggctcgctggtggcgaggagctgccagcgcgccagtgtggactcggaattgatgggctagggcaccgccgtgtagaccggcggaggcacggaagaaaaaaaaaaggagaagagag

SEQ ID NO: 42015 - DNA, 276 bp, Oryza sativa
  Clone ID: PAT_MRT4530_45305C.1
atgtgaacggtggtttccgtttggaggcgagcagtccaagagctggcggggaaccacgacgctacgcaggatctggaaggtgaggcgccggtgccgcggtcgcagtttctggcggcgcggggagaagcgaccgctcggacgcaggaggggaacgggaatggtggtgtggatggagtgtgggaagatgcgatcaaccgggagaagcgcttgatcgagatccaatggctaggagaaaacggggtgacgtggaagcatgaggatgcagagaattcctag

SEQ ID NO: 42016 - DNA, 584 bp, Oryza sativa
  Clone ID: PAT_MRT4530_45306C.1
caaaaaaaccaaaatgggaattggcccaattaaggggggggccggaaaggtaacccaaaccaaagtttcgggaaaaaaacccataaatagggggaccggccttccaaaaggaaaaaaaaaagttcccaaaaaaagggaaacccccccggcaggaccggggtctttgctttgtcaaaaaaacccggccccaatttttctcgcccaaaaaaaaggggggggaaaacggaaaataattggtcccaaagaccctattcccaaaccccccctttccagggaggacccggaaatcatcgtccaaaccaaagccaattttggaggccacaatcttgactctggaaaatttttggcaaacaacagccccccctgggggggcggatttaaaatccaaaaaaatatggttggttcccggacccccctttttaaaaaggggggatatagctggaccagctgaattcccggtccccagggggggacccaccaaaaaaacagcccgggtggctatatttttgggaccatggggaaaaataaccggttgcccatggcccccttcttgggaaataaaaacctccccaatttttaaccct

SEQ ID NO: 42017 - DNA, 1438 bp, Oryza sativa
  Clone ID: PAT_MRT4530_45307C.1
aatcaatctaaatccatccatcgatctctcaattaattaacctcaagagagaagtaattaattgagctagctagctagatagtgagataaatagtgatcaatagctaagctagctagcttcgatcgattgatcatgatgaggtcgccgtggatggtgtttgcatgggcggcggcgatggtggccgtggcggcggcgtcgccggtgccgacgaagctgaaggtggggttctacgagcacagttgcccgcaggcggaggagatcgtccgcaacgccgtccgccgcgccgtcgcccgtgaccccggcctcgccgccggcctcatccgcatgcatttccacgactgcttcgtcagagggtgtgacgggtcgatactgataaactcgacgccgggacacgtggcggagaaggattcggtggcgaacaaccctagcatgcgagggttcgaggtggtggacgacgccaaggccatcgtcgaggcgcactgcccgcgcaccgtctcctgcgccgacatcctcgccttcgccgcccgcgactccgcccacctcgccggcgccaccgtcgactacccggtcccctccggccgccgcgacggccgcgtctccgtctccgacgaggtgctcgccgacaacgtccccgccccgaccttcagcctcgcccagctcgtcgccagcttcgagcgcaagggcctcaccgccgacgacatggtcaccctctccggcgcccacaccatcggccgctcccactgctcctccttcaccgcccgcctctacaacttcagcggcgaggccggcaggacggacccggccatcgacccggcgtacgcggcggagctcaagcgccggtgcccgccagcgaccgacgaccagatggaccccaccaccgtgccgctcgacccggtgacgccggcgagctttgacaaccagtactacaagaacgtgctcaagcacagggtggtgctcaactccgaccaggcgctgctcgacagcccgtggaccgccggcgtcgtcaagctccactccgccgtcgagaaggtgttccaggtcaagttcgccgccgccatggtgaagatgggcaacatcgacgtgctcacgggtgacgagggagagatcagagagaagtgcttcatggtcaacaaccactactagttgtcaatcaataattaagcttatattatagtatatatataatttcatctgcagctggtttatacatgtagaattagtaatattacacgcccaaatttcatcatgtggaaatttttttgttgttgttttgtgtggcaaattgtgattaagaaaagattctattgttaactcaaacaagagaagattttcttatattgtttcaaatcagagtggagaaaatattttagtttactgttatctaaaaaaaaaaaaaaaaaaaaaaaaaaaaaaaaaaaaaaaaaaaaaaaaaaaaaa

SEQ ID NO: 42018 - DNA, 925 bp, Oryza sativa
  unsure (1)..(925): unsure at all n locations
  Clone ID: PAT_MRT4530_45308C.1
gccttcgacatcatcacgcaaatctcccccgcgcgcccccgcgcgcggtccctcgcatcntcgcatcccatcccacatccgcgcctcacgccanagcgttcgttcttccttccgcgggcgngcgcctccatcgcgccgcgcccatgcgctgcgcccattctcccgcgccgccgccacgcctcgcagcccgcacgctccgcgcaccactcgcacgcgctctccaccccggcaaaccacgcgcccacccctcgcccccacgcccgcgcgcacgcgctcgcccacccgcaacaccgccccccgccctcgcgcaaccgccgctcgccccgggcagcgcttgcntccgcaccccgcgccacgcctccacccgcgccccgcgcgcagcacgcgntcccccaccccccgcaatcgctctccccgccccggcccccggggggcgggccgccctccgcggccctcgccgngcaatcgccacgctcgcctggcccaagccaagcctcgccagcgcaccgtcgcacgcccgcccagctgcccgcctggcgcccgcccatccccgcccgcggatggctgagccagcctacgcaggcagcagcatgcccgcatgccccctggcagcacacgcctgggtttgtttgtccgctccctcccgaagccacctcaccgcgccccgccccaccgcggctcccgctccnctccccgcacgcccccgngcgcgtaccctcaccgccgccgcagcngcgcgctccgctccccgcacgcgcagcgngcctcaccctaccgccggccgagccacgccagccacgcaccccccggcggcatgcacccccgcccctgnagggcctgcaaccacgccggcgcaaggnccacctcaccgcccggggcgcccaagccctgccccgcctccgaaatgactgcccnncggggcttc

SEQ ID NO: 42019 - DNA, 566 bp, Oryza sativa
  Clone ID: PAT_MRT4530_45309C.1
ttgatatgtacatcaaagtagaaagcactcgactagacttcataaggcgtcaccaggtagagataagggctgacctatacaaaggtgtggttgatagcattcatgctggagagagccgtgcaagccaggtaggcaaacgtactgtgctcccagcatcattcattgggggcaatcgggacatgaagcgtcggtatatggacgctatggcattagtgcaaaaatatgggaagccggacatttttttgacaatgacatgcaaccctaactgggaagagataataggtaaccttgagcctgggcagacaccccaagataggcctgatctcatagtgcgcgtgtttcgagcgaaactagaggacctcaagaaacaattacttgagaagcatatccttggcaaagtgattgcttatgcgtatgtggttgagttccaaaagaggggtcttccacatgcacatttccttttgatcatggacggaaaatacaagctcacttctcccgagcaatatgattgtatcatttccgctgaacttccaaacaagcataagtatccagagttgtacgagatg

SEQ ID NO: 42020 - DNA, 348 bp, Oryza sativa
  unsure (1)..(348): unsure at all n locations
  Clone ID: PAT_MRT4530_4530C.1
gcagggtgggagggtgtggagaaacccaatgtgcaatggtgaggcactgactgacgcgtgtttgctgcaaccacaatgattaagcgctgcagagtgtggaaacctgctggctgtgtacaagttgcacaattgggcatagcattgagagtcttgggtgatttacttgacaagtggcacattagctgctgttgaagctgtttgctggctgctggtgcctgattgcaactgcctggacatgtgaatgaatngactgttcccgtgcaaatattgctgaaacttgaaatggttattgctgctgtgtgctgtccaggaaaagcacaattttgctcaaaaaaaaaaaaaaaaaaa

SEQ ID NO: 42021 - DNA, 1596 bp, Oryza sativa
  Clone ID: PAT_MRT4530_45310C.1
atgaagcgctgccagagctcccggccgacggcggcagtagctgccgtcgttgcagctgtctccatgatcatcgtcctcgtctccggcacggccatcccgtcggcggccgcggcggcggccgtcgagcacacgttcgtggtgagccaggtgaatatgacgcacttgtgcaaggagatggcgttcacggtggtgaacgggcagctcccggggccgacgatagaggtcaccgagggagactccgtgaccgtgcacgttgtcaacaagtcgccatacaacttaacaatccattggcatggagtgtaccagttgctgaactgttggaacgacggggtgccgatgatcacccagcgccccatccagcccaaccacaacttcacctaccggttcaacgtcgccgggcaggaaggggagtggtgggagaaggatcttccacaggtggacaggaacatgaccaacggttactttgatgattactccagtgggtcaacaattaatggcaagcttggagatctcttcaattgctccggcgtgttggaagatgggtacgtgctggacgtagaacctggcaagacgtacctgctgcgaataatcaacgcggcgctcttctctgagtacttcctcaagatcgccggccacaggttcacggtggtcgcctccgacgccaactacctcactccctacagcaccgacgtcgtcgtcatcgcgcccggcgagacgctcgacgccattgtcgtcgccgacgcgcccccgtccggcaggtactacatcgccgcccagcccatccaggcgccgccgcccgacacgcagacgccggagtacgccaccagaggcacgctgcagtacagcagcaacagcaggaactcgtcagccgctgccatgccggagatgccgcaccagcacgacacgatgagatcgttctacttccgcggcaacctgacggccggcgcgcgcctccaccgccacggccggcggcgtgtcccggcgcgcgccgacgagagcctgttcgtcacgctcggcctcggctccgtctgccgccacggcggcgcgtcctgcaagagagggggcaacctgaaggagtccatcgtggtggcgaacgtgaacaacgtctcgttccacatccccgccgcggcggcgacgccgatcctggaggcgcactactaccaccgcctccacgccggcgccggcgaggaggaggaggagctcgccgagcggccgccgagggcgtacaactacacggaccaggcgctgacgccgttcgggccggaggagatgcggctggaggcgacgtcgagggcggtggtgacgcggcggttcaggcacggcgcgacggtggacgtggtgttccagagcacggcgatgctgcagggggactcgaacccgatgcacctgcacggccacgacgtgttcttgctggcgcagggcatcggcatctacgacgcggccagggatgagggcaagttcaacctggtgaacccgccgaggaagaacaccgtgctcgtccccaatcttggctgggcagccgtccgatttgtcgccgacaacccaggtgcatataggagtattggattttcttgtgcgcacgctttatatacttag

SEQ ID NO: 42022 - DNA, 855 bp, Oryza sativa
  Clone ID: PAT_MRT4530_45311C.1
atgaagtcggcagcaacttcataccccgacaaccctcgtactcggagcacggacaccaccggcgtgcgctgcttggctgctaagtacgaaatcaccgccaccgtcaagcgccgccgagaagggaatcgctccgccgccgtcaagtgcagtcgagaagggaatcgccgccaccgccaagtgattcctgtggttgctaggcacaacaccatcgctgcacgggttggtgcctcggtggttcaagtgaggaacaacaaagactggatccgaatcttttatctgaagatagaaccacctcgcccgccatttgctacgagaagaggggcactagaaggggatgtatcgcaacttcaggccatcccgaagcaggaaatcgacacatccggatatctttttaggttccatccagcgcaactcatagtagaagcggaagaggtcaagaaacgactctaccccaatgtaggcctcacaaagataggagaagatactgaggaaggagatggaattggggttcagatggagcaaggaaaggccgtagaaattcaagacgagaagaaggaagaaaaccgtaaagaatgtaatcctcaaccgcaaccatgcggcccaggacaggttcaggttcaatacctcttgtttctcgctccatggtcccgcggccagggagagcatcgtcgtcctgcagtttcttcagggacgcatttgtggaggtggacttgtcgagatccatccccgccggagatcgccggagatcaaaccgagatgaacaaactagggtttttctataggagcggagaaggcgaggggcgtgtggaagctggaaagtctttgctgcaagcagacttcaaaatggatccctaa

SEQ ID NO: 42023 - DNA, 802 bp, Oryza sativa
  Clone ID: PAT_MRT4530_45312C.1
gccaacaaggctattgaatgaatgcattcaattggttcactggcttgcttactaattgcgggcactaccactttagtaattaggagtaagcatttcctcctgttagataacttgagcactattcagttttgatagtgatacaactagaggggagtgctccctaactaaacagactgaaattagctgctgattgattagtcaaagctagctactgccaacgcattctaccacgaacgacttaacaaggcacacaatttacagcagccactaccaactatgtacaaggcaaaggacgtgtgttccataaaaaaactaactagaactactactagtaggattaggatggaggagtgtcgtcccagcccatgagcatgttggtgactccatcaacaatcttgctccgcaatgaagaatgatctccctcaccaaggtgcaccctgtaaacctcccattccctatcacccaccacatgccgaccaatctcagccaagaagatccgtttgtgaagcttcttgagagcaagggtgatgtcgtagaacaccagcggtctacccttgcccgacacctccactgggttagccaccagcagttccgtgtcagggcctctgtttaccaatgccacgcgcagcggacggtggagctctgtcctcagccgacaacacagcgctctttgcttgtgctggtcaacgatcttcttcccatctgattgcacagcaaacaaatctacctcacagctcccattctggctggcatagaatcgtgcatacgaaatctggatgttacagtccttgagtgttctcat

SEQ ID NO: 42024 - DNA, 268 bp, Oryza sativa
  Clone ID: PAT_MRT4530_45313C.1
cggacgcgtgggtgacaaggcaattgaaacttaccaggccggtttgaagcatgatccgaataacccttaactgctggagggtgtgaaaaggtgtatggaacatatcaacaatgccaacatgggtgatttcactcagcaagagattcactaacctcagatcaaggctgtgcaggatccacatattcataatattctgacagatcccatcatactacaagtgctgttcgatttgcaggagatccctagggctctatatgagcatcttaag

SEQ ID NO: 42025 - DNA, 936 bp, Oryza sativa
  Clone ID: PAT_MRT4530_45314C.1
aagccctcgtatttgccgcccgggctcctcctccgaagagagagaagggaatctctcctcttctcttctcttctcgcgccgccgccgtgtccagtgcccaagatgtggggcagcgccgacggcggcacgccggaggtcaccctggagacatccatgggcgccttcaccatcgagatgtactacaagcacgcgcccaagacctgcaggaacttcctcgagctctcgcgccgcggctactacgacaacgtcatcttccatcgcatcatcaaggatttcatcgtgcaaggtggggatcctactggcaccggaagaggcggcgaatccatctacggagcaaagttcgaggatgagattaggccagaactgaagcacaccggcgctggaattctgtcgatggccaacgctggtccaaatacaaatggaagccagttctttattactcttgcgccttgtcagtcacttgatggaaagcatacaatttttgggagagtatcaaaaggaatggaaattgtcaagcgccttggaagtgtccagacagacaaaagtgataggcccatccatgaagtgaaaatcctgcggactgtggtcaaagattgaggcacagcgggtctactcggtgtcactcatgacttctggtatttggagttgtagctgctgtcagtttcaggaattgtttcctgcttgttccgtgcttatgcagtggtgtatcgtttcggatgggctagtttagttattaacaactcatgaatcgtgatccgtcttaattattctcacctgaacgagtagtgttcagtgattatcagtggaaataactttcgaaatatatgaagtcattttgagcgcatgatgtaattcagctgatattcagcatgttacatgctgtaccaactcagggattttttttttatgttctcaaaacataaactcatgcgcttc

SEQ ID NO: 42026 - DNA, 636 bp, Oryza sativa
  Clone ID: PAT_MRT4530_45315C.1
atgggtgcttgggccgctgtgcttggcccaacagctgtcccaccggtgcaccctgatttgggcttccctcggcctaggccggaggcgaagttcttggcttcgcgtactaggcttgaggtgccgtcaggcgaacaggtgccgaggccacttgcggtgtcggacgcgcggcaacggctggggcgggcttggcgaagtacaccggtgcttgcacagcgtgtggaagaagaacttggggctgagccttcggcttgtgctttgaggttggcgttgccttgtgaggtggtgattgctgtcgatgtcgtggccggttgggcgaaggcggcggtcgaaggcgcccccggtgcttgggatgacaagatcgcgtcgggcgccgaaggcgggagagcagacggcaacaccagtggcagtgccgctctagcttcgccctcaagaagccgaaggctccgctccctcttcggctaccatctcgccttcgctgccaccttcctttcgcttagcaactctctccttggcgatcttcttcggtggcatcagtggtttcgctcggagctccccacggtcggcgccagctgttgtcgaatggacaactgcgtcacgtcgaaaggcgtggatttctcaacaatagttggaagttaa

SEQ ID NO: 42027 - DNA, 426 bp, Oryza sativa
  Clone ID: PAT_MRT4530_45316C.1
ctccgaagagagagaagggaatctctcctcttctcttctcttctcgcgccgccgccgtgtccagtgcccaagatgtggggcagcgccgacggcggcacgccggaggtcaccctggagacatccatgggcgccttcaccatcgagatgtactacaagcacgcgcccaagacctgcaggaacttcctcgagctctcgcgccgcggctactacgacaacgtcatcttccatcgcatcatcaaggatttcatcgtgcaaggtggggatcctactggcaccggaagaggcggcgaatccatctacgggtcagcatatttcttgctttcctcctctttcaatttagcaaagttcgaggatgagattaggccagaactgaagcacaccggcgctggaattctgtcgatggccaacgctggtccaaatacaaat

SEQ ID NO: 42028 - DNA, 355 bp, Oryza sativa
  Clone ID: PAT_MRT4530_45317C.1
ctcctcaccaactcaaagtctcttcctcacgaccggcggagagcggcggggtttcttatgtctgggagaggcaacgtcctctaggttctcgataatggcggctcgaataggcacaggaaggtgctgctcgacaacatccaggggatcacgaagcctgcgatccggaggctggccaggaggggcggcgtgaagcgcatcttcgcgctgatctacgaagagacccgcggcgtgctcaagatctttctcgagaacgtcatacgcgacgccgtcacctacacggagcacgcccgccgtaagatcgtcaccgccatggacgtcgcctactccttcaacgccaggccgtactctttacgga

SEQ ID NO: 42029 - DNA, 1950 bp, Oryza sativa
  Clone ID: PAT_MRT4530_45318C.1
atgccggcggagctaagcggcggcggccggagcaagccggcacaggccaggggcaaggggcggcggtatcgtggcgccgagggggcgatgtcgtgcgcggccatcagggcgagcgcgccgccgaggctgtgcccggtgatggtcacctggacgtttcttgcgggagaagtgcctcgggttggccaccttgttgcggatgccagcgatgaagtcgccgtagttgtcgccggcgctcacgttgaacgtcgcggtgaagagcgtttcaacgccatggccaagatctcagatgcggctgggcgacccgacgagcggcgccatcgcgggcagccgccggtcctgtcctcctgggctgccgccaccgccgagcacgaccaccacgggctgcttctcgacggctgggcactcgaacgggcgccgtcttgcgagtcatggagtggatgtcgtattggggagcggatcgacgggcgctcccacgcctcccttctcctcgcccttctcttcgatgtcgcgggccgcgccgtcctcagcctcggcctcccgcgcctcgccttgaccttgctgtccgcgccgtcctcatcctccgcctccctacgccccgctattgaaacttggatggagaggaaggacacgtggcgtgtagtggctggcagggtcgtcctcgattcctacatccaacgcaacatcaacatggggcggaacttaccgtggcttcgtctcacgtggcaagaaaagtgggtggggcccatagctatactcggttctccggttcctagcaaagcaacgaggaacttcgctcgggcgcggggcccacttggtgagcacgcgggcgacgacgactccgcgtcggtggcgactccgcgccgctatgggaggtcctcggccgccgcccatggtgagtcgccggcgcggctctctactccagtcgccggccgcgtcggccacgccgcccccgatctggtcgaccggagctcgccggccaggagcggcccgcttggggtggagagggagatgcgggcggccccccaagctcagctcagcgcgacgacgacgacaccactgccgtcctcctctctccgccttctcgtcgtcgtcggttggagctgcttcgcgtcgacgtcggtggtggccgagccgccgccgccgccgccggagaggcgagctccggaagaagaggaagaggagagagcaaaatgttcggcttcgggcatcacggccaccacggccaagaccagccgccccagcacgtcggcggcggcggcgcgcaccagcccaccttcaagatcttctgccgccgaccaacccgcgcgacgagcaccagatcccgaccaacccgtgcgacgagcaccatatccgcgcacgggatgaaggcggcgcccttggccacgccggtcacgagcggccctaccgctcctccgcttgccgcttgccgaagatcagcccgaggacgccgccgccactgtcctcccgcaccgccgctgccgtcgtcctcccgcgccgccgccaccgtccttctcgctccgcctcctcgtcaccgcctccgggaagagggagagtcgggcgtggcagggacggcgcgcgccgccgcgggcggcggcagtgacggcgaccaccaccacagccgtagtgctcgctgacgacgggggcagaggcgacgggggcttgagcggaggcggcgagggaacgggcggcggaggaggggagagccggcgccgttgggtgacgagggaggaggaccagttggggatttggtgtcggtgaagatatttgtgggccccacaagtggtgcttgcactgtgaagagagtgtcttcatcctatgtgtcatcctgtggtaactcatatggggtgcttgcactgtgaatggccttaggtctacattggtgtgatcatgacggagtgcggggaaaagcttctcaaggccaatgaccctgtgtccctgcgtcgcgtccat

SEQ ID NO: 42030 - DNA, 521 bp, Oryza sativa
  Clone ID: PAT_MRT4530_45319C.1
caaccacgtccgagggagcgagggaaagtgcaacccatggggtataacaattactacctgtcacataatagaaccggttgcgtcgggaaagatcctcggattctacttcgccctagatgacacaacatgtgtccaagggcatgctgagatccgtcatgccatggtgtggcggcatcatggtgccagctggctggtcatagctgttctgtgtggcacttgtaccattccttcgtttatcttctaagatatgtacatgccttcagactgaaatgagagtccataataaagtagggcttacacgtgtagatgcgatcaagtgccaaaatcgatggatccatttgatcgtcagtgatggcgtttctatctgcaactgaattgagggaagaggaatgataagcataatacctcttaacaaacatttccgaggatgagttattcaagtatgcgacacaaacaacttatcaagtttgtgacactaaaaacagacattagcctgccttgaattttggaacctagtaaaa

SEQ ID NO: 42031 - DNA, 2888 bp, Oryza sativa
  Clone ID: PAT_MRT4530_4531C.1
atgcgcgatggcgaggcctttcggcggctacctccgccgctgcttctgctgctccttcttgctgccggcgtcgcgcgcggccagcagacgacggcgccgccggtggtgccggatgcgctcaacaacctcaccagagacgtcgccgactacatctcccaccgcttcagcttctgcgtcgccgacccgacggaggattggaatgaggccttcaattacacctcggatcttggattcgtgcagaactgcctcgcggagacaagagcttgtccattgggatcatactgtccgcgtgccactgtgaacacaaccactggtctttgtgatccatacaagtatcagataactccaaatacaactggctgcgggggtgctgacacatgggctgattttgggagcactgaagagatgttctgtccagccggcactattgcagactgggttccaccactcaagacagttgaacacttggtgcagggcatgttgtttgtatttcttctgatcatatacaactgttcaggccagttcctgactatccgcgagaaacggaaagcgagatcgagggagaatgctattcagttggcacgtcagcagctcaaagcgcatgagggatggaaggcggcgaaacgactggcgaggaagcatgtcaatgacatgcagagtcatctctcacgtacattctctcgtaggagatcattccgtcagcatctggactcggagaattctggccataggttgcaggaagcaccactgtttatgaaccaggagttgtcggattctgctgcattttcagctcatcagagcactggtgagatatctgaagtcatgccttcagtcgttgtggatgttagcgatgatggagaaattgttgccggcaaggatagatctgcaccaaaaggcaagcacagatcaacacacacgcagatcttcaagtacgcatatggtgagatcgagaaggagaaggtcaggcaacaggagaacaagaacctgaccttcactggagtgctctccatggtgtcagagcagcagaaggagataacaaggcctctgctcaaggttgagttcaaagacctgaccctgtcacttggaaagaagaagctgttgaggtctatcaatggcgaactccggcctggccgtgtcactgccgtcatgggcccatccggggccggcaagaccacattcctcaatgctgttacagggaaggtagctggctataaggtgtcaggttcagttcttgtcaatgggaggcatgacaacatccgttcttacaagaagatcattggatttgttcctcaagatgatgttgttcatgggaatttaacagtggaagagaacctttggttcagtgcaaagtgcaggctctctgcgacaacggcacaccgccacaaggtcctcactgtggagagggtcatagactccctggaccttcagggagtcagaagttcattggttggaactgtggagaagcgcgggatctctggtggacagaggaagcgtgtcaatgtgggtattgaaatggtgatggagccatcacttctgatcctggatgaaccaacctctggcctggacagctcctcttcacaactgctcctccgagcactacgtcatgaggcgctcgaaggcgtaaatgtttgcgcagttgttcatcaaccgagctacacattgtacaacatgtttgatgatctgatacttctggcaaaaggaggtctaattgtttacaatggtccggtcaagagtgtggaggattacttctcaactcttgggatcactgtccctgaaagagttaacccaccagatcactacattgacattcttgagggcattgtgaagcctgagtcaggcatcaatgcgaagcattttccattgcactggatgctctacaatggctatgaagtgccaaatgacatgaaagatgatctcaaggcaataggtgaacagagaccacatttggggtccagcccttcagctggatcaacacctcattgccttcctcatgtcaggaatgcttttgctgaagagcgtgatcgtatcgagcaccatttgtctaaaccaaaggatttgtccagcagaagaacaccaggggtgattagacagtacaagtactacctaggaagggtcacaaaacagaggttgcgcgaagctaggttgcttgcagttgattttctgatactaggccttgctgggatctgtctgggtactattgcaaagctcagtgatccaaattttgggatgcctggctacatttacaccataattgcagtttctctgttgtgcaagattgcagcactaaggtcgttttcacttgaaagattgcaatacttgagggaaagagagtcagggatgagctcattggcatactttcttgctagggatacaattgatcatttcagcacgattgtgaagccgatcgtttacctctccatgttctactacttcaataatccaagatctacaattaccgataactatatcattctcctcgcacttgtgtactgcgtaaccggtataggatacacttttgctatctgcttcaaccctggttctgcacaactggtatcctggagtttggcttataactcgctgtgggttgttgttcagaagtcgtttcgacattcatcattacatgctctgtattttggttctgtttatgtatggtctgttcttcagaattgttgcatttgtggccttgattttagtgaagaagagatgagcagagggcaattgcaccaacttttcacatttgattctttcattattttgtacagttgtaaatcagttttgatactacagatgaaatatagagaatacttcacttgcgtgtcctgaaaaaaaaaaaaaaaaactcgagactagttctctctctctccctcgtgccgaatcctgcagcccgg

SEQ ID NO: 42032 - DNA, 306 bp, Oryza sativa
  Clone ID: PAT_MRT4530_45320C.1
atggtccgggccttgggttccccccacctctcgcctcctcgccgcgagatctgcccgtgccagggcttctacatgcgcccccgatacgctattgaatgcggcagattccggccgctgctgtgctgcacacgggtcggtggtggcagcagcagcagcggcaggctcggcgagaagcctggaaaaacgcgacgcgtcatgggcgggggccaaggcgcaggcgcgcagtgcagcgcacggggccagaatgacattctggcccggctcggctcggcgcagcgcacggctgcctccgcgatgcgtacgtag

SEQ ID NO: 42033 - DNA, 374 bp, Oryza sativa
  Clone ID: PAT_MRT4530_45321C.1
tcgttaagacgagcagccgtacgagtgcgggcgggggtttgactcgcatacgccggcgaccgtgctatctctctggtgcggaagaaaggggctcctgccgccgcccaaggagcgggagatagctcgcgcgctggaacgcaatggaggacactgattactgcgggtgcgtgacggaccgcctaaggacagtcgccagggacagcggatgcccacggccgccatgatcaacgagctactgccagaagggatggtgtagaggaccaaggggagggggctcacatggccgaatcgggagccggagaaagagatactagcgcacgcccccacgggcggtttagagacccactggcgtgggaactcaatggtgaagagcc

SEQ ID NO: 42034 - DNA, 220 bp, Oryza sativa
  Clone ID: PAT_MRT4530_45322C.1
ggaaaaaaaaaaaatccctttttagcttaaccccaactaggcccatgattttattaaatcatccatatatggggttatattacaaacccccttttaagcggttttttatttggttgcaacacacataattcattcgttcgttcaagcttaataattcatgccgggccttttgccatttgaggctagctttttaaaaagttgcgttccccggccccgttgt

SEQ ID NO: 42035 - DNA, 1071 bp, Oryza sativa
  Clone ID: PAT_MRT4530_45323C.1
atggcggccgcattaacgctgcctccttctctggcgacattgtggccggtgcggccgcagcgcggccacttcggagccactatcggggaccctcccccttcttctccctccccttctagatgcgtcgctgtcggggcctacggtggcggcggagccggctgtgctccatgcttcgccgtcttctcgcatcagcataaactcttctactcacagccttcgccacctcgagctaagctgagattggtggggcgcatcgatggccggaaagaagaggccgcccaccactctcgccgacaaccttccttgcagaaagaggccgcagccaagccggcctcggccgtggaggcgccaacgaagaagcaaaagttggccatggagcggaaggagattgaccaggagaggcactgccaatccactgaatcgggcatcgccgctgctaagttcaagctgcagacgtgtatagggcatatgagaagggcgggcggaagggggagtgaagcggagggtggagatgggtcgtcacggatggagactgagaaggacgatggcgtggagaactgcgcgccaccatcggacagtgggcgcgtgaagaagctagaaaggtacacgccgagcaccggcaccgacgcggctcgaggtgcaccaccggagaaagccactcagactcaaccccagcctcctaccgccccctccgcctttcccccctcccgtcccgtccacaccaagctgcagggcgcccgcgacaagatgttcaacaaatggttttactcatttactcatggagcacccggcatagatctggccgcgtggctgacgccggctagcagatcaacccaccagcaagcgaatccagtcaccgatgagaaatctttgaagggggaggctgaggagcccgcggcgagctcgagggccagcaccgacagcggggagaggggcagcagcgacggcggtgagccagtgatgcggaggagccggcaggttgggagcgccgggatggtgtttgggaaggaaggaagaggagagggcggtggtgtccagataaggggaaaagaatcttatactactagatga

SEQ ID NO: 42036 - DNA, 415 bp, Oryza sativa
  Clone ID: PAT_MRT4530_45324C.1
agggggaactataatatctacaggaaaaaatttatttatttccattggaatggaaaagtcaatattttacatatagccttccaaaagtttaagggctttaagtaggaaccgcaaaaaaaaaaaaaataacaaagatgacaaaacaatggaatgggtggcattacacactttaaatgagcccgaatggacaattttcccaaggggcaggcggcaccaaaatcactatttcccggacattagggtgaccaaaccttggttttcaaacagggtgttcatgtcccaaaacttacttggggatgaaagggtaattagggcgaccaccacggattttattgaaggcctcaacttggggtctttttgggggcacacctttgcaagttgtgtcagcttgagaatggaatcaaaaggaaaatct

SEQ ID NO: 42037 - DNA, 1062 bp, Oryza sativa
  Clone ID: PAT_MRT4530_45325C.1
atggggagggcgccgtgctgcgagaaggtggggttgaggagggggaggtggacgaaggaggaggacgagaagctggcgaggtacatacgggagaacggggaaggggcgtggaggtcgatgcccaagaatgccggcctgctgcgctgcggcaagagctgcaggcttcggtggatcaactacctccgggccgacctcaagagggggaacatctcgccccaggaggaggacatcatcctcaacctccacgccacactcggcaacaggagaatggagatgcataccgagatgctgtcagcgacaggctttaatttagcgcagagaaaatttcccatgctgctgacagatgacacggatggcggactctcatgcctgtggtccctgatcgccggccacttgcccgggcggacggacaatgagatcaagaactactggaactcgcacctgagccggaagggatacgagttcctccgcggcggcggcggcggcgccgtcgtcgacgtcgacctcagcaagttgcccggcggcgggaagcggcgcggcggccggacgggccgcagcagcagcgggaaggagaagacgaggacgaaggagaaggacaaggcccccgctccagaagctgcgcacaatgacgacggcggcggcggcggcggcggcggcattgacaacgtctcggcagctagccacagccacagggaggagcaggcacaggcgagcgccagtggtctcacatcagatgggctcgaggagggcccactgggcctaagcgaggagatggtgagtgggcccgtgggaccggtgagcccaaagcctgaggtgggccaggatgggtcttctgcagagagtggctgctgtgggcctagtggatccagtggcccaaccgaggctgtgggccaggacatgggcgacaagtccatggactgggacctggtgggcctggacgatggcttcgccaacgatgacatgtggggctcactctcctgggactacggggagttggtgggcccggatggagttcatcagggcgaggtgctatccgacttgttcttcttgggcaacctgtag

SEQ ID NO: 42038 - DNA, 5946 bp, Oryza sativa
  Clone ID: PAT_MRT4530_45326C.1
atggccgagcaagcaaaggcgcccgacctctctccgagtgtgagtggcgacgacggggagccaaacccacgccgtcgagctcgtactcccccgcctcctccacatcaaagtcctaagcagggggaggcgctcgagagggttgaaagatccgcggcttcaccaatcgcgggcgatggaggagaacggcgagatggggagcgtcgcctcctcgtctacggcgacggcagcacgccccagggcgcacttcaggctgctggcgcgctcctacgtcacccgcccgtcgtccctgacccggagtctccagcccagcgatggctggacgacgtggccaacttggtcatgacggcacagcagcgcctgggtactggtggacggtcctccacccccagggccaccggcgccgctaccaccggctccgtgtcgtcaaggcggagggcgcggcgagcggcggctgttgcacgccattcggctgccactccctcatcggcgcctccgactcgggagaatcagtgtggagagccggatgcccgcctcgacatcgagcgccggcgtaatgatcggtgtactccctatgcaacggagggcgcctcttcgtccagagtgtcacctcgacatggacgcgaggaccagccctccgtgcccccggctggtggtgtcggctgtagagcctttgtggcgagtcttcggaatgtccgttggcccccaaggttccggcccaccatcaccgagaagtatgatgggagcgtcaaccccactgagtttctccaggtctatacgaccgggattgaggccgctgggggtgacgacagggtcatggcgaatttctttcccatggccctgaaggggcaggcgcggggttggctgatgaacctgccacccgcgtcggtccactcctgggaggatttgtgccaacagttcaccgtgaactttcaaggcacttatccacgcccaggtgaagaagcggacttgcacgcagtacagcgaggggatgatgagtcccttcgctcgtacattcagcggttctgccaagtccgcaataccataccttgcatccctgcacacgcagtgatttatgcgttcaggggggcttcggccgcccccggatccgccgctcagacagggcggcgtgacaggaggaggaagaagaggtcggtccattccggcgacgagggtcatgtcctcgccgttgagggcgctccgcgggccacccgaaaggggaggcctgcgagcgacaaaaagaaggaggctggtgctcccagcagggagcgcccggccggcaagtggtgctccgtccacaacacctccctccatgatctcgcggactgtcgcgcagtcaaaagcttggctgagcggacgaggaagtgggaggaggagaggaggcaggaacgccgtgaggacaagtccccggcaattccctccggtaaacggcgaagtgaggctaggcagaaggcccccgctgttgacatcgatgacggcgatgatgacctaggtttccaagaacctggggccaccattgccactgtcgatgggggagcgtgtgctcacgtctctcgccggagcttcaaggctatgaagcgagagcttctggccgcggcccctactcatgaggcgacgcgtcgggcgcggtggtcggaggtttccctcacctttgaccagaccgaccacccaccgtgcgttgcccggggagggcagattgcgatggtggtttcccccaccatttgcaacgtgaagttggggcgtgtcctcatagatggaggagcggccctcaacatcctttcccccgcggcctttgatgccatcaaggccccggggatggtgctccggccgtcccaaccgattatcggtgtgacgccggggcacacatggccgctaggtcacatcgacctaccggtcacctttggtggatcagccaacttccgcacggagcgggtgaacttcgatgtggcggacctcagtctgccgtacaacgcggttctgggtaggcccgcgttggtgaagttcatggcggcggttcactacgcctacctccagatgaagatgccgggccccggtggccccatctctatccatggcgacctcaaagtcgcgctcgcttgctttgagcagcgcgcggaccacctcgctgctgcgtccaagcccgagggtggtgacgagaggcttggcacctccgcccccaccgccccgaggcagcggattgccacatgcgacgaggtcccggaagacgcgctcgtctccttcctgcgggcaaacgctgacgtcttcgcatggagaccggcggatatgcccggggtccccagggaggtgattgagcaccgtctcgctgtgcggccgggcgcaaggccggtccggcagaaagtgcggcggcaggccccggaacgtcaagccttcatccgcgaggaggtggcgagacttctggaggccggattcatccgtgaggtcatccatccggagtggctggcgaacccggtggtcgttcccaaggcgaacggcaaacttcggatgtgcatcgactacaccgaccttaacaaggcatgtcctaaggacccttaccccctgcctcgcatagatcagattgtcgactccaccgcggggtgcgaccttttgtgttttctagatgcatactctggttaccaacagattcgcatggctagggaggatgaggaaaaaactgcgttcattacccccgtaggaacctattgttatacatcaatgcctttcgggttaaagaatgcaggtcctacttttcaacgtactactcgaatttctttgggtagccaaataggacgtaatgttgaggcttatgtcgatgacttggttgtaaaaacgcgcaaccaagaaactttactctcagatctagcggaaacttttgagagcctccgctccgcccgcataaaactgaaccccgataagtgcgtgtttggtgtacctgcgggcaagcttctcgggttcttggtctctgcccgaggcatcgaggccaaccccgagaagatacgagctatagagcggatgcgcccccccagcaaacttagggatgtgcagtgcgtcaccggttgcatggccgccctaagtcgtttcatatcaaggctgggagagaaggcgctacccttatttaagctcctcaagcgctcggggccgtttacttggacggaggaagctgaacgtgccctcactcagttgaaggcatatctcagctctcccccggttctagtcgccccggagccaaatgagcccctactgctctacttagcggcgaccccccaagtagttagcgcagcgttggttgtggagcgcgatgaggacaatcctcattccgcgcgcccccaccctgtgctgatttggcccgggagcaagcagggaggagaggcccccgagccgaacggtggcctaaggcccctgacgaccggagtcggccctctgcccgcttgtcagacggtgctgggtgcccccgaccctcaggaaggccccgaggccactgcgggaaggccgcacctaacgccctttgaccccgaggctaaccctgtgcggactcgacccgggagagagcagggagaagaggcccccgagccgaacggtggcctaaggcccctgacgaccggagttggccctttgcccgcttgtccgacgacgccagggacccccgacccccaggacggccccgaggccactgagggaaggccgcccctgtcatcctccgaccccgaggccatcggcacagtagacgagtgcgccccgagaggccacttggacgaagaacgcctcggggacacggcccctagcgaagaggatcggccccgccgaaaggtgcagcggcctgtctactttgttagcgaggccctccgggacgccaagacccgatatcctcaggcccagaagttgctttacgctattctgatggcctcgaggaaactgcgccattatttccaggcgcatcgggtcacagtggttacgtcttaccccctcggtcaaatcttgcataatcgagagggtacaggacgggtggtaaaatgggcaatcgagctttctgagttcgatctgcactttgaaccacgccacgctatcaagagccaggccctcgccgattttgtggcagagtggaccccggctccagagaccgtctcaatccccgaggccagcacggacctttcgcagctgcctcacaccgcccactgggtgatgcagttcgacggttctctgtctctccagggcgccggtgcgggggtcacgttgacctccccgaccggagacgtccttagatacctggtccgcctcgactttcgagcgaccaataatatggcagagtacgagggactccttgccggactcagagtggcagccggactggggatccgccgcctcctggtgttaggcgactcccagctggtcgttaaccaggtctgtaaggagtatcggtgctctgacccgcagatggacgcttacgtacgccaagtgcggcgtatggagcgccattttgacgggatagagcttcggcatgtgcccagacgggataacatgatagccgatgaactctcacggctcgcgtcctcgcgagcccagaccccaccgggcgcctttgaagaaaggcttacccagccgtcagcgcgacccgaccccttaggggagacggatgcgcctgaccggcccccgaggcccgtcggagtccaggcctcgggacctgaagggagcgctccaagatcccttagattgattgcttggatctctgaggtccaaacatacctcacagataagactctacctgaggaccgcgaagggagtgaacgcgtccaacgcatctccaaacgctacgtgctggtagaagggaccctctatcggcgcgcggctaacggaatcctcctgaagtgcattcctcaggaacaaggtgttgagcttcttgccgatatccatgaaggcgagtgcggagcccattccgcctcgcgcaccctggttggcaaggcctttcgtcaaggattctattggccgacagctctcaatgatgcagtcgacctggtccggcgatgcaaagcgtgccagttccacgccaagcaaatccatcagccggcccaggccctgcagatcataccactttcatggccatttgctgtctgggggcttgatatcctgggaccgtttaggcgggccccgggcgggtttgagtatctgtatgtcgcgatcgacaagttcactaagtggcccgaggcttatccggttgtcaagatcgataagcactccgcacttaagttcattaagggcatcacggcccgttttggagtgcctaaccgtattattacggataatggcacccaattcactagtgaactcttcggcgactactgcgaagacatgggcatcaagctctgcttcgcctcacctgcccaccccagaagcaatggccaagtggagcgcgccaatgcagaaatcctcaaaggccttaaaaccaagaccttcaatattctcaagaagcacggcgattcatggatcgaggagttgccagcggtgctctgggcgaaccgaaccacaccaagccgagcaaccggggaaacgcctttcttcctcgtctacggcgcagaagcggttctcccatccgagctcaccctgaggtctcctcgggccaccatgtactgcgaggctgatcaagatcagcttcgcagagatgacctcgactacttagaagagcgaaggcggcgcgcggccctccgagccgcgcgctaccagcagagcctgcggcgctaccatcagcgccacgtccgggcccgatcactctgcgtcggcgacctcgtcctacgccgcgtccaaacgcgtgctggattgagcaagctctcaccaatgtgggagggtccgtatcgagtgatcggcgtcccccggccgggctccatacggctggccacgggcgacggcactgagttgcctaacccgtggaacatcgagcaccttcgtcgcttctacccctga

SEQ ID NO: 42039 - DNA, 365 bp, Oryza sativa
  Clone ID: PAT_MRT4530_45327C.1
ttgttttcgatccattccgatccatgaaatttctgctggtaccgtatagagcgagggcggctccagccatggacgtcatcatccacaagatcatggacaagctccacatgatcatacgcgagcacatgatggtggacgagcacaagaaggagggggtgcaccacaagaaggacggggagcacaaggaaggcatggtgaacaagatcaaggacaagatcaccggcgaccactgcgaccgcaaggagcacatggtgatgaacggcaagaagacgaagaacgacaacaagcacggcaaggagggccacaaccacgaccggcacagcagcattatctgcgacagggactgaatcgacgtgcccacacac

SEQ ID NO: 42040 - DNA, 4959 bp, Oryza sativa
  Clone ID: PAT_MRT4530_45328C.1
atggccgagcaagcaaaggcgcccgacctctctccgagtgtgagtggcgacgacggggagccaaacccacgccgtcgagctcgtactcccccgcctcctccacatcaaagtcctaagcagggggaggcgctcgagagggttgaaagatccgcggcttcaccaatcgcgggcgatggaggagaacggcgagatggggagcgtcgcctcctcgtctacggcgacggcagcacgccccagggcgcacttcaggctgctggcgcgctcctacgtcacccgcccgtcgtccctgacccggagtctccagcccagcgatggctggacgacgtggccaacttggtcatgacggcacagcagcgcctgggtactggtggacggtcctccacccccagggccaccggcgccgctaccaccggctccgtgtcgtcaaggcggagggcgcggcgagcggcggctgttgcacgccattcggctgccactccctcatcggcgcctccgactcgggagaatcagtgtggagagccggatgcccgcctcgacatcgagcgccggcgtaatgatcggtgtactccctatgcaacggagggcgcctcttcgtccagagtgtcacctcgacatggacgcgaggaccagccctccgtgcccccggctggtggtgtcggctgtagagcctttgtggcgagtcttcggaatgtccgttggcccccaaggttccggcccaccatcaccgagaagtatgatgggagcgtcaaccccactgagtttctccaggtctatacgaccgggattgaggccgctgggggtgacgacagggtcatggcgaatttctttcccatggccctgaaggggcaggcgcggggttggctgatgaacctgccacccgcgtcggtccactcctgggaggatttgtgccaacagttcaccgtgaactttcaaggcacttatccacgcccagcttcggccgcccccggatccgccgctcagacagggcggcgtgacaggaggaggaagaagaggtcggtccattccggcgacgagggtcatgtcctcgccgttgagggcgctccgcgggccacccgaaaggggaggcctgcgagcgacaaaaagaaggaggctggtgctcccagcagggagcgcccggccggcaagtggtgctccgtccacaacacctccctccatgatctcgcggactgtcgcgcagtcaaaagcttggctgagcggacgaggaagtgggaggaggagaggaggcaggaacgccgtgaggacaagtccccggcaattccctccggtaaacggcgaagtgaggctaggcagaaggcccccgctgttgacatcgatgacggcgatgatgacctaggtttccaagaacctggggccaccattgccactgtcgatgggggagcgtgtgctcacgtctctcgccggagcttcaaggctatgaagcgagagcttctggccgcggcccctactcatgaggcgacgcgtcgggcgcggtggtcggaggtttccctcacctttgaccagaccgaccacccaccgtgcgttgcccggggagggcagattgcgatggtggtttcccccaccatttgcaacgtgaagttggggcgtgtcctcatagatggaggagcggccctcaacatcctttcccccgcggcctttgatgccatcaaggccccggggatggtgctccggccgtcccaaccgattatcggtgtgacgccggggcacacatggccgctaggtcacatcgacctaccggtcacctttggtggatcagccaacttccgcacggagcgggtgaacttcgatgtggcggacctcagtctgccgtacaacgcggttctgggtaggcccgcgttggtgaagttcatggcggcggttcactacgcctacctccagatgaagatgccgggccccggtggccccatctctatccatggcgacctcaaagtcgcgctcgcttgctttgagcagcgcgcggaccacctcgctgctgcgtccaagcccgagggtggtgacgagaggcttggcacctccgcccccaccgccccgaggcagcggattgccacatgcgacgaggtcccggaagacgcgctcgtctccttcctgcgggcaaacgctgacgtcttcgcatggagaccggcggatatgcccggggtccccagggaggtgattgagcaccgtctcgctgtgcggccgggcgcaaggccggtccggcagaaagtgcggcggcaggccccggaacgtcaagccttcatccgcgaggaggtggcgagacttctggaggccggattcatccgtgaggtcatccatccggagtggctggcgaacccggtggtcgttcccaaggcgaacggcaaacttcggatgtgcatcgactacaccgaccttaacaaggcatgtcctaaggacccttaccccctgcctcgcatagatcagattgtcgactccaccgcgggccaaataggacgtaatgttgaggcttatgtcgatgacttggttgtaaaaacgcgcaaccaagaaactttactctcagatctagcggaaacttttgagagcctccgctccgcccgcataaaactgaaccccgataagtgcgtgtttggtgtacctgcgggcaagcttctcgggttcttggtctctgcccgaggcatcgaggccaaccccgagaagatacgagctatagagcggatgcgcccccccagcaaacttagggatgtgcagtgcgtcaccggttgcatggccgccctaagtcgtttcatatcaaggctgggagagaaggcgctacccttatttaagctcctcaagcgctcggggccgtttacttggacggaggaagctgaacgtgccctcactcagttgaaggcatatctcagctctcccccggttctagtcgccccggagccaaatgagcccctactgctctacttagcggcgaccccccaagtagttagcgcagcgttggttgtggagcgcgatgaggacaatcctcattccgcgcgcccccaccctgtgctgatttggcccgggagcaagcagggaggagaggcccccgagccgaacggtggcctaaggcccctgacgaccggagtcggccctctgcccgcttgtcagacggtgctgggtgcccccgaccctcaggaaggccccgaggccactgcgggaaggccgcacctaacgccctttgaccccgaggctaaccctgtgcggactcgacccgggagagagcagggagaagaggcccccgagccgaacggtggcctaaggcccctgacgaccggagttggccctttgcccgcttgtccgacgacgccagggacccccgacccccaggacggccccgaggccactgagggaaggccgcccctgtcatcctccgaccccgaggccatcggcacagtagacgagtgcgccccgagaggccacttggacgaagaacgcctcggggacacggcccctagcgaagaggatcggccccgccgaaaggtgcagcggcctgtctactttgttagcgaggccctccgggacgccaagacccgatatcctcaggcccagaagttgctttacgctattctgatggcctcgaggaaactgcgccattatttccaggcgcatcgggtcacagtggttacgtcttaccccctcggtcaaatcttgcataatcgagagggtacaggacgggtggtaaaatgggcaatcgagctttctgagttcgatctgcactttgaaccacgccacgctatcaagagccaggccctcgccgattttgtggcagagtggaccccggctccagagaccgtctcaatccccgaggccagcacggacctttcgcagctgcctcacaccgcccactgggtgatgcagttcgacggttctctgtctctccagggcgccggtgcgggggtcacgttgacctccccgaccggagacgtccttagatacctggtccgcctcgactttcgagcgaccaataatatggcagagtacgagggactccttgccggactcagagtggcagccggactggggatccgccgcctcctggtgttaggcgactcccagctggtcgttaaccagataagactctacctgaggaccgcgaagggagtgaacgcgtccaacgcatctccaaacgctacgtgctggcgggccccgggcgggtttgagtatctgtatgtcgcgatcgacaagttcactaagtggcccgaggcttatccggttgtcaagatcgataagcactccgcacttaagttcattaagggcatcacggcccgttttggagtgcctaaccgtattattacggataatggcacccaattcactagtgaactcttcggcgactactgcgaagacatgggcatcaagctctgcttcgcctcacctgcccaccccagaagcaatggccaagtggagcgcgccaatgcagaaatcctcaaaggccttaaaaccaagaccttcaatattctcaagaagcacggcgattcatggatcgaggagttgccagcggtgctctgggcgaaccgaaccacaccaagccgagcaaccggggaaacgcctttcttcctcgtctacggcgcagaagcggttctcccatccgagctcaccctgaggtctcctcgggccaccatgtactgcgaggctgatcaagatcagcttcgcagagatgacctcgactacttagaagagcgaaggcggcgcgcggccctccgagccgcgcgctaccagcagagcctgcggcgctaccatcagcgccacgtccgggcccgatcactctgcgtcggcgacctcgtcctacgccgcgtccaaacgcgtgctggattgagcaagctctcaccaatgtgggagggtccgtatcgagtgatcggcgtcccccggccgggctccatacggctggccacgggcgacggcactgagttgcctaacccgtggaacatcgagcaccttcgtcgcttctacccctga

SEQ ID NO: 42041 - DNA, 5346 bp, Oryza sativa
  Clone ID: PAT_MRT4530_45329C.1
atggccgaacaagcaaaggcgcacaacctctctccgagcgttagtggtgacgacggggagccgaacccacgccgtcgagctcgtactccgccgccccctccacgccaaagtcctaggtgggaggaggcgctcgagagggtcgaaggatccgcgacttcgacatccacgggtgatggagaagggcgccgagatggggagcgtcgcctcctcgtctacggcgacggcagcacgccccagggcgcgctccaagcggcgggtgcgctcctacgtcacccgcccgttgtccctgacccggagtctccagcccaacgttggctggatgatgtggccaacttggtcatgacggcgcggtggcgcctagatgctggtgggcggtcctccgccaccaaggcctctggtgctgctaccaccggctccgcgtcgtcaagacggatggcacggcgagcggcggccgctgttcgccattcggccgccactccttcgtcagcacctccgacccgggaagatcagcgtggggggccagatgcccgcatcagtatcgagcgccggcgtaatggccgacgtactgcccacgcaacggagggcgcctcctcgtccggacgcggggatcagccctccgtgcctccggttggtggtgtcggctgtagagcctttgtggcgagccttcggaacatccgttggcccccaaggttccggcccaccatcgccgaaaaatatgacggcagcgtcaaccccgccgagtttctccaggtctacacgaccgggatcgaggccgccgggggtgatgacagggtcatggcgaatttctttcccatggccctgaagggacaggcgcggggttggctaatgaacttgccacccgcgtcggtccactcctgggaggatttgtgccaacagttcaccatgaacttccaaggcatatatccgcgcccaggtgaagaagcggacttacacgcagtacagcgaagggatgatgagtcacttcgctcgtacattcagcggttctgtcaagtccgcaacaccataccatgcatccctgcacacgcagtgatctacgcgttcagggggggtgtgcggcacaaccgcatgctcgaaaagatcgcctccaaagagctccagactaccgcggagctttttcagctcgcggaccgagtggctcgtaaggaggaggcatggacctggaacccctccggttccggtgtggcagcttcggccgcccccggatccgctgctcagacagggcggcgtgacaggaggaggaagaagaggtcagcccattccgacgacgagggtcatgtcctcgccgtcgagggcgcttcgcgggccacccgaaaggggaggcctgcgagtgacaaaaagaaggaggccggcgctcctagcagggagcgcccaaccggcaagtggtgcaccgtccacaacacctcccttcacgatctcgcggactgccgcgcagtcaaaagtttggctgagcggacgaggaagtgggaggaggagaggaggcaggagcgccgagagggcaagtccccggcggttccttccggcaatcggcgaagtgaggccaagcagaaggcccccgctgaggacatcgatgacggcgatgatgacctaggtttccaagagcctggggccacaattgccactgtcgatgggggagcgtgtgctcacgtttcccgccggagcctcaaggccatgaagcgggagcttctggccgcggcccctactcatgaggcgacgcgccgggcgcggtggtcggaggttgccctcaccttcgaccagaccgaccacccaccgtgcgttgcccggggaggacagatcgcaatggtggtttcccccactgtttgcaacgtgaagctggggtgtgtcctcattgatgggggagcggccctcaacatcctttcccccgcagcctttgatgccatcaaggccccggggatggtgctccggccgtcccagccgattatcggtgtgacgccggggcacacttggccgctaggtcatatcgaccttccggtcaccttcggtggatccgccaacttccgcacggagcgggtgagctttgatgtggcggacctcagtctgccctacaacgcagtcctagggaggctcgcgttggtgaagttcatggcggcggtccactacgcctacctccagatgaagatgccgggccccggtggccccatctctgtccatggcgacctcaaagtcgcgcttgcttgtatggagcagcgcgcggaccacctcgccgccgcgtccaaacccgagggtggcgacgagaggcttggcacctccgtccccgccgccccgaggcagcggatgatcacatgcgacgaggtcccgagaccggcggatatgcccggggtccctagggaggtgattgagcaccgtctcgccgtgcggccgggcgcaaggccggtccggcagaaagtgcggcggcaggccccggaacgtcaagccttcatccgcgaggaggtagcgcgacttctggaggccggattcatccgcgaggtcatccatccggagtggctggcgaacccggtggtcgttcccaaggcgaacggcaagcttcggatgtgcatcgactacaccgaccttaacaaggcatgtcctaaggacccttaccccctgcctcgcatagatcagattgtcgactccaccgcggggtgcgaccttttgtgttttctagatgcatactctggttaccatcagattcgcatggctagggaggatgaggaaaaaactgcgttcattacccccataggaacctattgttatacgacaatgcccttcgggttaaagaatgcaggtcctacttttcaacgtactactcgaatttctttgggtagccaaataggacgtaatgttgaggcttatgtcgatgacttggttgtgaagacgcgcaaccaagagactttactctcggatctagcggaaacttttgaaagtctccgctccgcccgcataaagctgaaccccgataagtgcgtgttcggtgtacctgcgggcaaacttctcgggttcttggtctctgcccgaggcatcgaggccaaccccgagaagatacgagctatagagcggatgcgcccacccagcaaacttagggatgtgcaatgcgtcaccggttgcatggccgccctaagtcggttcatatcgaggctgggagagaaggcgctacccttatttaagctcctcaaacgctccgggccgtttacttggacggaggaagctgaacgtgccctcactcagttgaaggtgtatctcagctctcccccggttctggtcgccccggagccagatgagcccttgctactctacttagcggcgaccccgcaagtagttagtgcagcgttggttgtggagcgcgatgaggacaatcctcattccgcgcatccccaccctgtgctggcttggcccgggagagagcagggaggagaggcccccgagccgaacggtggcccaaggcccccgacgaccggaaccggccctctgcccgcttgtcagacggtgccaggtgcccccgacccccaggatggcccggcggccactgcgggaaggccgcacctatcgccctctggccccgaggctaaccctgtgccgactcgacccgggagagagcagggagaagaggcccccgagccgaacggtggcctaaggcccctgacgaccggagttggccctttgcccgcatgtccgacgacgccaggagcccccgacccccaggacggccccgaggccactatgggaaggccgcccctgtcgtcctccgaccccgaggtcgtcggcacagaagacgagtgcgtcccccgaggccgcttggacgaagagcgccccagggatgcggcccctagcgaagaggatcggccccaccgaaaggtgcagcggcccgtctactttgttagtgaggccctccgggacgccaagacccgataccctcaggcccagaagatgctttatgctattctgatggcttcgaggaaactgcgccattatttccaggcgcatcgggtcacggtggttacgtcttaccccctcggccaaatcttgcataatcgagagggtactggacgggtggtgaaatgggcaatcgaactttctgagttcgatttgcactttgaaccacgccacgctatcaagagccaggccctcgccgactttgtggcagagtggaccccagctcccgagcccgtctccattcccgaggccaactcgggcccctcgcagctgcctcacaccgcctactgggtgatgcagtttgacggctccctgtctcttcagggcgccggtgcgggggtcacgttgacctcgccgagcggagacgtcctcaaatacctggttcgccttgactttcgggcgaccaacaatatggcagagtacgagggactccttgcaggactcagggtggcagctggactggggatccgccgcctcctggtattaggcgactcccagctggtcgttaaccagataagactctacccgaggatcgcgaagggagtgaacgcgtccagcgcatctccaaacgctacgtgctggcgggccccgggcgggtttgagtatctgtatgtcgcgatcgacaagttcactaagtggcccgatgcttatccggtcgtcaagatcgataagcactccgcacttaaattcattaagggcatcacagcacggtttggagtgcctaaccgtattattacggataacgacacccaattcactagtgagcttttcggcgactactgcgaagatatgggcatcaagctctgcttcgcctcacctgcccaccccagaagcaatggccaagtggagcgtgccaatgcggaaatcctcagaggccttaaaaccaagaccttcaacatcctcaagaagcacggcgattcgtggatcgaggagttgccagcggtgctctgggcgaaccgaaccacaccaagccgagcaaccggggaaacgcctttcttcctcgtctacggcgcggaagcggttctcccatccgagctcaccctgaggtcccctcgggccaccatgtactgcgaggctgatcaagatcagcttcgcagagatgaccttgactacttgaaggagcgaaggcggcgcgcggccctccgagccgcgcgctaccagcagagcctgcggcgctaccatcagcgccacgtccgggcccgatcactctgcgtcgaagacctcgtcctacgccgcgtccaaacgcgtgctggattgagcaagctctcaccaatgtgggagggtccgtatcgagtgatcggcgtcccccggctgggctccgttcggctggccacgggcgacggcacagagctgcctaacccatggaacatcgaacaccttcgtcgcttctacccctaa

SEQ ID NO: 42042 - DNA, 672 bp, Oryza sativa
  Clone ID: PAT_MRT4530_4532C.1
gtcttcctcaatcaattctcgatgctgtcaatgatatgagttttgtaactccatctcctattcaacaagaatgtattccccatttattagctggtagcgatgtactcggtatggcgcaaactggtagcggtattcgtgtagttaccgtttatggtggtcaacgttacgatattcagttacgtgcattaaaacaaggttctcaagtggttgtgggtacacccggtcgtattcttgatcatattcgccgtggtacgttaaatttatctaccctcaaatcaatcgtgttagatgaagccgatgaaatgttacgtatgggctttattgatgatgttgaaacagtaatggcagaattaccagaaaaacaccaaacagccttgttttcagccaccatgccagagcctatacgccgtattacacgccgatttatgtctgatcctaaagaagttaaaattcaagcaacacaacgttctgcaccagatattacacaaagctactggttggtaaatggtttccgcaaaaatgaagccttactgcgctttttagaagttgaagaatttgatgcggctattattttcactcggactaaaacaggcacgattgatatcaccgaattatgtgagcgtaatggctatcgcaccgcagcgctcaacggtgatatgactcaacaagctc

SEQ ID NO: 42043 - DNA, 513 bp, Oryza sativa
  Clone ID: PAT_MRT4530_45330C.1
atgcggtaccacatcctcctcgactggcctgcttacctgagcatctccgcgctggccggcttcgactccctggtgttcctagtctcttggcagctgtggaaggaacggaactctagggcacccccaccaccacctcgagctccatcctccgccgtcccctccactgcctcctcctcccgccgcttcgagctccgccgtccccttcactacccctcctcccgccgcttcaagctcctccgcaccctccactgcctcctcctcccaccgcccgagctccgcccatcgccgtcctctgcttgctccgctgccccctctacctccctaagcgtcactggcttggctgcgggtggtctcttcgtcgctgcccactccgccctcaccgccgtcctatgcgccggtggctgcgtgcgccgtcttcaccgccgcccactccgcccgccatcgtctgagctcctcccgctgtcccgagctccaccgctccaagctctgctcgccgccgtcctcaaggtttag

SEQ ID NO: 42044 - DNA, 837 bp, Oryza sativa
  Clone ID: PAT_MRT4530_45331C.1
aagggacaaagctgggctcggggccgccccttttttttttttttttttggaattaaacagggcgcctgcctgctcgtttgatcgcatttcacacggatggctgacaggttgcccatagatcatgtgaggagtattcacatgaaaagtgcacatagaacattggcattgtcgctagatcagcaaatctttgagcatttatacagacagtcacgccaactcaaatatttgcttctttgtacacatgtccatgttagtgtccactaaggaatttctcttgtacgtgctgagaagcaaaccatgaaacagatttaccttcttgtgtccatgtgcctcgagccttttaccaatcttcatccagcgtagctctatggaagcacatcactgtgcatacaaggatgaagaaggacgtgaactcgatgaacatggctccagtctcaattaggccagcgtgcctcagaattgctgggattgcaatgcttcccatggcagatgcaccagtcaggaattttgcagcattgaaccaccctccaccatctctgctagtcaagaactgggtagatccaccaccgaagaataggcatggcatcggtacaaggacatacataagagctgctaacataggccaccaattattgtacagagcacaagccagtatttgcaaaagaatacttgttgagaacataaatgcaagtccagcgagcacttcgacggtcatcgccatctccgcgagcaagcggaggcctctgcgggggaaatttttctccaaactcgagaggagcaccttcttctccccttccgctctgacctgcgttgcgagtctctgcgcatacccggccg

SEQ ID NO: 42045 - DNA, 305 bp, Oryza sativa
  Clone ID: PAT_MRT4530_45332C.1
atggaggaaagaatggcggccggtgaggcgaagacggttgctacggacactgagaggaagccaaccaggacggcgccgactgtgaggaggacaacgtcggctgaggagaagacccctcctagcgtctacaggtcggcaagctctgccctttttcctcgccggccactactcgtcctcccacccttccagccgccgccgcatggatcccggaggaggaggagatggggaggccaccgctgggtcgccgcattggggaggagacagcgagattggggaggaggactggaggagacgtgggtcccacc

SEQ ID NO: 42046 - DNA, 430 bp, Oryza sativa
  Clone ID: PAT_MRT4530_45333C.1
ataccaaggtccaatatatttatatattctcagtgcccggcttgattgtcggccacaattcacaccaatttcacaacttgtaagcacgggattgctcacccaaaatccaccacagaaactctcgtctgagctcaaaacagtaagaaaaaaaaagtatgtacatgctagtagaagtgcaaaagtggctgagggaagtttgttgtaaacagtttcagttctatattttttttaggagagcatgctgcacacagtttcgatcagtttgtcgcgtcgaccttctctttcacatcttgagatgctggaactggagctgcagtttcttgttcctccaaatctgagcgtgctgtttcttctgcattacctccttgactgctgataccctcctcttctatcctcttccccaagagaacagtatacaggcccacaacca

SEQ ID NO: 42047 - DNA, 356 bp, Oryza sativa
  Clone ID: PAT_MRT4530_45334C.1
atagaggggaacatcggggttcatcatttattcaccaaacatatgcttccaaacaaaaggaaaacactaattattttggggggggggccacatacatgcccagcttgctacagtagcctagcttggagccagatctcgcccgccagtagcagacaccacctccgccgttggggatgtccacgttgcaaaaccccgggaggctcgccgccgcgcgctccaagtccccttttcggcagccgcggaacaccttggacatggggggccccacatcgggggcgccgggctccctgtagatgcctcccagcatgtgggtgatcgcctcgcacctgcaccagctgttgtcgacggcggggagc

SEQ ID NO: 42048 - DNA, 598 bp, Oryza sativa
  Clone ID: PAT_MRT4530_45335C.1
gccccagggccggttacatgcttggtactgcttcttccttgtgctaatttgctaactttgttatcccttccaggcagtgggttcaaaagatggcattaaatccttctctttattgcaactagtggagtttggataacatgctgacactaatccactaatttggtccataggaagaaattctaaccaattagttagttgccatgctaacatcagagtcaactaattgctctaacaatgttatttgttattttatattttgtgctgcacttcagaattcagatcagtttcagataattattcatgaggcttgtaagtatctgatttggcaaaatagtgattcccttaccaatctttataatatagatataaaatgagttgtcataaaactatccttattgtcttatagatcataaatatcttgtcatcttttggggtaactagcttgtcaatggaacccatatatacgcccagaagtagttgggcacaatattgcactttttaagtttagtcctataactcttcagaatgctcctaaatcatctgtagtttaatctatttttacatttggatttaaatttctgcattttctatcattgaa

SEQ ID NO: 42049 - DNA, 1272 bp, Oryza sativa
  Clone ID: PAT_MRT4530_45336C.1
atgggctactggattattaataatggtgaacaagttagattctgggaggataagtggttagttatggttccgcttaatgtctgttttaggagagcattagttggcgcctcaccgtccggagcgcgcaccgcggcgctgccggcgtcgtccgcccatgccgccgccgcccgccgcgtcgtgcggcctacacggccaccaccgccgccgccgcagaacttctccgtctccaccggcgtcgccactcgccgcgtcgtgccttcacggccaccacctccaccgcctcctcagaactgctccgtctccaccgccgtcgccgcccgccgcgtcgtgcctacacggccaccaccaccacctccgccgccgccgccgccgccgcagatcaactactccgtctcgaccgccgccgccgccaggtcgagcgggcaccacgtgttccggatccgcgactactccctcctcgaggcgatcacccccaacggcaagagcatcaagtccacctcgttcgcggtgggcggccatagctggcacgtcgagtactaccccaacggctacgacgccgatcacaccgactacgtctccgtcttcctcgtcctcgaagacgacatcgccgccgccggcggcgcgggcgagccggtgaacgtgcagcttcgcttccgcttcgtcgacgcgtcgtccaaccccggtcggccgtggacgccgccgccgccgccgccgccgtctgaattagccgacatgcgtggcgagaaggtgcgcgacttcgacggacaagggaatggatggggcaccgtggcgttcaagaagaaggagaagctggagagggaagggctcatcgtggaggatgggctggccatcaggtgcgacatcgttgtcatcacgcaatcctgcacggcgacgacgacgacagaggcctcgctggccgccgccgccgcggcatcgtcgtccagcgaggaaatggtttcccccaccaccatcgaggacaaggtggtgaacccgacggagcaatgcaacgaccaccaccatcgtgtcatacaaatcgacggcatgaagcccccaagttgttcgacgcgctcagcttcatccactatcctcgagcagctcctacgcaaccatcatcgtgcaactctcgctactatggccatggagtgccactggccgccacagtccttgagtagttccaacgtgggggccaagagctgcttcgctgccgtggcccttgagcgctgctcaattgctcattgctgtcatcctttatctgccatccgagagctttga

SEQ ID NO: 42050 - DNA, 365 bp, Oryza sativa
  Clone ID: PAT_MRT4530_45337C.1
gcacgagggatcacctgaacaacaattgtgctcctctgtactctactggatctgtagcaagggagagccttgccaccactgtggagagctcgtctgggcggaaatcgctccctgattcgctggctacagcgaaccttaatctctggcagttcatcactccgcagacagttccgtcaggaggaggaatgcagcctagcccacaaactgcagaaagcaattgatgatgacagatacaaggatgttgatgactgttccgagctaccctcggtcacaaatcaaaagcagcgcaatgatatatatcagtctccagatgctgatgctaaagagaagagggtgggcagaagttcatcggacattaaccatca

SEQ ID NO: 42051 - DNA, 1776 bp, Oryza sativa
  Clone ID: PAT_MRT4530_45338C.1
atggccgctagaagcgagcttctccggccggcatttggtgaagcatctccttcgctaggacggtttgtcattaaccctcacagctgcagctacaggtggtggcacatgttcctgatcatgctggtgttgtactcggcatgggcatcgccgttcgagctgtccatggagaaggcagcctccattgctcttgttgtcacagacctggtggtcgatgtcttcttcgccattgacattgccttatccttcttcgtcgcataccgtgacacctccaccggcctcctcataactgaccgcaggaagatcacaatgaggtacctgaaacggccgtgtttcgctctggatgtggcctcgacgattcctttacaaataatctaccagcttgtgactggcaaaagacaaggactgtgggggctcctcaatcttctccgtctttggcgactacggcgcgtcagcaagctctttgcgagggtggagaaggacatcagattcaactatttgtggaccaggcttatcaagctcctttgtgtgacactgtttgcgctgcattttgccgcttgcatctacctgtggatggcattcaactacaagatcaaggagcttacatggataggcagccagatccatagctttgaggaccgaagcgtgtggttttgctacacctgtgcagtgtactggtccatcaccacgcttgccacggtcggctacggtgacctacatgccaccaacattggcgagatgcttttcagcatagccttcatgcttttcaacatgggcctcacatcctacatcatcggcaacatcaccaacctcgttgtccgtgaaacctccaacaccttcaagatgagggacatggtgcagcgggtgtcggagttcgggagaatgaaccggctgccagaggcgatgagggagcagatgttggccagcgtgcagctcaggttcaggacagatgagcagctgcagcaggagatgttgtcagagctgcccaaggctgtgcggtcgggcgtcatgaagcacatgttcaagagtgctatcgagagctgctacctattccagggagtctccgacagcctcattgtgcagctggtcgcggagatgaaagcagaattctttccccccaaggctaatgttatcctagagaatgagacctcgacggactgttatatcatcatctctggcgaagtggaggcattgacaacccttgcagatgggacagagaagcatgtgaagagaataggacctcggggcatggcaggggaaatcggggtgatgttcagcattccgcaaccattcaccatccggagcaggagactcacccaggttgtccgcataagccatatccatctgcttcaggctgtccggcctaacaccgcagatgggtacatcgtgttctccaattttattcagtaccttgagtctctgaaggtgcaaacaaaggatgtggcttttgtcagcgatcatctttggaatggaaactcaatggttttgagaagggcaaccgaggttgctgtagatgaatcaaaagaggccgctcacaaaatgttaccatgcaaagaacccaaacgggttgttattcatgagcaacttcccaacgcgactagcacagcactgcatccttcgccggggaagctcgtcttactcccagattcgatgcaagaactgatgaaactttcagaaaagaaatttgggaaggccgtgagagggatcctcactgtggaaggagccgaggttgaggacattgaagtgataagagatggcgatcacctgttatttagttag

SEQ ID NO: 42052 - DNA, 1107 bp, Oryza sativa
  Clone ID: PAT_MRT4530_45339C.1
atggcagctagaagcgagcttctccggtcggcatttggcaaagcgtctccttcgcttggatggttcattgttaaccctcacagatacagctacaggtggtggcacatgttcctgatcatgctggtgttgtactcggcatgggcatcgccatttgagctgtccatggagaaggcagcctccattgctcttgttgtcattaggcctagtggtcgatgtcttcttcgccatcgacattgccatatccttcttcgtcaccttgtcactggcaaaagacaaggactatgggggctcctcaatcttctccgtctctggcgactacggtgtgccagcaagctctttgcaagggtggagaaggacgtcagattcagctatttgtggactaggcttatcaagctcctctgtgtgacactgtttgcgttgcactttgccgcttgcatctacctatggatggtattcaactacaagatcaaggagcttacatggataggcagccagatccatagctttgaggaccggagcgtgtggttttgctacacctgtgcagtgtactggtccatcaccacgcttgccacggtcggctatggcgacctgcatgccaccaacatcggcgagatgctgttcagcatagccttcatgctcttcaacatgggcctcacatcctacatcatcggcaacatcaccaacctcgttgttcgtgaaacctccaacaccttcaagatgagggacatggtgcagtgggtatcggagttcgggagcatgaaccggctgccagaggtgatgagggagcaaatgttggccaacgggcagctcaggttcaggacaaaggagcagctgcagcatgagcatgtgaagagaataggacctcggggcatggtaggggaaattggagtgatgttcagcattccacagccattcaccattcggagcaggaggctcacccaggttgtccgcataagccacatccatctgctccaggctgtccggcctaacaccgcagatgggtgcatcgtgttctccaattttattctggtatccgattttgtggaataccttgagtctctgaaggtgcaaacaaaggaagtggcttttgtcagcggtcatctttag

SEQ ID NO: 42053 - DNA, 282 bp, Oryza sativa
  Clone ID: PAT_MRT4530_4533C.1
ttgtttttttaaaaaaatgtggtatcacacccacatatttaatctttcaaaatcccaatatactctaatattcattaatcctttaccccaaaaaaaaccctcacaatctttcacactaactaactattaaaccaaaccaagtaagctcaaacttacacatctaacgaccaacatgcatatatatttctagctagaacattgaccacaaatcatacacatagaaacctttaaattacagccttaaatcaatgcacccctcctttcttcataaaatgtcacatc

SEQ ID NO: 42054 - DNA, 184 bp, Oryza sativa
  unsure (1)..(184): unsure at all n locations
  Clone ID: PAT_MRT4530_45340C.1
tgctattgttgcatgcatgcaatggtgtnnnnggtttgatcctcttagtcaaagttatagncaatatcaactacagtcgcatctcctactacagcaacaagtnctcagccccatgcagtgagttgtaaggcaacagtatagcatagtggcaacctggccttctggcaaccacgtacgtttaatt

SEQ ID NO: 42055 - DNA, 161 bp, Oryza sativa
  Clone ID: PAT_MRT4530_45341C.1
gtacacagctcggtgagctgcacagattgccccctgcgcgatgagccgcgccgccattagcaggagctcccttccatggtcttaagctccaccgacgggatgcccgacacccgccgcttcgacaactccatctccggcatcaacagcactggcggatggat

SEQ ID NO: 42056 - DNA, 640 bp, Oryza sativa
  Clone ID: PAT_MRT4530_45343C.1
cggcacgaggtgctcatcggcggcgagcaaaagcgagcttggtggccatggcgagcttggtgttcgagccccacggcggcgcggcggtggtggtggccggagtcggcggcggcgacgtggtgttctgcgtcgtcatcctctgcctgtccgtgctgtccatgatcatcttcgccgcggcctcccccggcggggagcggcggcggcggcggcgctcctcctccggaccggtgttcgtcggtggcaggggctgcggctgcggcggccgcagctccggcgcctgcgtctgcggcacctacctctcctgatcatcgccgtcgacgtacggcgtcgagccagctaaagctagctgcggcgatcgctcgccgccggcgaactgtacatggagcttcgcggcggcggctttgctctgaaaatccgtacggctagctaattttcttccttttttttttcttcaaaaaaaatgagagaataattactgctcctactctgcttgtacctagtactacaattactacacggcatgaggaacaaattactaactgtaatgagatggagttactgtaaattgtaattaagtctaataataatcatcatcatctttggattctcagttgttagtattagtgctaattaatcacta

SEQ ID NO: 42057 - DNA, 236 bp, Oryza sativa
  Clone ID: PAT_MRT4530_45344C.1
ataataaaattttaagggtaggtttaaataaataatagatcataccccaaaaaaaccataaaatatacccataaatcaaacttttacaaacttataaacactatatctcccttttataatacttaaacccaatctctttcttaaaagactaaaaaattataatctccttttaattctctaaaaaaaaattatttctacaaatactactctataaataattttttaatctaaaacaa

SEQ ID NO: 42058 - DNA, 1596 bp, Oryza sativa
  Clone ID: PAT_MRT4530_45345C.1
atcgtgtgcaagctaacaacatcgctaggcaaaaggaagtcgttgctttcgagtttcccacccatggcatcctccgccggcgacccgctcctctccggcgaggccggcgacggccgccgcaggttcgtcccgtccaccatacggctcaagacgtcggtgtggtcggagctgggcggcgcggtgggcgatctgggcacctacatccccatcgtgctggcgctgtcgctcgcgtcccacctcgacctcggcaccacgctcatcttcaccgcgctctacaacttcgccaccgggctcctcttcggcatccccatgcccgtccagcccatgaagtccatcgccgccgtcgcgctctcctccgcgcacctcaccatcccgcagatcatgtccgctggcctcgccgtcgccgccatcctcctcttcctcggcgtcaccggcctcatgaccaccctctaccgcctcctcccgctccccgtcgtgcgcggcgtccagctctcgcagggcctctccttcgccttcaccgccgtcaagtacatccgctacgtgcaggacttctcccgttcctcctctgcttccacctccgtgccgcgccccctcctcggcctcgacggccttgtcctcgcgctcgccgcgctactgttcataatcctcgccaccggctccggcgacgacgaggacgtcaacagggacggcacgagccgtcgccgtcgctcctgcagccgcgtcccggcggcgctaatcgtgttcgcgctcggcttggtgctctgcttcgttcgtgatccgtccatcctgcaggatctccgctttgggccggcgccgttggggctggtcaagataacctgggacgatttcaagatcgggttctgggagggcgccgtgccgcagctcccgctgtccgtgctgaactcggtgatcgccgtgtgcaagctgtcgtcggacctgttcccggaacgggccgagctctcgccggcgcgggtgtcggtgagcgtggggctcatgaatttcgtggggtgctggttcggcgccatgccgtgctgccacggcgcgggcgggctggcggggcagtaccggttcggcggccggaccggcgcgtccgtggtgttcctggccatcggcaagctggcgctcgggctggtgttcggcaactcgttcgtgacgatcctggggcagttcccgatcgggatactgggcgtcatgctgctcttctccgggatcgagctcgccatggcgtcgcgcgacatggggagcaagcaggagtcgttcgtcatgctggtctgcgccggcgtgtcgctcacaggctcgagcgccgcgctgggcttcatctccggaatcgtgctgtacctgttgctacgcctgagggatttggagtgggatatcagaggactgctcggtcgctgggccgcgggacggcggcaatcgaccaacgaggccaatgaagatggggctggagatgcttgatcgaaatcttgagaacatctgttgatttgagattttgagtgtggtgtgaattgttcgagcgaatatatatagtatcaacatgcatagcggataaaaaaaaatgataaaatttctgaatggagtaactccacataatcgccc

SEQ ID NO: 42059 - DNA, 399 bp, Oryza sativa
  unsure (1)..(399): unsure at all n locations
  Clone ID: PAT_MRT4530_45346C.1
atggccgaaaaaccaccaccatcaccgggaacaggagtcaaacctcccgtaaataaaatgggggccaaaaatccatcagctgaagtggacccaaccaatattgttccaatcacattggataggctgacagctgagcaaagggatgaacttgaacagatgatgagcaacgtgaagaacaaattcatggattcttttaggagacccgcagnaggaactcattcgttccaanaaagttaccaaagtttttggaaaaaggggtgggggttttcccgggggccccaaaagggcccctataggtatgccagttatctaggggacaaggtactgaactggctaggtaacaaaagtgatattcctcaagatggtacanttgaaaaccttggtgcagatggcaaccan

SEQ ID NO: 42060 - DNA, 232 bp, Oryza sativa
  Clone ID: PAT_MRT4530_45347C.1
gccccggcccgggccaagggccttccgtccattttcggcagggaaccttcttcggccttggtctgaaccggtgggaagaagatcaagaccggcgccggtttcgagaccaatgtgacctattcatatcatgtttgccaaggtttggctgaaaggcccgcgctaggggtcttccaatttcgtggccaagaccggcgcaaacattttacggttacagcccattcaatattgagct

SEQ ID NO: 42061 - DNA, 449 bp, Oryza sativa
  Clone ID: PAT_MRT4530_45348C.1
gcaccgcagcagctgaggtcacttcacttgttttgttttttttttttaagtaaagtccatcatcggtccctaaacttgtaccgttgtgttatcccggtccctaaactcgcaaatcgatcgttcaggtcctcaaacttgttcgactgtgttatcccggtccctaaacttgcagatcactcgtttagattctccaacttgttcagttgtgtcaccctggtccttaaatttggatttgaatatcatctaggtcaaatagaacgggaccggggtgacacaaccgaacaagttggaggacctaaataagtgatctgcaagtttagggaccaggatgacgcagtcgaataagtttgagaacttgaacgatcgatttgcgagtttagggactgggatgacacagcggtaaagtttagggaccggtgatggactttactcttttttttttctcttgc

SEQ ID NO: 42062 - DNA, 381 bp, Oryza sativa
  Clone ID: PAT_MRT4530_45349C.1
atgtctcattatcgtatgattattattagctaaaaaacttaaaagagtaaagttcatcaccggtccatataaacttgtaccgctgtgtcatcctggtccctaaactagcaaatcgaccgtttagatccttaaacttgttcgactgtgtcatcccagtccctaaacttgcagatgactcgtttaggttctccaacttattcagttgtgtcacccaggtctctaaacttggatttgaatatcatctgggtcaaataggacgggaccggggtgacacaactgaacaagttggatgaccaaaacaagtgatctgcaagtttaaggaccgggatgacacagtcgaacaagtgggacccgtttgtcattcacacaaataaaaaaaat

SEQ ID NO: 42063 - DNA, 600 bp, Oryza sativa
  Clone ID: PAT_MRT4530_4534C.1
atggacaatagcatgcctgtagttagcaagattttttgctcaagtactttgacaacactgatgatcaggagaagacccaccgtcgtgaatggtggtggttttgttgttactgacctcggtaataatgttgttttcattgttgatggttgtggaatactaggatccaagggagaattgctggtgaaagatggtgatggagaaccaatactgtttatttctagaaagggaggaattatccaggctctaagcacatggaacaaatggaatgggtactcaatggactaccaaggaaaaaagaagttgatttttagcctaagtgatccaaaatcatgcatagcaaaaggtgctccaattagaatacacattgaacccaagaggcactgcaaaaattgggacttcgagatcagtggatcttttgcagatagaaactgtacaataactgattgcactggcacaatagtaggccagatggggaagacagagcagataggaaccaatgacttctaccatgtggtagtgcagtcaggctgtgacaaggctttcatcattggggcaatggcggttcttgacaacatccatggagaatccaccagatgctga

SEQ ID NO: 42064 - DNA, 331 bp, Oryza sativa
  unsure (1)..(331): unsure at all n locations
  Clone ID: PAT_MRT4530_45350C.1
taaaataccaacctaaccgccgtcgcatcgccctggttagaacgatggccggcgtaggcactgcaccataccaccagcttgctcggcaccgcccctcgccgggatgagctcgtccgacgcgtaggcaactccggtggccgtataaccatgcgccgcaccgtctagagcgcgcccgatagcatctggtatggacctgacgcgcccaagtacctgggcccgttctcagatcagacgccatcgtacctgaccggacagtgcccggaagactacggntgggacacggcggtgctatgcgccgacccggagacgttcgcgaggaacttggagctgg

SEQ ID NO: 42065 - DNA, 442 bp, Oryza sativa
  Clone ID: PAT_MRT4530_45351C.1
gaaaggggaaaacgggaggaagaggagaacagaagaaaagaaaagagtaaagtccatcaccggtccctaaacttgtaccgatgtgtcatcccggtccctaaactcgtaaatcgaccgtttaggtccttaaacttgttcgactgtgtcatcccggtccctaaacttgcagatcactcgtttaggtcctccaagttgttcagttgtgtcaccccggtccctaaacaggacacccagatgatattcaaatccaaatttagggaccgaggtggcacaactgaacaagttggaggacctaaatgagcgatctataagtttagggatcgggatgacatagtcgaacaatcttgggattcttcattaatttattcgttcttcgattgcgggtattttaggcaagtccaacacctttgaccaactcttgttatattttcataattgcaat

SEQ ID NO: 42066 - DNA, 248 bp, Oryza sativa
  Clone ID: PAT_MRT4530_45352C.1
atgtctttcgtgattagtctcacccttctccccatagtaaatgatgctataactggtaataatttgatcagctcctggtttggaatggtatattcctggtttggagatagaactgtgcagccgggatggttgttcagaatggttgggcctatacaacagggtatgttgtgtagcgttggattaatattgtttaatacttaactgttttattaaattctaaaatatgtgctaaatgctgcttttgcaaa

SEQ ID NO: 42067 - DNA, 444 bp, Oryza sativa
  Clone ID: PAT_MRT4530_45353C.1
atgccctcatatatagagaccattgagaatgtgcttgtagtttggtgtaaagtccatcaccggtccctaaacttgaaccgttgtatcatcccggtccctaaactcgcaaatcgaccgttcaggtccttaaacttgttcgactgtgtcatcccggcccctaaacttgcagatcactcgtttaggtcctccaacttgttcagttgtgtcaccccggttcctaaacttggatttgaatatcatctgggtcaaataggacgggaccggagtgacacaactgaacaagttggaggacctaaacgagtgatctacaagtttagggaccgagatgacacagtcaaacaaacaggagagttgtgtaccatctatactcgtttaaaaggctctggtggtagtggccgtgaatctacaccaccaatgctcttgaaacttttacaaaatgctcca

SEQ ID NO: 42068 - DNA, 444 bp, Oryza sativa
  Clone ID: PAT_MRT4530_45354C.1
tacagtaatttatcaacaattatttgttccccttgtttgctaatgagtaaagtccatcaccggtccctaaacttgtaccgttgtgtcatcccggtccctaaactcgcaaactgaccgttcaggtcctcaaacttgttcgactatgtcatcccggtccctaaacttgcagatcactcatttaggtcctccaacttgttcggttgtgtcaccccggtccctaaacttggatttgaatatcatctgggtcaaataggatgggaccggggtgacacaactgaataagttggaggacctaaacgagtgatctacaagtttagagactaggatgacacagtcgaacaagtttgaggacttgaacggtcgatttgcgagtttagggaccgggatgatacagcggtacaagtttaaggaccggtgatggactttactctttgctaatcattg

SEQ ID NO: 42069 - DNA, 1029 bp, Oryza sativa
  Clone ID: PAT_MRT4530_45355C.1
atggtggaagttatcgtggagaagaaggcgcgaaggattgtgagggggaggtggcatgtggaggcgagcaacgaagcggcggcggcggcgccggctgttgccgcgcccgcgcccagggttgttcgggttctctgcagagaccacgacgccacggactcctccggcgacgacgatggcgaggacgacgcgccgcggcgtgctcgcctcctcgtgcacgagatccacgtcgcgcggcagccggtggccatgtcgccagcggcggcgagctccagccagagacgtcgtgtcggcccgatgaagaggacggaatcggcggtggatgcgacgatggacgcgacggcggcggcgccggagaggaagttccgcggggtgaggaagcggccgtgggggaagtacggggcggagatccgcgtgtcgcagcagagcgcgcgcgtgtggctcggcacgttcgacaccgccgaggaggccgcgcgggtgtacgaccacgccgccctccgcctgcgcgggccgtccgccacgaccaacttccccatgacgccagcggcgccgtcgcctcctccctcgcgcgccacctacgccggcgcggcgtccgggtacgacgagtccagcgacgagtcgcagctcgtcggctcgccggtctccgtgctccgcccaatgccggcgcgcgcaacggccaagaaagaggccaaggaagaagacgactccgcccccgatatcctcggcatctccgccggcgacggcttaatctccccgttcacctgcgacgtcctgaatttcccaccgcccgacgaggacatgttcggcggcggcatctccttcggcgagccgacaccgccacccatggtgttcgacgacgactgcatggcgcgcctcggccacgcccccaacgacgacgagcacccggtgacgagctcgtccttcctcgacggcgatctcggcgacctgccgtcgtggacggaggtggacggcttcttcagcgacgtcggcggcgacgacctgttcgccgccgagccgttcccggcgctctga

SEQ ID NO: 42070 - DNA, 447 bp, Oryza sativa
  Clone ID: PAT_MRT4530_45356C.1
ttgttaagtcaaaccgtttaagttttgctaagtttttttaaaaagagtaaagtccatcaccggtccctaaacttataccgctgtgtcatcccagtccctaaactcgcaaatcgaccgttcaggtcctcaaacttgttcgactgtgtcatcccggtccctaaacttgcagatcactcgtttaggtcctccaacttgttcagttgtgtcaccccggtccctaagcatgacggtctaaaaactttatatcaaaaatttagggaccgaggagacacaactgaacaagttggagaatctaaacgagtgatctgcaattttagggaccgggatgacacagttgaacaagtttgaggacctgaacggtcaatttgcgagtttatggaccgcgatgacacagcggtacaagtttagggaccggtgatggtctttactcttttaaaaaatatggca

SEQ ID NO: 42071 - DNA, 646 bp, Oryza sativa
  unsure (1)..(646): unsure at all n locations
  Clone ID: PAT_MRT4530_45357C.1
aattacgggcataatttttaggattaattggatacctgccattgcaaatgggacaaatcaaaaaaataaaactacttttcgcgttattagctgggggtcaatgaaaacttttaaaattaaaaccatgccactcccatcactattttcgccctcctctttcatgttggcccgggggagaaggcgaggcggcccccacaagcgcgaggagaccagaggacggggagagggcgagcggcgaggaccaggaggcgttggcgagcggcgaaaggaccaggcggttgtcggcgaggatggtcccagggaggttgggggggggcccgggagcaggtggggccgtccccggcgagcatggtcgtgggggggcgcaaatctgggggnggagctcttcgacgatggcggaagaagatgccntggccgcctcaccttttccccttccttttcccggtcgccggggccggctggccttttccctggcctttcggcgctggccgcctgtttgtccggggggacgggggcggccggggcccccccgccccggtgggcggggggtttggccgtgtntgttttccgccttccctgggcgggggctcgttccctggccgtgcccccccctttcccctgccgcggggggggccttcttcttcgg

SEQ ID NO: 42072 - DNA, 168 bp, Oryza sativa
  Clone ID: PAT_MRT4530_45358C.1
atggccttcatgggccacgctagcttgatgggcttcctagcgaagccagtcttccatggggcgaacccttcatgcttcgccttaaggcttcgcccagagggagaccagatggttcagccgaaggccctcatgacatgcctccaacatgcccctcacgggcaagggtga

SEQ ID NO: 42073 - DNA, 447 bp, Oryza sativa
  Clone ID: PAT_MRT4530_45359C.1
ttgctatcttgacttaaaaaactcacaaactttttagggttttattgtaaagtccatcatcggtccctaaacttgtaccgctgtgtcatcccggtccctaaactcgcaaatcgaccgttcaggtcctcaaacttgttcgattgtgtcatcccggtccctaaacttacagatcactcgtttaggtcctccaacttgttcagttgtgtcaccccggtccctaaataagacggtctaaaaactttatatcaaaaatttagagatcggggtgacacaactgaacaagttggaggatctaaacgagtgatctgcaagtttagggatcgggatgacacggtcgaacaagtttgaggatctaaacggtcgatttgcgagtttagggaccgggaggaaacatcgatacaagtttagagaccggtgatggattttactcttttttcaacaagagcg

SEQ ID NO: 42074 - DNA, 327 bp, Oryza sativa
  Clone ID: PAT_MRT4530_4535C.1
atgtcatggcacagggccggtgtcctgctgctaggggctcagtcctgcctacctgtcccgggggttccggccgtaggtggggttgggtcggtactcttgtctatggctaggatgggttggaaactatgtcacgtcttccgtccgtataccgtggtgggcaaaccgagcaaaccacctttctctcctgagaaggaggctaagttcgaggctgtgggttgcctgttccgtggaaaattgatcagtatactagctgacaacatagtggacgtgtacatacacatgcattcagggaacgacatgtgggatgctcttgaggctaacttttga

SEQ ID NO: 42075 - DNA, 354 bp, Oryza sativa
  Clone ID: PAT_MRT4530_45360C.1
atggcatcttcttccgccatcgtcgatgagctcttccaccagatctgcgcccctccacgaccatgctcgccggcgacggccacacctgctcccgtgcccctccacaacctccctgcgaccatcctcgccgacagccgcctcgtcctctcgccgctcgccaacgcctcctcgtcctcgccgctcgccctctccccgtcctctcgtctcctcgcgcttgtcggcgccgcctcgccttctccccgtgccaacatgagagaggaggacgaaaatagtgatgggagtggcatggttctaattttaaaagttttcattgacacccagctaataacgcgaatagtagttttatttttctga

SEQ ID NO: 42076 - DNA, 5860 bp, Oryza sativa
  Clone ID: PAT_MRT4530_45361C.1
atggattcgtccggcgatggaggggacgagggagcgggagctgcgccggctggggtggaggaggagagccctgccccggcgtcggctccggctccggctccggcttccgcttccgctcccgttcccgccgccgttggtggtggagcaggcgcctctggatccagcgggaaggtgaagcgcgtgatgaagacgccctatcagttggaggttctcgagaggacatacacagaggatccgtatccaaatgagacgatgagagcggagttgtctgtgaagttagggctgacggacaggcagctgcagatgtggttctgccaccggcggttgaaggaccgtaagccaccgccgaagcggcagcagctggaggaggaggttcctgtgccggttatggcgccgcctcctgttctgccaccaccactgccacacagcgagctaacaatgggtactggtgggatgtatggcgagccgttgctgtccccctcttcccggagaggaactggcagaccatcggctgttccgaggatttctgcatcagaggttgcgcggagatattatgagccaccacaagttatgctacctccgttggcaccaatgcagctcacacgagctgagcaccgggtgattgattctgtggaacgactgataggggagccgctccgggaggatgggccagtgcttggtgtcgagtttgatcctctccctcctggcgcatttggggcgcctattgttccagagcaacagagacagcctttccgatcttatgaggccaaaatgttttctgggcatgatacaaagcacattaaggcatctgcattcttgcctagcatagatccttttgttccaagtacagtttctgggaagagaaagtccatgacaggaagttcttcccatcttggttcacgggcagttcgtgaataccaatttattcctgaacagtcaagtgatatatatgagaggacgacccagtcacgatactatgatgttttaactgaagcttcggattcaaggatgtcgacaggatcacgattcctccatggtgttgaaaaggcacctggctatacattccatggacaaatttctggttctagccatttatctctacatggcaggccaccagttttttcatcgggatcaacagattatgagatggatccatctaatatcaattctagttctgttccaaatgaaagccagtatggaattcctcaggttgctggatttgaaaactccgttgcaccctcagacagaatggtttatcatgatgacgatgcttttcgaatggaaagaaagcgcaaacatagcgaggaagtgaagattgcaaaggaagttgaggctcatgaaaaacgaatcagaaaggagctcgagaagcaagatatgttgaacagaaagagagaagaacaagtgcggagggaaatggagagaaatgatcgtgaaagaaggaaagaagaggagaggttgttgcgtgaaaagcagaaggaagaagagagattccaaagggaacaaaggcgtgaacacaagcgaatggaaaaatatttgctgaagcagtccttaagagctgaaaaaatgagacaaaaggaggagcttcgtaaggagaaagaagccgcaaggcagaaggctgccaatgaaagggctacagcacgtagaattgcacgggagtatatggagctcatggaagatgagcgcctagaactaatggaactggtttcacgaagcaaagggttgccctctatgctatctcttgatagcgacacgttgcagcagcttgattcattcagaggaatgctgagacaatttcctagtgaaattgtgagattgaaggtgccattttcaataaaaccatggacaagctctgaagataatattggaaaccttttgatggtgtggaagttcttcattacctttgcggatgttcttgggattccgtcattcacgcttgatgagtttgtgcagtctcttcatgattatgattcaaggttgttgggagaattgcatgttgctctgctgaaatccataataaaagatattgaggatgttgcccggactccttcagttgcttcagggatgactgctaatcctggaggtggtcatccacaaattgttgaaggggcatacgattggggcttcaacatacttgcctggcagcgacacttgaatttgcttacatggcctgaaatattgcgccagtttggtttatctgctggtcttggaccacagttaaggaaaaggaatgctgaaaatgtcaataatcatgatgataatgagggtcgtaatggtgaggatgttatttccatactgagaagtggctcagcagctgtaaatgctgctgctaaaatgaaagaaagaggctacggtaatcgccgcaggtctcgacaccgtctgacacctggaactgtaaagtttgctgcgttccatgtgttgtcacttgaagggagccaaggtctcacgatattggaagttgcagaaaaaatacagaaatctggactgagagaccttacaacaagcaagacacctgaggcatctatatctgctgcactgtcaagggattcaaagcttttcgaaaggactgcaccttcaacatactgtgttaaaactccatacagaaaagatcctgctgattcagaggctgtgttggcagcagcacgtgaaaaaataagggtgtttcagaacactatttctgagtgtgaagaagtggagaaggatgtggatgatgctgagagggatgaagattctgagtgtgatgatgctgacgatgatcctgatggtgatgaagtgaatattgaggaaaaagatgtcaagacttccctggttaaggcacaagatggtggcatgccaactgcagttggtgacataaagaaggaaacaaatagcatagttaactcattaacgacaccactcatccacactaaatcttctgagagtagctcattgcgcactctggacaagtctgtacaagtccgtactacaagtgatctaccagctgaaatctcatcggataatcatgaaggtgcttccgacagtgctcaagacgcagagattgacgaaagtaaccagggggagtcctgggtacaggggctagcggagggtgactactgtgatctcagtgttgaggagcgcctcaatgcattggttgcattgattggtgttgccactgaaggaaattctatacgtgcagttcttgaggaacggctggaggcagcaagtgctttgaaaaagcaaatgtgggcagaagcacaacttgataaaagacgttcgagggaggaattttctagtaaaatgcaatatgattctggtatgggtttaaagaccgatgtagatcaacaaaatactctcgccgaaagtaatcttacaccggtgcataaccttgttaaagacagtaatggaaatggcagcttagtaaacaacgagttgcctgtcgatcagcagagtcagcctaatgcttgcagcgtggttcatgaaaggaacggtgtaaggcaggaatttagtgctaatccagaaaatttgtctggtcaacaatatgttacatctgagaaaacaagatctcagttgaaatcatatataggccacaaagcagaacaacttcatgtatacagatcactacccctcgggcaagatcggagaagaaaccggtactggcagttttcaacttctgcatcccccgatgaccctggttctggaaggatcttttttgaatctagagatggatactggaggctgattgactcaattgagacttttgatgcattagtatcttctcttgatactcgtggcatccgtgagtcacatcttcattcaatgttgcaaagcattgaaccaaccttcaaggaagctattgggaggaaaaggtgtgccagcatagaaccgtcggccggaagggttttgaaaaatggaactagtgagatcataagtccgaatcatagtaacgagtttggaagtccatgcagtaccctttctggtgttgcaaccgatagtgctatggcatattcagattccttcaggatagaacttgggcgtaatgatgttgaaaagactgcaatttcagaaagggctgatctgtttataaagtggatgtggaaagaatgcaacaatcaccaaccaacatgtgccatgaaacatggaaagaaacgatgctctgagctgatacaatgttgtgatttctgctatcagatttacttagctgaagaaacacactgtgcttcttgccacaagacattcaaatccattcacaatatctcagaacactcttcacagtgtgaagagaaacggagaacagatcctaattggaagatgcaaatttcagactattctgttcctgtaggattgagattgctaaagctgcttttagcaaccgttgaggcttcagttccagctgaagctctcgaaccattctggacagatgtttatcggaaatcttggggtgtgaagttgtattccacatcgtctacaaaagaagtctttgagatgctaaccattctggaaggtgccataagacgggatttcttgtcatctgactttgagacaacaactgagttacttaatttaagcacgcaagattcagcttctcgaaatactgttccacgttctggatctgctgatgtacttccatgggttcctgacactgttgctgctgttgtcttaagattgttagacctagattctgccatctcatacactcttcgtcagaaggtgggatcaaacaaggagcggggagctggagagttcatgaagcttccgccaagatatactcctgctaagaccaaacaagaaactgaacctatgggaacaggttttgatcgacaagaaacatggctaactccaagcaacggacgaggcggtcggggtggccgtggacgaggtagtcgaggcggtagcaggggaggcagatcccggagtcgtggtggcaaggtcccaagaggtattagcagctcccccaagatcgagttcaggggttacagtgccagcgccgtgtcatctgagaaagctcctcgaaagtatgctcgtcgagggcgtaatcgtggacgtgggcgtggacttagaactgttagacctcggcagccatcagatattggagccagatcaattccaaagccaaacttgctgggcagctttagcatgctaaggaatgcaaagcatacaacagccatggagtctcctcagagttctggtgcagaagagtggggcttggagagaaggccgtcatatgtcaaggatgatgaggacaattcagcttctcagtcagaggaatcgagtgaggaaaatagtgaacccatgaacgaggagtacgatgagctgctcccagattattcaagggacaattctgggtccagccctcttcagatgatggatgatgggagtgacgataatgaagaagatgccgaaggggatgaagatggtgaggaagatggagaggactacgatgcagaacagcatgttgacgaagacaacgacgatgctgagatgggcgaggatgatgtcgaggacaatgacgatggcgatggtggcggtggtggagcggagaacggtgacgaggatgaagacggtacatcatattcttccgagtatagcgaataaaacgaatgaattaagaagtctggccttttgaaggtcacgtggcaaccaagtgatggtacggtttacatctggttctatctagctcaaacagatggtttatccatacatagtagaggattatcggttttgtagaagtgtattggtaatttaccaacatgtagcaggatgtatacccagtatattcaatgtcggaaatcattcccgtacaaagttacctcgtacggcaggaaaagttaagaggggaagcccgataaaatcccatccaaaaaaaaaaaaaaaaaaaaaaaaaaaa

SEQ ID NO: 42077 - DNA, 338 bp, Oryza sativa
  Clone ID: PAT_MRT4530_45362C.1
gtaaagtctatcactggtccctaaacttgtaccgctgtgtcatcccggtccttaaactcgcaaatcgaccgttcaggtcctcaaacttgttcgactgtgtcatcccggtccctaaacttgcagattactcgtttaggtcctccaacttgttcagttgtgtcaccccggtctctaaacaggacggtctaaaaattttatatcaaaaatttagggaccgggatgacacagtcgaacaagtttgaggacctaaacggtcgatttacgagtttagggatcgggatgacacagctgtacaaggtgcacaattatgcttcatcttttcgcttatacttatcagc

SEQ ID NO: 42078 - DNA, 427 bp, Oryza sativa
  Clone ID: PAT_MRT4530_45363C.1
cccacacatgcgattacacaaggactcaactaactaatcaattatctaaccatatcttacacgatcggggactagtactgcacctgcaacagcccttacatgaaccaaggcaccaagtaaggcaccagctttggcgtagccataaagagcgacttgaagagggacttcgaggaggtcgacaacggcgagtacaactgcggctgcaagtgctgctgcacctactgctagtgcgactggtgatgcgacaagtgaaccgaacactcaaccgcacactgtcagctaccttgattcgtacactatttagtccacacttataaccacccatatgaggggggcttgtgattgctctaattatcgctggagttatcgcgtgagttatcaactaatcaatcaggcggctattcgggcgtctacgcgtgaatcaacg

SEQ ID NO: 42079 - DNA, 584 bp, Oryza sativa
  Clone ID: PAT_MRT4530_45364C.1
tcccctagttatgtaggcagtgtcattttttctataatataatatagagtaaagtccatcaccggtccctaaacttaccgctgtgtcatcccggtccctaaactcgcaaatcgaccgttcaggtcctcaaacttgtttgactgtgtcatttcggtccctaaacttgcagatcactcgtttaggtcctccaacttgttcagttgtgtcaccctggtccctgaacttgtatttgaatatcatctgggtcaaataggacgttcaaaatctataaacatgcaacaatattttgggaccctaaacagttttaattcaaaaacttttcatccgtcctatttgacccagatgatattcaaatccaagtttagggaccgggatgacacaactgaacaagttggaggatctaaatgagtgttctgcaagtttagggaccgggatgacacagtcgaacaagtttgaggacctgaacagtcgatttgcgagtttagggaccgggatgacacagcggtacaagtttagggaccggtgatggactttactcttttattattttacgcttgtatagttgagtttatgtatgaatttac

SEQ ID NO: 42080 - DNA, 1530 bp, Oryza sativa
  Clone ID: PAT_MRT4530_45365C.1
atgccggcgctcgggacgctctccggcggcgccgccggcgtggccggcctcctccgcctccgccgcgccacgccttcccccgccgtcgctactcccttccccgccgcggccgccgccaggtgcgcagccgcagccgccgccgtcgtccccgatggaggccagctcgtgtggggcaggcagctccgccctgcgctgcccctccccgctcctgcacgcctccggccgcctcctacaacaacgctatcaccgataggcgtcgcacgactgtggctgcttatatctccatccgcccccttatggtatgcaatgcaacaggagtgctcagcgagggacctcgacttttgcagcatggttttcacgatcctgttgcaaatgttggcttgactaagttcgtttctgaccttttcttcgtgggactgttctaccacctctataaccaggttgctacaaacactctggagcgagtggcccctctgacgcatgccgttggcaatgtgttgaaaagggttttcgtcattggattctccatcattgtttttggcaacagaattaccacacagactggaattggtacttgcattgccatagctggtgttgccatctactcgtacatcaaggctaagatcgaagaggagaaaagggcgaagagtgcatgatgaggtggtttctgtgaatatggcaaggtggctgcggtgcgtgcgttagttttactcgcctcagggacaacatgggcgaggatcatggcgtcttcttcttgcgtatcttgtttttgcttttggggttatttggtcaaattgttcctagtctggtgttgaacagcatattgcggtggtaagattggttatcatcagttgattgtcgagagagcccaaatgtgtagaaataaacgctcatacttggaaaagcttttcattttgtatgtaataaccgagaatgttattcgtgtcaaaaaaaaaaaaaaaaaaaaatgacaaaatttgtatcagatcttttcctggtgggattgttctaccatctctataatcagattgctacaaacactttggagcgggtggcccctctaacacatgctgttggcaatgtgttgaaaagggttttcgtcattggtttctcgatcatcatttttggcaacaaaattaccacacagactggaatcggaacttgcattgcaatagctggtgttgccctgtactcgtacatcaaagctaaaatcgaggaggaaaaaagggcgaaggccgcgtgatgaggcgactgatgtgaatatggtctgatggtttccggcgctcgagttgcattgcctcggagacgacatggacgaatctcttcttcgttatttgttatttgtttttcagctatctgctaaagtgttcccttgtgaggtcgaacagctacattgcagatggtaagactggttgtttccatcagatgagagagctcagatgtgcagtaataaacgctcgtacttgtaaaggcttttcgttttgtgtgtgaggactgagttatcttctttgtcaaaaaaaaaaaaaaaaa

SEQ ID NO: 42081 - DNA, 635 bp, Oryza sativa
  Clone ID: PAT_MRT4530_45366C.1
cggtggttgatgtcggctgacggaggggcgtcagtgcggtgtggttcgatgaagtcggccaatggaggggcgtcagtgcggtgtggtggaagctacgtgttgccatttgtctgtgtagtggttctgagttggtggacggcgatctacagtcaaggttgtagggtcccaggcaaaagcctagtccggtaattcactgggccggcagcggctatgtcttcgggcgtcgtaacctccttggggcgttgtcaagggttaccctcttcctttctcgataagcttctctgggtgaaaaccacatcttttttagatgggcgatggcggcatcctggatgtcgtgaccaccgtggtggcttcgttttcggagtcttgtctctgtggtgttgccgtaggcctagcggcgttcggccattcttagcgggggtcatttggtgctaggcttcaccctcagcggtttgtgcttgggtggtagtgcgtgctgtgaggtcatgcaccttggtgcattgtgatgttttttttttcttgtaacttttactccttcttaatatatttggatggcctccttcggccttcccggcgaaaaaaaagtaatagtgcccaacagcaatttaaaaaaaaaaaaaaaaaaaaaaacaaaa

SEQ ID NO: 42082 - DNA, 451 bp, Oryza sativa
  Clone ID: PAT_MRT4530_45367C.1
tgctgaatttttataaagaaattctatttaattaggtgatatgtaacgaacaagggacaatttttcaagagaaaaaaaaaaagagtaaagtccatcaccggtccctaaacttgtaccgctgtgtcatcccggtccctaaactcacaaatcgaccgttcaggtcctcaaacttgttcaactgtgtcatcccggtcccgtcctatttgacccagatgatattcaaatctaagtttaggtaccgaggtgacacaactgaacaagttggagaatctaaacgagtgatatgcaatttgagggaccgggatgacacagttgaacaagtttgaggacctgaacggtcgatttacgagtttagggaccgcgatgatacagcggtacaagtttagagaccggtgatggtctttactaaaaaaaaaaacatctccactgtgtagtcaatgcactacggcaa

SEQ ID NO: 42083 - DNA, 1528 bp, Oryza sativa
  Clone ID: PAT_MRT4530_45368C.1
acaaaaacccctttccgctcgcctcgcctcgccttgcctcgctgcgtcaccaaccttgacggcgacgtgctcccttccccttccgctcgcggcgcacggcgaggcggggaggtccactctatccgccccgagctcgcctccgccacccaaatccctccccctccaccccccaacgccgcgcgcctcccactcccacccataaacttatccgcaaaccctcctctccatcttcacctccacagcctccccacgctaccctcccaatgccggcgctcgggacgctctccggcggcgccgccggcgtggccggcctcctccgcctccgccgcgccacgccttcccccgccgtcgctactcccttccccgccgcggccgccgccaggtgcgcagccgcagccgccgccgtcgtccccgatggaggccagctcgtgtggggcaggcagctccgccctgcgctgctcctccccgccgctggaggccttctgcagccgccgacgtcgccgtcgtcgtcgcaggccggcaggaggcaggcgctccgcccgcccgccgccgccacctcaggggaagcgaagccagcggggttcctggagaagtaccctgccttgatcaccggcttcttcttcttcatgtggtacttcttgaacgttatattcaacatcctcaataagaagatatacaactacttcccctatccatactttgtgtcggtgatccatctgcttgttggtgtcgtgtactgcctcgtgagctggaccgtcgggctcccaaagcgtgcgactgatatggatagcaccaatgtgtatgcttatatctcaataattgcccttattgtgtgcattccaccagcagtgatcatcgagggacctcaactattgcagcatggttttaacgatgcaattgcaaaagtaggcttgacaaagttcgtttctgaccttttcttcgtgggactgttctaccacctctataaccaggttgctacaaacactctggagcgagtggcccctctgacgcatgccgttggcaatgtgttgaaaagggttttcgtcattggattctccatcattgtttttggcaacagaattaccacacagactggaattggtacttgcattgccatagctggtgttgccatctactcgtacatcaaggctaagatcgaagaggagaaaagggcgatgagtacatcatgaggtggtttctgtgaatatggcaaggtggctgcggtgcgtgcgttagttttactcgcctcagggacaacatgggcgaggatcatggcgtcttcttcttgcgtatcttgtttttgcttttggggttatttggtcaaattgttcctagtctggtgttgaacagcatattgcggtggtaagattggttatcatcagttgattgtcgagagagcccaaatgtgtagaaataaacgctcatacttggaaaagcttttcattttgtatgtaataaccgagaatgttattcgtgtctgtgaccttgtctttgttggctctgaggaagtgaggatgttgtgtttttg

SEQ ID NO: 42084 - DNA, 396 bp, Oryza sativa
  Clone ID: PAT_MRT4530_45369C.1
accaaacattcacttgttgtgttttttgaatttttcttttgggagaaagttttcctttgttcattccaagacgcggtgcgctgtttatttcaatgtcactggcacagacctcaaaaatcttcaaaattcttactaggtgcatactctaactggacctatacctactctaactagggccaaagtgcccacctggggcaaaaaccattttttttccccacacccgaagtccaaaattggtgaaatggccctagacattttgtgattgaggacaatctaaactaccttatctcttctactttttccaaatcccaattgaaattacaagaggggtcccattccccccttgaagatcaacaaacttgccttttcgaacgacaatcaattcgaatgcttttt

SEQ ID NO: 42085 - DNA, 608 bp, Oryza sativa
  Clone ID: PAT_MRT4530_4536C.1
aaaaaatacaaagaagaacgggcacgtgtgttttttttttttttttttttgccaactctttatcattattactgggcctcaaaaaatcaacaatgattacatcgtggtgtggttacacaatagcaaaaacaacacaagctacaactacaaccctagtgtcctacctgttggcaacaatcagggccattagtttaacctacagctaaccctaaataatatcttacaaaggaaacgccatcatttccttgaaaacaaacattacaggtttcagaagctattgcgatcgtaccgtgctgatgtccttcgcatgccaagtactttacaagacccagcgaatgttcaattatgatgacttaggtaggcagctcgtcatgcttcaaggtgaacaaatttattgcttcctttccatttggccttggcaatggactaggctgatggtatgcgatagaaaagtgcatactaggtgtatgggccgcagagccaggactggacctccaactcatcgggtacggggataagctacgagtttccggcatgcggcagggtggtgcctactggctccgtttagatcatgaccggagatctagcatgctgtcacacgttgtcat

SEQ ID NO: 42086 - DNA, 113 bp, Oryza sativa
  Clone ID: PAT_MRT4530_45370C.1
atgaaacctgaccaacctccgatggatctagttcttaagcgggaacgccactccacaggcatcctcgacgacacggacaaagcctactcctcggagaaaccaccatctgacac

SEQ ID NO: 42087 - DNA, 620 bp, Oryza sativa
  Clone ID: PAT_MRT4530_45371C.1
gcacgaggcctcgtgccgaattccgcgcggcccccccatctctctccctccaacgatccatccatcgatcgatcgatccagcttgctcgcttgcgtgtgcttagctagctaccgacgagtgacgaccatggtggtggtggtggcgccgatcgcggtggcgtccgcgggtctggggatgctggccggcgtggcgatggcgagcaggagcagcaacagcagtagcagcagcggcagaacgtcgtcgccggctgcgttgctgcggtggggggcgccggagccggcgccgcggtgcgcggcgtgcggagggacggggcgggaggagtgccggctgtgcgcgcggtggtccgacgcacggggcgactgctccgggtgccgggcgtgcgccggcacgcggcgggcgccctgccggagctgcggcggctccggcacgggccgccgcgcccccgtccgcgtctcctcctccgcgccgccgtcacggtgaccgggatcggaaggagaagctgtgtcgcctctcgccgccgatggatcgatcaaaccccccaggctcgccgtcgccggcgtcgagctaggcagagcttatagttggttcttgatttctcccgttgctgggaaggagatga

SEQ ID NO: 42088 - DNA, 247 bp, Oryza sativa
  Clone ID: PAT_MRT4530_45372C.1
atggcttcgacgccggcggccggccccaacggcgtggcgtcgccggcggggcaggctccttcgagctcgctccccggatttcacgaggcccctcctagcgtgctcatatcgagaccttcatggatcgtccgcagcgagggagaaccaatcatgccgatcttgtcatgctcccgaagggcgaatggccacaatggtgaggagctcatagcctcatactcaaaagctgtctgccatacttatgctgctg

SEQ ID NO: 42089 - DNA, 425 bp, Oryza sativa
  unsure (1)..(425): unsure at all n locations
  Clone ID: PAT_MRT4530_45373C.1
ccgggnncnacccacgcgnnccggccaaagccagcgaacaccngagaccgcgcgccgccgcgccgcnaaggggnnnnccgccgccgcanccgccgancnccccgccgccnaggacgccncncnncagggcncccccncncccgccgcgggcgacgcccccaccnccggggagcaccgngaggggaccaccancgncggcggccgcgacgacggcggcgncgnccccgccgccgacncccggaccagcaccggaaggganggggcgaaccgggcancngacaaaannacccaaccgaccgacaagggggacggccgccgcncnggaaccgccgccgacacacaaggcaanncgggaaaaggacgccaannnccccaccaacacacaaancagccngggcaaccagccaccgggaaaggngcagcca

SEQ ID NO: 42090 - DNA, 329 bp, Oryza sativa
  Clone ID: PAT_MRT4530_45374C.1
ccacgcgttcgcccacgcgtccgcccacgcgtccaaacgcaccggacgaacaccattccaccgacttggtcactaccagccaccggtcacgtcctcaccaattccgatacgtatatccggacgccagcgatcgcgcattaataatgcgcgttgacgactagcttctacaccaacgtcataatgctctaggaggtgtgcatcctgacgtccaagcgcctttgctacaaggtggtctggttcaccacccagctaatgctccaaatacatcgccactccctgccaggcatctcgctaaatctacaagaggaggtacacgagcgccctatggg

SEQ ID NO: 42091 - DNA, 330 bp, Oryza sativa
  Clone ID: PAT_MRT4530_45375C.1
atggtgcggtcggcggcgcggcacgcggtgtacgtgctgcggcggttcggctgcgtctgtgagagcagagccgccgcggggagaagcctgagcaacgtacgcgccggtgagccgccggcggcgctccgggaggagaagaagaagaagagattattttctttcaggatgaccgaggaagagaggtcgagggtcttccacgccagcgtcatctggggcgtcgtattcggccaaatagtcatcttcacgatgcataagcctcggtcttgcaaagaaatcatggccgaattagaggctaaggctgctgtttcgagacaaaattccccgaattaa

SEQ ID NO: 42092 - DNA, 4341 bp, Oryza sativa
  Clone ID: PAT_MRT4530_45376C.1
atgtcacagtttcgcccttcacaacatggtagtgatagtgatgcccagatgtggcaacgacagatgttgtataagcagctacaagagttccagaggcagcaacagcagcagcagcttgatcatggaggtagaatgcagaactcttttgggcagttccaagcccctgcaaaacaatccctagctgatcagtttccaaccatgatgaatgaaatgcctatgaatgagccatcaagttatgcatggtcaaatggtatttctcttggtggctccaggttaggaagcaactctcagattttaaataatggtaacccacattgggagcaacatcatggtgcttctcttggcacaagcagctttgcaaatggtgcagtgtactcaaacatccagaatctcatgaggccaatgggatcagttaataataaagtaaaccaatcttctcattcccttcctgctagcatgagcaaaggttctgggaatcagtactcccagttcccaggatttcctgctaattcccacaatgcaatggcaagagctggttcagaccagtcagatatgacagcaaggtttgcaagctcaattaattcgttccagaatgaacatggtctttgtgaacaagttacatccaataatttgcagaatttttgtgaaaatggaagtgtattaagtgattcttcgactcaaagtcaaggcggtaacttgaagacaggcagtcctgttctagttaatcacttacaacatggttttcatgttcaacattttaatggctggatgaaccaagttgaatgtcagtcagcgccgcacgtcggaccagctagcagtgctgctagccttgatcccacagaggagaaaattttgtatggagatgataacaattttactggtttattgggagaggatgattcatcagatggagttcctggtcatgataactcttcaggcaatggcaactcaagcatccctgtgtcagctcaagggggtagctggagtgctcttatgcaggaagcattacagtcgacaagcagtaaaaatggcctccaggaagagtggagtagcgtgaatttccagaatagagaccaggcatttacaaataaaatgacttctcctgatctggaacagaggcagcatgcaactttaaatagcatgaacctacatagtgcacctccaagtgcacaaccttctccctcacatgatggttcttcaggaaccatgaataatctgaagttcaccagttttcagcgtgcaacgaaatccgtgtatgaccatcaggaaaaattttcttatggatctacctccgccgctatcaataatcacacaactacaggagctaatgatgggctttttcaaccgagtttaaagcaaagccattctggtgactgtggatcaccagaacatgtcaacttatcaattggtgtttgggcacaacagaaacctatgctgctgaaacgaaatttgaactcaggtggtgaacgttttatgccacagaacgcacaaggacttggggtattgcaacaaagcagttataaccataattttaacggggagtctagtaataaccaaagcaactggaatggccgaaattccaattgcgtcaatacatattcaattaataattttcagcagtcaaaccctgatgtgaacactgttcgagtgccaaatgatggttatagcagtaaaaatactgtcctgacgagttcaagcacaggaatgtttagcccaggccaacatcaaatgatgcttggtcagagcgggggaaattttggaagcaacaatgctccagggcaaaggccacttccagagacttcatgttcacaaggaaataatgcagagtatggacttgctggcttcagccagatgtatactaatgcaatttctgctgaaggacataattcaaataatggtcagcatttaggcatctctttttctgcaagaggtaattcctttagtggaatggatgcccataatttgggccaatctgaccagaaaacgatgggtccatctgcactgctgaatcatcttagtgcaacatctggaattagtactggacattttccaacgaattctttgtgcaataataagttattgtcagagtcaattcagccaccaaataaccaagagaacctgctgggtgggagctgccaacttgctggtcatgttgggtcaacaaatgagaaaattgcaatggtagaggaacaacttactcaacattctactgccagcaaatactcgaatgaacctcccttcagaggatatgatggaacgttgttgcaaaacccaaataaaatagttcaaacaagtcaacatatgcttcaacaatttcttcagaaggtggacagcacaaattctgttgtttctagcaatatgcccatcagatctgatattactcctaatcaacttaaccagccccctttacaaggatttggattaaaattggcaccaccaatgcaacaacaactaacttcaggtaatttatggaccagtcacacctctgttgacatcaagccagctgataattcagtaccaggggaagaccagcgacagctaccttccactcctggttcgacgacttcatctggctacccgagtcgatcctcaccattttactcatcagatgctgataatactggactgtcaagtgggtgcctcccccaaactaaaagcttaggccagcaatacccagttgcagagccaaagtctgctcctgtaaattctcttcctcagcagtctctgcaaggtactgcagcaacaatgctcaagaatgtgtggacaaacatctcagcacagcgcctggggggtatccaacataacaagataactccaaatattctccagtcaatgatgttcccaagtactattggtgattccacattacggggttgtccgaaagatgattatcaaagaatgagggtagcaaatctatctgatgatgccacaactactaccaactcaggaaggcaagaaataaagcgagttgtggaaaatgatggatctgacataccaaatatggatcaaatgggagatattttattaggaaagaaaaatgcccttcagagacccttgatgcagcatggcatcataaactcgtcacaaggggaaaatatggcagcaaacattccaaatatgggttcttcctttaacaaagtttccacctatggtggcatcagtctgcatggaagcctggcaccatccaattcccagcagataaattattctctactgcatcagattcaggccattaagcctgttgattctgatccagaaaatacgtctggaaagaggcttaaaacaactgatatgagttgtaatgcttcacaagttgaatggcccggtgccgaaagagctccacatggagaaaataatccattgagattatgtacagataaaactgaggtcccaagaatctcaaacttgttgccatcagatcagatgttaaggtttgctcccaggaacagtgaagatgtaacctcaaccatgccatcgcaggttcagttgagggagttaacctccacctccaatgatatggccactgcaagaactgatcttcaaaatcaatgctcatctcttggcacaagctcaacagaaaatttaattgaaagtggtgacaaattaatgatcaaccctcagatatcaccctggtttcaacatggtagcaacagaaatggtcataatcttgctatgtacagtgtcaggaaaactgcatcaccgtataatcatccaaaagttccctggagcatggacactagcagtgtttctgggcatggacttgaatgctctacttctgtcagacctgaaatgccttctggtctaaaggtatcttcttcggtgcgaagaccgaagaagcggaaatttaaagctcctgtgcttgtttcttggaatcaaatcattgatggccaccaaaagttggcggacatgagcactctgggtatggactggcctgaagcaactaatagattaatcgaggtggaagatgaagctgacattcaagaagatgctctcatattatatttaccacgtaaaaggctaattatgacctctcggttgattcagcaacttctcccttctataccagcggctattcttagggcacaagctatatcaatgtaccaaagtgtaacatatactattgctaagttgacagttggggatgcatgcagcatgccttcaaattcatctttggacactggcactctcataagtagtggggataagtcatatgaacaaattgagaatgacaaaatgagagacagattcacaaaggccgttgaattttttattccaagatttaaaaagatggagaatgattttgtgaggtgcttacatatgattcctgttaaattcacatag

SEQ ID NO: 42093 - DNA, 273 bp, Oryza sativa
  Clone ID: PAT_MRT4530_45377C.1
tcagccgccacgtgggacaaaaccagggtgaaaaccaccgagggacctattatgaccggttttgtaagttgggggacgccggatgtccggttttgcggttgagggacgattttgtatctggctaacaagttgagggaccttgcgtgtacttttcccccctggcgcggtcgggtcgccgtcgccgtgttcggcgggtgaagtgtcggccgcggctgcaggcagagggaggcgctggcaccgccgccgtcgagcaagtagaggcctaaatttcat

SEQ ID NO: 42094 - DNA, 447 bp, Oryza sativa
  Clone ID: PAT_MRT4530_45378C.1
gtgttttaaaatatctctaagtattatagggacattttgaacaagagtaaagtccatcaccggtccctaaacttgtaccgttgtgtcatcccggtccctaaactcgcaaattgaccgttcaggtcatcaaacttgttcgactgtgtcatcctggttcctaaacttgcagatcacttgtttagatcctccaacttgtccagttatgtcaccccggtccctaaacttggatttgaatatcatcttggtcaaataggacgggaccggggtgacacaactgaacaagttagaggacctaaacgagtgatctgaaagtttaaggaccagaatgatacagtcgaacaagtttgaggacctgaacggtcgatttgcgagtttagggaccgggatgacataacggtacaagtttagagaccggtgatagactttactcttttgaacaatatttga

SEQ ID NO: 42095 - DNA, 800 bp, Oryza sativa
  Clone ID: PAT_MRT4530_45379C.1
tcccccgggctgaggaattcggcacgaggcatcatctagagctccttgttaaagttggaatagctagcaattacgccatggatggaacggacaaggagacgaccgtggcggccgccgggacgaatgggatggaggcggcgccggccatggcagcaggctccggcagctgtagctgtacagtggtggagatcgacgtcgacgacgaggccgaggcggcggcggcggcgccacgaagaacacggccgaggccttccatctatcgggtgcccaatcacatcaagaacatgacgaacccggacgcgtaccggccgcggttggtgtcgctggggcccttccaccacggcgaggccgagctgcagcccatggagaagcacaaacaccgcgcggtggcgcacctggtcgagcgtagcgggaagccgctgcgagaattcatggctgccgtcgaggagatcgccgagcagctgcgagccgcttacgaggaccttgatgacgagaggtggagcggagaggagttcgtggagctgatgctcaccgacggctgcttcttgctggaggtgatgagggcgtttcagcttcagcgggaagggaagaaggaggtagaagaagggggagattacgaggctgacgaccctgtcttcagcgagcacgggtacctatacctgcgctgcgatatcatctccgacgtgctcctgatggagaaccagcttcccctgctcctcctcgacaagctctgccatgttgcatacgcagacaatcttcagtatgatgtagcaagttcgtttaatatttctaccatttga

SEQ ID NO: 42096 - DNA, 502 bp, Oryza sativa
  Clone ID: PAT_MRT4530_4537C.1
ggccaactctttatcattattactgggcctcaaaaaatcaacaatgattacatcgtggtgtggttacacaatagcaaaaacaacacaagctacaactacaaccctagtgtcctacctgttggcaacaatcagggccattagtttaacctacagctaaccctaaataatatcttacaaaggaaacgccatcatttccttgaaaacaaacattacaggtttcagaagctattgcgatcgtaccgtgctgatgtccttcgcatgccaagtactttacaagacccagcgaatgttcaattatgatgactggcagtacagggatcagaagttagagatgggctcgcatccaacagattgggtggatggacagatgatgtgtttccgcaccttaggtaggcagctcgtcatgcttcaaggtgaacaaatttattgctttctttccatttggccttggcaatggactaggctgatggtatgcgatagaaaagtgcatactaggtgtatg

SEQ ID NO: 42097 - DNA, 422 bp, Oryza sativa
  Clone ID: PAT_MRT4530_45380C.1
cggcacgaggaaaataaacatcgataggttatattctgtttttgccgctatgcatttccctcacctaagaaaaataatatataggtggtcaaaataatatatcggagtactacatatgaaagtagttgtggccctgtttgattgatcaattgccacgcctgatgaaattactatactagtcgctaactctaccgcttcacctagacattttattatataggtggtaaaattttatgtaaacatcactcagttgaaatggatcatgatcgtaaagctcacatggtatatagggtttttttggttgcatcatttatgtaaggtatgaaagcattacctgttgacttgccaaatggatgagataatagatgtctgatggtccgaaataaatgtggacaacaataaagggccattatgttatcaac

SEQ ID NO: 42098 - DNA, 456 bp, Oryza sativa
  Clone ID: PAT_MRT4530_45381C.1
ttaaaatatcagataaattactttttaaaatttataataattaaaagagtaaagaccatcaccggtccttaaacttgtaccactgtgtcatcgcggtccctaaactcacaaatcgatcgttccggttctcaaacttgttcaactgtgtcatcccggtcactaaaattgcagatcactcgtttagattctccaacttgttcagttgtgtcacctcggtccctaaacttagatttgaatatcatctgggtcaaataggacaggaccggggtgacacaactgaacaagttggaggacctaaacgagtgatctgcaagtttagggacctggatgacacagtcgaacaaacaaatgatgattttggcatcgttttcgctttgaacgctggcaggcggcggaggaagaccggctacaccagattcaaatgaaactaaaaaaaattgtataaataatatacca

SEQ ID NO: 42099 - DNA, 165 bp, Oryza sativa
  Clone ID: PAT_MRT4530_45382C.1
gtggcattggttttaggggaagattaatagcaaggtaaacgtatgccaaaccatgcaaacttacatagggtttaagttcaatcataacacaatttacccttgtttgttatacatactttatttagcattaagctattacggaaccacaaattgaacttatagttc

SEQ ID NO: 42100 - DNA, 437 bp, Oryza sativa
  Clone ID: PAT_MRT4530_45383C.1
tgatttttcaaagagtaaagtccatcaccggtctttaaacttgtaccgttgtgtcatcccggtccctaaactcgcaaatcgaccgttcaggtcctcaaacttgttcgactgtgtcatcctggtccctaaacttgcagatcactcgtttaggtcctctaacttgttcagttgtgtcaccccagtcccgtcctatttgacccagatgatatttaaatccaagtttaaataccggggtgacacaactgaacaagttggaggatctaaacgagtgatctgcaagtttaggaccgggataacacagtcgaacaagtttaaggacctgaacggtcaatttgcgagtttagggaccgggatgacacaacggtacaagtttagggaccggtgatggactttactccacacgattatagtattagtaatgcaatataggacttgat

SEQ ID NO: 42101 - DNA, 400 bp, Oryza sativa
  Clone ID: PAT_MRT4530_45384C.1
taaagtccatcaccggtccctaaacttataccgctgtgtcatcccggtccctaaactcgcaaatcgaccgttcagatcctcaaacttgttcgactgtgtcatcccggtccctaaacttgcagatcactcgtttaggtcatccaacttgtttagttgtgtcaccctgatctctaaacttggatttcaatatcatctgggtcaaataggatgggaccggggtgacacaactgaacaagttggaggatctaaatgagtgatctgcaagtttagagaccgggatgacatagtcaaacaagtttgaggacctgaacggtcgatttgcgagtttagggaccgggatgacacagcggtacaagtttagggaccggtgatggactttactctataaattttactacca

SEQ ID NO: 42102 - DNA, 198 bp, Oryza sativa
  Clone ID: PAT_MRT4530_45385C.1
atgaacagggctcggggaggaagaagactatataggggcatcttttcaggtgggccatataagcagcgcctgcgaagattgatctttgcaggcggaccatataagcgtcgcttgcaaaaatcgatcttcgcaggcgacgcttatatggtctgcctgcaaagatcaatcttcgcagacggaccgcccccttcaccccag

SEQ ID NO: 42103 - DNA, 443 bp, Oryza sativa
  Clone ID: PAT_MRT4530_45386C.1
atgaaaccccatgccttgctgttagagttttatataatattaggagtaaagtccatcatcggtccctaaacttgtaccactgtgtcatcccggtccctaaactcacaaatcgaccgtccaggtcctcaaacttgttcgactgtgtcatcccggtccctaaacttgctgatcactcgtttaggtcctccaacttgttcagttgtgtcacctcggtccctaaacttggatttgaatatcatctgggtcaaataggacaggaccggggttacacaaccgaacaagttggaggacctaaacgagtgatctgcaagtttagggaccgggatgacacagtcgaaccagtttgaggacctgaacggtcgatttgtgagtttagggaccgggatgatacagcggtacaagtttagggaccggtgatggactttatctaattttcatctctg

SEQ ID NO: 42104 - DNA, 446 bp, Oryza sativa
  Clone ID: PAT_MRT4530_45387C.1
tcacctaaaatgtgagtgcagttgggtgtagcgctctcacaaaagagtaaagtccatcaccggtccctaaacttgtaccgctgtgtcatcccggtccctaaactcgcaaattgaccgttcaggtcctcaaagttgttcgactgtgtcatctcagtccctaaacttgcatatcactcgtttaggtcctccaacttgttcagttgtgtcaccccggtccctaaacaggacggtctaaaaactttatatcaaaaatttagggaccggggtgacacaactgaaaaagttggaggacctaaatgagtgatctgcaaatttagggaccatgatgacacagttgaacaagtttgaggacctaaacggtcgatttgcgagtttagggactgggatgacacaggggtacaagtttagggaccggtgatggactttactcctcacaaaatgaacta

SEQ ID NO: 42105 - DNA, 705 bp, Oryza sativa
  Clone ID: PAT_MRT4530_45388C.1
ttactgtgtagcatgagtgccaattatctcatctgtcacgtccatggatccatcgatcatgtccatccatgcatccatgtcatgcagtttgccaaaaactatccaaactttcggcatgaaagctgttaccccagctaacatagctctgactgcctgcacgtaccactgcaggtccggtattcctgtcttttgaccatgctcaatatgaagcttgaatgatccggccatgccttgctgcacacaacgagcggaaggatgcacgaacaggatgcgttctcgcaggccggatgtgggagtaaggctctgcactattgggccttggtgggctgggcctgaaatgcgttgtgtcatcctggtccctaaactcgcaaatcgaccgttcaggtcctcaaacttgttcgattgtgtcatctcggtccctaaacttacagatcactcgtttacgtactccaatttgttcagttgtgtcaccccgatccctaaacttgaatatgaatatcatctgggtcaaataggatgggaccggggtgacacaactgaacaagttggaggaactaaacgagtgatctgcaagtttaggtaccgggatgacacagtcgaacaagtttgaggacttgaacggtcgatttgcgagtttagggactgggatgatacagcggtacaagtttagaagtttagagactggtgatggactttactcaagat

SEQ ID NO: 42106 - DNA, 280 bp, Oryza sativa
  Clone ID: PAT_MRT4530_45389C.1
tcgtggtcgcgtgggctcgctcgctcgctgcgtgggcgcactttatccacagatttttctgctgctgttgcttcgttgcttagcccgaggattccgtactactaccggagggcttggttggttgatttggtttggattagccatggcacgggagagggaaggcgatcggataggacgccggcaagaaggccatgtctcgaagctccaaaggcagcctacaacatcccgtgggcaggatcgcccggttcttgaaggccggcaagtaccccgagagggtagg

SEQ ID NO: 42107 - DNA, 189 bp, Oryza sativa
  Clone ID: PAT_MRT4530_4538C.1
acccagctatctcacaacagatcttagccatcgtgagttcgtaagcacagtcagcacagtggcaacccccttcttccaatcacaccgtgtttcaactgagaaactgccaagtcatgcacacagtgctccaacactcagatgatcgcccaacattctcactcagccatacatttcaagcattcacataca

SEQ ID NO: 42108 - DNA, 436 bp, Oryza sativa
  Clone ID: PAT_MRT4530_45390C.1
ttctaaagttttctacatttccttcatcgcattacactagaagtttcaaaaagagtaaagtccatcaccggtccctaaatttgtaccgctgtgtcatcccggtccctaaactcttaaatcgaccgttcagatcctcaaacttattcaactgtgtcatcccggtccctaaacttgtggatcactcgtttagatcctccaaattgttcagttgtgtcaccccggtccctaaacttggatttgaatatcatattggtcaaataggacgggaccgaggtgacataactgaacaagttagatgacctaaacgagtgatctgctaagtttagggaccgggatgacacaatcgaacaagcgggcgagctgcccatagcgagctcagcgctcggaagcgctggaagtagtcccccagcgcgaggagccccctcgccgcctgccg

SEQ ID NO: 42109 - DNA, 237 bp, Oryza sativa
  Clone ID: PAT_MRT4530_45391C.1
atggagggggagccgaggacggcggcgggcggtggcggagggggagctgaggaagttgagcattggagggagaacgtgcggctgttccgggacagcgtagatggtgaccggaaggccgctgctaccccacaagtgatcgccggcaaccccttcgggatcaagctgctacgactacttccgctacgccgacgatcactggagcagttcgaaggacttcgtcctctacttccactttga

SEQ ID NO: 42110 - DNA, 444 bp, Oryza sativa
  Clone ID: PAT_MRT4530_45392C.1
attttcagagaggcggctggaattaaccttctcttttcttataagagtaaagcccatcaccggtccctaaacttgtaccgttgtgccatcccggtccctaaactcgcaaatcgaccgttcaggtcctcaaactttttcgactatgtcatcccggtccctaaacttgcagatcactcgtttaggttctcaaccttgttcagttgtgtcaccccggtctctaaacttggatttgaatatcatctgggttaaataggacaggaccggggtgacacaactgaacaagttgaagaaactaaacgagtgatctacaagtttagggaccgggatgacacaatcaaacaagtgaacgcccggagctccggcgaggccgcgccgtcgggcagcggcgggagctcgccgaagcagatggcgcacatgagcgccgcccagctcggcttctggccg

SEQ ID NO: 42111 - DNA, 341 bp, Oryza sativa
  unsure (1)..(341): unsure at all n locations
  Clone ID: PAT_MRT4530_45393C.1
atgttccaaccatggcgaccgccgccgaccaaaaccctaacgacgcggagcaccgggaggccgcggcgggagccaatgcggcggcggaggagtacgaggaggaggatgaggaggaggaggaggtggagctnnncngtccgtcagtcgtggtggcggtacggtatatggttcatgtcgcgttctttcctttgttattggatcctgtgggcattcgcgatcacgacgtgtttcattaagggcaacgccttgactaaggaggagctcattgaggcggaggtcgtcgatctcctctgcgccgtactcaccgtgcaggacctgctgggcaacgccagtattgtctg

SEQ ID NO: 42112 - DNA, 759 bp, Oryza sativa
  Clone ID: PAT_MRT4530_45394C.1
cttcttgacgccgccgccgcgctggtggcgaggccgcgccctcgccaccagcgcgtcgctggcgcgcacggcgagcgcggccatgtcgacgccggagaggggccgcccgagcatggacacggggagcaggaagtatatctgccccggccggagtagctcgccgccgtcgagggcggggacgtcgacgtcgaagtagagcgcgtcggagctgcacaggaagagccggccggcattgccgccgagcacgtcggatacgctgacagggcaggaggcggcggcggcggcgacctccgtcagcgacccgtcggcggcgatgacctgtgccggcggcgccgccgccggctgatgatggcgaagcaacgtgcgctgtgtcatcccgatccctaaactcgcaaatcgaccgttcaggtcctcaaacttgttcgactgtgtcatcccagtccctaaacttgcagatcactcgtttaggtcctctaacttgttcagttgtgtcaccccggtctcgtcctatttgatctagatgatattcaaatcaagtttagggaccgggatgacactactgaacaagttggaggatctaaacgagtgatctgtaagtttagggaccgggatgacacaatcgaacaagtttgaggaactgaacggtcgatttgcgagtttagggaccggaatgacccagcggtacaagtttagggaccggtgatggactttcctcaaaaatataataacattctcaacacaaaacaaatatactattaa

SEQ ID NO: 42113 - DNA, 366 bp, Oryza sativa
  Clone ID: PAT_MRT4530_45395C.1
atggcgtgcctggagccggagccgccgctgccgccgtctctggagatggcgctccgggagccggagccgttgcgaacgtcaacatcgacggaggcagttctgcctcacaatccagcggagggccattctcgggtcgcattgcgttcttggtatgttcatgatgcttatgatacttggctgttgaatcggagctacacgaggttggcggagacaatggagttggtggtggcgaagggcagcgatggtaccgtgtctctgatggcgagggctggcaacggacagcgatggtggctagccctcccccgtgacggcgagccagttcatcccgtgaccgtggtggatgattggttcgatgacggcagatga

SEQ ID NO: 42114 - DNA, 472 bp, Oryza sativa
  Clone ID: PAT_MRT4530_45396C.1
gccaccgacttccccgggtgtacgtcgctcgggaacacgcttggccgccgccgtcgaggccgttccaccatcggagcaccggcgccccttctctctttctctctgctgttacacgggaagaagaggaggaggaagatgacgggaggaagaagaaaaaagaagagaaaaagaaaaagaaagactgacaggtgggcccctgtacagtagcattttgtattttctctatttaattcaattcctattctttaaaagcccatatctcctaaaccgtagatccgatttcagtgaacttggacctaaattcatctaaattcaaaccctacctttttaaaccaaattttctattttactattttattttgaatttccttaatttattcgaataccatttgaataaatatttgatttaatcttataattgaatttacaatttaaacttatatttgctttcggatattttcattatttccat

SEQ ID NO: 42115 - DNA, 330 bp, Oryza sativa
  Clone ID: PAT_MRT4530_45397C.1
atgatgatgctgctgctgcggccgtcggcggcggcggcggcggcgccgttcgcgtacgcgaaggtggacaaggtggacgccgaggaggcgcggcacctgcaggcgcagtacctgatccacaaggtgctggaggggtcgtcggcggcgagggggagggggagggggaggaggccggcggcgaggcaggtcggcgtccggctcaggcggctcaggctcgccgcccggagcgtccggctgcgcctctgccggggactgcagaggcacctccggagcctgaggcggctcgtccgcggcagctcggctctccatgattcgtcttcttgctcttga

SEQ ID NO: 42116 - DNA, 161 bp, Oryza sativa
  Clone ID: PAT_MRT4530_45398C.1
ctgcttccacgcacgattaaaagctgcccctgtgggtgctgcagactgcagccctggaagaccagcgcctgaagcaagaagcgaagaatcaaacgagagcctagcagcgtagcagatcgatcgatcgatcgatatcatggaggcgcgaggaagcagaggaa

SEQ ID NO: 42117 - DNA, 1878 bp, Oryza sativa
  Clone ID: PAT_MRT4530_45399C.1
atggagtcctacgtgggtgtcaaggggaagaatgtcgtcgggggcggcgacgtcggcagggagatgccggtggcgccaccgtcgtcgtcgtcggcggcggtagggatggtggagttcccggcggcggcggcggggctggggtacgccgggatgacggcgaaggaggccgggggtggttaccaggagaggagggtggtggtcggcgagatggacttcttcaagacggcggagaagcgtggggagaggaaggagccgccgccggcgacggcgacggcggcggcgagtggacacgccggtgcctcgccggatgacctcagcctcaacaaggacgacctcaccatcaatatgggattgctcgtcggccggaggaggaacagcggcagcgaggaatccatcgtcgacgatggcggcgtctcctccaacgacgaggagcaccgcgaggccaaagctgcgctggcagtaaccaaagctgagattgggcggctgagtgaggagaacaagaggctcaagaacatgctgagcaacgtgaccacgaaatacaactctctccagatgcagttcgtcacactgatgcagcagaggagatcagtcctagccgctccgatccaccagcaagagctgcttgatccggagaagaaggagcaagaggggagccagcagcagcagcagcagctgatcccgaggcagttcatcagcctcggctccgcgtcgctgcagcccgacgtcgaggcgccgcactccgtcgtcgtcgtcggcggcgatgtctgcgcgccgtcgtcgagcaaccccgacgcggcggtgccggcgatgatgccgttgccgcatttcgaccaccacaaccaccaccaccccatccatggtggaagggagagggggagcagcccggcggaggccgaccaccaccgccaccatcagcaagagcagccgccgccgccgccgcagcagcagcagcagttgccgccgagctggcttcccgccgacaaggtgcccaggttcctccccggcaaggggcccgagcccgtcccggaggccgccaccatgcgcaaggcccgcgtctccgttcgagctcgctccgatgcacccatgatcagcgatgggtgccaatggaggaagtacgggcagaagatggcgaagggaaacccttgcccgcgcgcgtactaccggtgcaccatggccgccggctgcccggtgcggaagcaggtccagaggtgcgcggaggacaggacggtgctgataacgacgtacgaggggaaccacaaccacccgctgccgccggcggcgatggcgatggcgtcgaccacggcggcggcggcgtccatgctgctgtcgggctccatgccgagcgcggacggcagcctcatggccgggtccaacttcctggcgcgcgccgtgctgccgtgctcgtccaccgtcgccaccatctcggcgtcggcgccgttcccgacggtcacgctcgacctcacgcagacggcgccgccgccgccgccggcgtcgtcgacgcagccgcagccgccgcgcccggagcccgcgcagctccaggcggcgctcgccgaggccgcgcggccggtggcgctgccccagctgttcgggcagaagctctacgaccagtccaagctctccgccgtgcaggccgtggccggcaccaagggctccgacggcggcgcgctcgccgacacggtgaacgccgcgacggccgcgatcgcgtcggacccaaacttcaccgccgtgctcgccgccgcgctgacgtcgtacataggcagtagaagcggcagcggcggcgccggcgccggcgggagcagcggcacggtgcagccgctgatgagcggcggcggcgatagctgtagtagagacgacaagataggagagcaaaacagctaa

SEQ ID NO: 42118 - DNA, 165 bp, Oryza sativa
  Clone ID: PAT_MRT4530_4539C.1
atgggcaagcacgacagcggagcggcgggtgtgcacggagccacggcccataggtcacgagaggttcggctgtcggcggtgccggccccgacacaagagaaggggagggcgtcggcgtcgcgactggcgtctgatgatgagttgatggcgtacatgaagtattaa

SEQ ID NO: 42119 - DNA, 254 bp, Oryza sativa
  Clone ID: PAT_MRT4530_453C.1
atgggaggcgcggtaggaggaggaggaggagcatttgatgaggagtacggggcggagttagaagaatgggcgatactggagtacggggttggacagcatcagatcgacggtggaggggaaaaggcgattatggtgcaagtgagagaccttcaaggttattacgggataggcggcggggatgacagaggaggggctgacgggatactaaaagtggggatggtagatgaaaggggggaggaagaaaatgacggggg

SEQ ID NO: 42120 - DNA, 860 bp, Oryza sativa
  unsure (1)..(860): unsure at all n locations
  Clone ID: PAT_MRT4530_45400C.1
gttcttttttttttaggaaaattggcgaaaaaatgaggctggaattatcagacagtaacaacagcatcggcaagagaagcaatctcatcagaaagctcctaacaagttttcttttcctttcctataacctgaccacccaagaacagttcccctcggtctgttggacaaatacttacgcatttttggcagaaaattagtagtagcgagtacactccttgcacatggttgcaggcttgtatcgtgttccaacccaaactgaactccaccaagatcccacggctaatttccggcaaaggcagggccaccctctccagctgcagtgacagccatcgtctccagctgcagttgatggtaatggtagtcgatggtctgattgacgcagccatggatcaactcggagcacttggccttgatccagcggaaacccctgcggagggaggacttgaccttcccctccaccgagtacgccttgtagctcgccacccgccgccgcctcttcatctccgggtcgctgaagcaccaggcggatcccatgcctcctcccccgcccccaaccttggtcaccggcagcggcggcggaggcgacctcgtggtggtggtggtggtggtgcccgggggcttgacgacgacgtcgatgcggcggtccccgtacggcaccacctcgcggccgtggtaggggcggtcgtggtcggcgggggccccgtaggcgcggtactcgtagtcggcggcggcggcggccatcgtcgtcgcgcgcggcttccgctgccgagttgcgcttcgcttcgtgtgggggaggggaggtgggagaaattcccagcggccgnacgcgtgggcggacgcgtgggcggacgcgcgggcgc

SEQ ID NO: 42121 - DNA, 613 bp, Oryza sativa
  Clone ID: PAT_MRT4530_45401C.1
aatcattatacatagcgaggtgatagtactagagtacctgatgtgcccatatgtgatatgtaactatgtgtctcttcagtaacatgatagtagcagcatgttgctgctagcaaccaaaaaaaaaaaaaaaaaaaaaaaaaaaaaaaaaaaaaaaaaaaaaaaaaaaaaaaaaaaaaaagggggggaaaaaaaaaaaaaaaaaaaaaaaaaaaaaaaaaaaaaaaaaaaaaaaaaaaaaaaaaaaaaaaaaaaaaagggggggggccttttaaaagaaccaaggttaagaaccgggaaatggaaaattaaaaattttttttaggggccccaaaaataaaattagggggcggggttttaaaaccggggggggggaaaaacccgggggtccccaaaattaatccctttgaaaaaaaacccctttttcacggggggggtaaaaacaaaaaggccccccccttacccccttccaaaaatggggccaccctaaatggggaaggggacccccccttgagggggcaattaaacgcggggggggggggggtttcccccaaggggaccctttcatttggcagggccctagccccccgttttttggtttttttccctttctttt

SEQ ID NO: 42122 - DNA, 208 bp, Oryza sativa
  Clone ID: PAT_MRT4530_45402C.1
atgaactggagcccaaggaggataccaacactgagcatccaaatgggtcatggtcagatgatcaagcaaagtgtggaggttctctacatatccacagcagcaacagagggcggacgggcttcttgtgcagaagttagggagcttactgtacaagaaaaacagcatgtatgtgaacgacacatgatctactataggtgtcgtgatttgc

SEQ ID NO: 42123 - DNA, 2139 bp, Oryza sativa
  Clone ID: PAT_MRT4530_45403C.1
atggacggcgacggcgagtgggtgtgggtgcggcggccggcggaggcggaggccgtggcggcggcggcggggtggccgacggcggaggaggaggcgcggccgctggaggtggtgtttgcgtcgccgtcgaggtacttcacggacgcggcgcccatcgggaacggcagcctcggcgccctggtgtggggcggcgtcgcatccgagaagctacagctcaaccatgacactctatggacgggtggacctggtaattatacaaacccaaaagcacctgcagttctttctaaagtaagggaccttgttaacaggggacagtatgctaaagccacggctgttgcttatggcctatctggtgaccaaacacaggtataccagcctcttggtgatattgatctggcctttgatgaacacgtggaggacacaaattataaaagaaacctagatcttcgaacagcaactgttaatgtctcttacaccattggtgaggtggtccactcaagggaacacttctcatcaaatccacatcaagtcatcgtgactaaaatatctgcagataaacctggaaatgtctcctttacagtgtctttgactactccattgaaccaccagattcgtgtaacaaatgcaaacgaaataataatggaaggttattgcccaggagaaaggcccacagaatatggcaatgcctctgatcatcccgttggaattaagttttctgctattctctatctgcagatgagtggttccaatggcactgtggaaatattaaatgataagatgctgaaacttgttggtgccgactcagctgtgttgctccttgcagctgctacttcatttgaagggccatttgtcaatccttcggaatctaaactggatccaactgcatctgctctgacaacactaactgtggcaaggaacatgtcatattcacagctaaaagcttatcacgtggatgattaccagaatcttttccagcgagtttccttgcaactttcacgagactctaatgatgcccttggagggaatggtttagttaatttacctgagaatagcttacaggaaacctctgtatctgattatgctgtacagatggtagagtgctcaagatttcaggggtttaataattcaggcaagcctaccgtagacagaattctaagttttagagacgatgaagatccttctctggtggaactcctgttccaatttggtcgttatctactcatttcttgctcaaggcctggaacccagatttccaatcttcaaggaatatggaatgatgaaacttcaccaccatgggatgcagctccccatccaaatataaatctacaaatgaattattggccggcacttccttgcaaccttagcgaatgccaagaaccactattcgacttcattggatctctttcagttaatggagctaagacagcaaaagtaaattatgaagctagcggttgggtcagtcatcaagtgactgacctgtgggctaaaacatcaccagatgctggtgaccctatgtgggccttatggccaatgggtgggccatggcttgccacacacctgtgggagcattacagttatacgatggacaaacaatttttggagaaaacagcatatccccttttggaagggtctgcatcatttctgttggactggttgattgagggaaatggagattatttggagaccaatccttccacttctccagagcattatttcattgctccagatggtaggaaggcctgcgtgagctactcaacaactatggacatgtcaattataagagaagttttctcagctgttcttatgtcttcagatattttaggaaagtcagactcagacatggttcagagaatcaaaaaagcaataccaaggctcccaccaataaaagttgcaagagatggtacaatcatggagtggttattttctgaatgcttgctttatgtggacaggcacaggattttcaggatcctgaagttcaccacagacatgtatctcacctgtttggtctttatccaggacatactatgtcacttgagaaaacacctgacctttgcaaagccgttgcaaatagtctctataaaagagttttgtgcaattcttctggcatacttgttggcacgactgtttcaagtgaactag

SEQ ID NO: 42124 - DNA, 2358 bp, Oryza sativa
  Clone ID: PAT_MRT4530_45404C.1
acttttacttcttcttttttctttttaacccttccgcccctccatgctaaaaggttttcagaggtagcatttctgaaaaccacttgttcacaaaaagaaaaaagacactttaaaacatttccagaacaagggtatttacaatttttggttacagctacactgtaaacacatttatctcggcgtgatcatgctaatgctgatgttgcacgccgacggcggcgcatcgccgccgccgccgctggggcgcacgttgaagtaggccgactgcttcggctccggcagctggctcgccgcctgctcgttgcccagcatcttcaccacctcgtccatggctttccgatcctctgcgtcctcctgaacgcacagaagcgccacctgcatgcacgtcctgatcgatgcatgatacctgtctcccaaacattcatcgatcagctcgtgccatctgccatctttccacagcagccaagcatatgcgatgagacagtatagctttccgtcgttgtatcgatatgagcctccagttcttttgccactgatgatctcaagtatgagcacgccgaagctgaaaacatccgctttgctcgagcaaacgccatctaatgcgtactccggagctatgtatccaatggttccaacaattctggtagtactggattgagctgcatttgagccgaaaatcctagcgatgccgaaatctgaaatcttggcgttcatctcggcatccaacagaacgttgctcgctttcaggtccctgtggacgacacagactgtcgagtgctcgtgaagatagagcagcccttgagatatcccatggattatgtggagacgtttaggccagtctagcaactctcgtttgacattatcgaagatgaacacatctaggcttttgtttggcatgtactcgtacacgagtatcttctcctgatccccttcgatgcaacatcccagtagcctgaccaaattcctgtgctgaagccttgctacaagctgtatttcgttcttgaattccagtagaccctgtccagagcatgctgcaagcctttttgctgctacttcaggtccactaggcatttgccctttgtagacagatccaaaacctccttttccaagcaaactttcacttgagaaattattagtcgcatcttttatgtcagagaaatcatacagtttaaagcctgagttgccctcttctaacctccagagagttattacattctgtactgccatagacagccttcgcagctctgatcttactcgtgctcttcttctccttctcttcagctctctgaagagaaagaagcaggaaatgcatacggctacaccggcaacagcaacgatgatcggccatgtcttggctcccgagctagaacccgattgttgggtaggctgcttctgaagatgcagggtcctgttgtctatgtggaagaaggaattcgacgccatctcgtagcggaggaggcagcgaaccccgagaaccctcccgccaatctggctcgcgtccagcatccgcggcatctccgagatgatgcgctgcaggcaggcgccgcagcggccgggatccatgtcgcgggtgcactgcaccagcgcgtacaccatcgaccctccctcctggaaccacgagtcgccggtgccgtacctgtccggctgcgccgccgcgtcgcgcgccgtcgcgttcagcagcgccgcgacgtgctcccggaacctgccggcgacgggggcgtccaccacgttggtgttgttcagcggccactccggctcgttgccgtagccggagacgaagtccgcgtcggcgaaccggagctggaagcggtcgtagaagagcgtgacgttcctgcggagctcgcagagcggcctgctgctcgtcgtccggttcatggcggcgtcgaacgcttccctgaggtagccggcgcagagggggcccttggagtcgccgcggcagagcgcgacgccgtagacggcgtccggcgccgccccgaacgacccggcggccgagccgtactccgtcgagttctcgatgagctccgcggcgagcgcggcgaggttggactggtacgtgctgttcggcgcgtacgtcccgtccgccgtgctggggcaatcctcgtagaacgggacctcgccgccggctgccgtcgacgatgtcggtgcgtagcagatgatgatcactaccaaaagcagcaggaggtggccaaccatattgtgcagctacagctatagctaagctgatcgatcgagtgtatatattatcaaactaaattagatagcatcgtcttcgatcaggggatgatcatccatctatatagcaaagaacatctgatcatcgatagcagctttgagcaaaagcaaaagcgtacgcgtggg

SEQ ID NO: 42125 - DNA, 648 bp, Oryza sativa
  Clone ID: PAT_MRT4530_45405C.1
atggcgacgacgacagtagcaaactggcaatggctcgccctcggcgcgcagaggcctgagggaagtgagcggcgacgacgctctgagaaagggagcagtggcagggcctgcgcggcagagtgcgagctgcggcgggtggatcctgcaaggaaggaagggctccgaccggtggatccggcggatgaggggcgacgacatctcaacgacgacgaggaggatcagtggcggtgggctcggcggtggagattgagctgggacggctggatccgacgggggaggggcaacgatggctcgacgatgacgcggaggagcggttacaacgggcccggcagtggagatcgagctgggacggttggatccagcgggggaggggcgacaacggctcagcgacgacgaggaggagcggtggtggtggagctcgagctaggacggctggatccgactggggaggggagacgacaaggagtggcggtggtgctcgggctgtggcaggtggatccggcaggggatgagccctcggctcgccgccatcacctctccttttccccgcccacgcacttcctcggcccgccaccatcacctcgccttttcaccgcaagtggaggagaggagaagatagaactgatggatgggtcccacatgcaatag

SEQ ID NO: 42126 - DNA, 1116 bp, Oryza sativa
  Clone ID: PAT_MRT4530_45406C.1
acgccggccgccctgctcgtcgtcgccggcggcatctgcggcgcgcgcgcgtcatcctcatccccagctaagtggcctcaccgtcaccgagcgcccgcgtcggatcgcgtgcgggagagagcggggggcggagagatctggtgcgaggtcgagtcggggcgccggcgatggcggacgacgcgggcggcggcaggcgcgagtacagcatcatcgtgcccacctacaacgagcgcctcaacgtcgccctcatcgtctacctcatcttcaagcacctgccggatgtcaactttgaaatcatagttgtggatgatggaagccctgatggaactcaagacattgtaaagcagttgcagcaaatatatggtgaaaaccgtgttctgctgcgagctagaccgaggaagctaggacttggtactgcatatttacatggactaaagcatgcctctggggacttcgttgttatcatggatgctgacctatctcaccatccgaagtacttgccaagcttcattaggaagcaaaaggaaactggtgctgatgttgtaactggcacccgttatgttcagaacggtggtgtccatggttggaatctcatgcgcaagttgactagcaggggagcaaatgttctagcacaaacattactacagcctggagcttctgatttgactggatcattcaggctatataaacggaatgtcctagaagatttaatctcctcgtgtgtcagcaagggatatgttttccaaatggaaatgattgttagggctaccaggaaaggttatcacattgaagaggttccaataacttttgtcgatagggtttttggaacttcaaaacttggtggatctgagatagttgagtatctgaaaggccttgtttatctgctgctcactacatagggaaaaaaccgctaggcgcttaactgtatcagacacaactcgtgatagaggaacttcaatttgttatatctacagttttgagttgcgtgaattactgattttctgacttgccagtgggttctcgtacagtgtatttggtgtgtaagtacactttcatgagcaagggcaagaacacaattgtaccatctatatatgaactgcagagaaagctttgggt

SEQ ID NO: 42127 - DNA, 1779 bp, Oryza sativa
  Clone ID: PAT_MRT4530_45407C.1
gtagcatcaaaatgtatctattttattattacaatctgtgtttattcagtttttggtgcaagaatattatgaattatgtacaacaagtccatgcatgatatctctttatacaatcaatgaatacatgaatggtcactgctcggtatgcaatcctgcgtgtataaatcacaactaggtagtagtagggtagcaatgatcaaggcatcttgatatataggcgactcaatttgatcaagaggaggatgccaagagattcttgaaccactgcactgaattctttgggtatctcttccggttcttgtagtctacgtagtataatccgaatctcgaggtgtatccagcggcccactcccagttgtcaagaagagaccatgcaaaatacccgcgaacatcacaaccatcctcccttatggagtctgctaagtttgtaagatagtcattgtggtatttggtcctcttgtcgtccttgagggcattcttcagagagatgaaggggaggaacaaatcacaaataacgtaagtacacttgccattctctgttatgtagacagttggtttgttgtatctgtccttgacatagttcatcaagatcctcatgctacgaggcacgatgtacaaccatatcgagttggccctatccccaattggctgtccatttctgaaggggacactgatggttgcagtatctgccaaggtgttgttcagcaatttttctattacagtagattggtcatcctttgtgtagaatgtggtatagtgattgatccccatgaagtccagtgatccgttcacaagtgcagcctctttctccgtgaacttcggtagcctgcttcccactctcgatctcatcgttgccggataatctccgaagaagaagggatccgcaaaccatcctagctggaattcctgtgctctcttggcggcttcaatgtcagctgtggaatttgacattggttcgtaccatataacatcaaaagatatccccagctccccattctgacttgccttgtatttcttcctgtatatgtctgaaaccgtggcatgtgagaggatcatgttatgagcaactatgtagggctcggtgcctgaattccctttcttgcagtagaggtgcaggagcaccgagcagcggcccggtgcatgcatcccgctgtcataggcctgcaccgcgacggtgtggggctcgttgaaggtgatccagtgcttcaccctgtccccaaatgcctggaagcacgtctcagcatataccgcataatcattgatgatctgcctgtcaagccacccagtgtacttgtcctccaaagcttgtggaaggtcccagtgatagagcgttacatatggttcaattcctttagctagtaatgcgttgattagcttgttgtagtgatcaatgcctgcctggttgacctcaccagtgccatttgggaaaatcctagaccatgcaattgagaatctatatgcatccatccccatgtctgccataagctgaatatcttcctcgaaacggtggtactgatccactgcaacatcagcattgctgaagtcaatgatctttccaaatgtatgtgcgaatttgtcccaaatggttggcccccttccgtcctccttgacagcaccttcatactgataagccgatgaagcggttccaaagacgaagccattagggaagctctttctcgtcagtcctccggtagtattctgcgcatcgcatccttgcgacatagccatcaacacaagaagtatcaccacctccaccatgcatcgccctccattccccat

SEQ ID NO: 42128 - DNA, 122 bp, Oryza sativa
  Clone ID: PAT_MRT4530_45408C.1
aggaactaactacaaaaaatgcggggaccaggaaccaccgaacgcagcaaaacccggaaacataccagaaggggcagcaatacaggggcagatattacagggggagccgaaaccggatacga

SEQ ID NO: 42129 - DNA, 231 bp, Oryza sativa
  unsure (1)..(231): unsure at all n locations
  Clone ID: PAT_MRT4530_45409C.1
cgccgtccataattttctttcccctcctctcctcacctcgatctcctcctcctcctcctccgccgcaccgagggtttagcctccgccttccaccgctgccgcagaggggacgaaccgaggggcaggaatggcggcgcggcacctnagatccggcctcctcctncttcgcgcccacctcttccaggagggttcaagtgggcttcgngtngcaggtggcaaagtcgtaccggt

SEQ ID NO: 42130 - DNA, 275 bp, Oryza sativa
  unsure (1)..(275): unsure at all n locations
  Clone ID: PAT_MRT4530_4540C.1
naaaaaaaaaaaaaaaaaaaagcattgaagttacagtcccaccaaaaacatnnggcaaccatnncaaattccctatagatttatctccgatcgtattgcattgattccttcttgaagtaaatggnatcgaatagccccaacattcttaagccaaagnnactagnncaatggccaaagnntctcgcccgngnnaagnncccaagagagnngcanantatganncgnnnngcaagacaaaanaaacccaaanacncaacaaaaaaagaaccaanaac

SEQ ID NO: 42131 - DNA, 120 bp, Oryza sativa
  Clone ID: PAT_MRT4530_45410C.1
atggggccgaagttcgcggcagatgccgaaaccgacgccgacgatgaggcggacgtcggcgtcgcggtgtggtgggtagcgcagagaatccaagggaggggaggtgtccacgtcgggtga

SEQ ID NO: 42132 - DNA, 444 bp, Oryza sativa
  Clone ID: PAT_MRT4530_45411C.1
ccattttttatatagagtaaagtccatcaccggtccctaaacttgtaccgatgtgtcatcccggtccctaaactcgcaaatcaaccgttcaggtccttaaacttgttcgactgtgtcatcccggtccctaaactcgcagatcactcgtttaggtcctccaagttgttcagttgtgtcaccccggtcccgtcctatttgacccagatgatattcaaatccaaatttagggaccgaggtggcacaactgaacaagttggaggacctaaacgagtgatctataagtttagggatcgggatgacatagtcgaataagtttgaggacatgaacggtcgatttacgagtttagggaccaggatgacacagcggtacaagtttagggaccggtgatggactttactcttttatatatattgccccccaacactactgcacgcacagaccgg

SEQ ID NO: 42133 - DNA, 1482 bp, Oryza sativa
  Clone ID: PAT_MRT4530_45412C.1
tgtactcgcacgccgcgacgcctctgctgaacatttcgctctcttccaagatattttttcctcccacgattccttcctcccatccctgtggggattcatcggctcatccgtactagcacaagatgtgcgagggtgtgcgggccgccggcgacgccgccgccgccgccgacgtcgacgtcatcacctcctccggccgccggaggatccccgcgcattccactgttcttgcgtcggcgtcgccggtgctggagagcatcctgcagcgccgcctgaagaaggagagggacgccgccgccggcggcggcaaggtccgcagggccgtcgtcctgatccgcggcgtcaccgacgacgccgcggccgccttcgtccgcctcctctacgccggcagcagtggtgatgaggaggagattgacgagaagagcgcggcgcagatgctggtgctggcgcacgcgtaccgggtgccgtggctgaagcggcggtgcgagggggcgatcgggtcgcggctcacggcggagtcggtggtggacacgatgcagctggcggcgctgtgcgacgcgccgcagctgcacctgcgctgcaccaggctgctcgccaaggagttcaaggccgtggagaagaccgaggcgtggcgattcctccaggagaacgacccctggctcgagctcgacatcctccagcgcctccacgacgccgacctgcggcggaggaagtggaggaggaagagggcggagcaaggggtctacgtggagctgagcgaggcgatggactgcctgagccacatctgcacggaggggtgcacggaggtcgggccggtggggcgtgcgccggcggcggcgccgtgcccggcgtacgcgacggcgtgccggggactgcagctgctgatccgccacttctcccggtgccaccgcaccagctgcccgcgctgccagcgcatgtggcagctgctccgcctccacgccgccctctgcgacctccccgacggccactgcaacacccctctctgcatgcagttcaggagaaaggaggaggagaaggcggcagcgaaggcgaaggcaaaggccggcgatgatgacgataagtgggggcttctggtgaagaaggtgagggttgccagggccatgtcttctctgggcaagaggaggcagatgagttgctcccagtgctgagcaagtgcaatcacagcatcagcctgagacagtcaagagaagagtattgtagtatagaagggtactactatgtagttaggcatagtgcatgagtgtattgaagtgagctattttttggtttgttcaagatggtttggtctctcaagtttgagttgctttactgtcttcaatttgtagagttcttttgtgaggtgagagaaatgggctgaaatctgttgtaaaattgcctatatcgtaaataaacttttaatagtgaggtatatgatcattacagtttcatacctggatgattacattgataaaaaaaaaaaaaaaa

SEQ ID NO: 42134 - DNA, 303 bp, Oryza sativa
  Clone ID: PAT_MRT4530_45413C.1
atggcgagcatcacagctcgcaaaaaccgatcaaatgtggatcacaggttctcgatggattcaccagctaagacgcgcgcctcgcggtctcgagtgcaatgctgcgactgccagcgaggtgcagtgcacctggaacgtcgcagggccgtgcgcgagcaacaaggcggcatttcgctctacgattcaatgaatgtaggaatgatcaagaatcgacatggaaatgtcattattatacggaagaaaaagcaggggccagcaaacagcgacgctggaacggacgcaccgatgtgcccctctgcataa

SEQ ID NO: 42135 - DNA, 714 bp, Oryza sativa
  Clone ID: PAT_MRT4530_45414C.1
atggcaaggatttcctttaacagcgccatcccgccaccaagcttcactacacgctgctcgctggccgatggagccgtcgctcctctccgctgcgcaccggccgccgcgcctccctgcgcatgcaaccgcggcgccgccgcaccgcgcctccctgctcgctggccgcggggacgccgcacctccctgtgcgcctgcccgccggtcgatgccaccgcaatgccgtcgttccactctgccaagcctccctgtccacgcctgactccgcccggcccggcctccctgcctgcgcccgactctggcgctgctctccaccgctcctccctgcctcaccgctcctccctgcctcgcgctgaccgtgagtcgccgccgccgttgttcgactgtgtcatcccggtccctaaacttgcagatcactcatttagatcatccaacttgttcagttgtgtcaccccagtcccgtcctatttgacccagataatattcaaatccaagtttagggactggggtgacacaactgaacaagttggaggacctaaacaagtgatctgcaagtttacggaccgggatgacacggtcgaacaagtttgaggacctgaacggtcgatttgcgagtttagagaccgggatgacacagcgatacaagtttagggaccggtgatgaactttactcaataccaaccattcaaagggtatggctatttgaatttcatccaa

SEQ ID NO: 42136 - DNA, 873 bp, Oryza sativa
  Clone ID: PAT_MRT4530_45415C.1
cccccgggcgcacggtccgccgcccgcgcccgcgccccccgcctcccccgcccgcgccgcttcccccttccgcggcgctccccccgtctcccacgctcccccccccgctcccccgccccctggccccatgcccccgcgcctcctcccatggcgccagggctccagcgcttcaccgacatcgccggggacggcgggccccgcctcgacgccgcctccggcgaggagctcctccgcatggaccgcgccgcctccgtcgccctcggccgccgcgcgccggagcccccgggtaccctgttcgtcaccaccaggagggtgatttggcttagcgagacggagaagggccaaggctatgcggtggacttcctcgccatcacgctccatgctgtgtcgcgcgacctggaggcgtacccctccccttgcatctacacgcagattgacgcagaagatggctctgatgaggaggctggtggatcagatttcgaagcaaatggtgatctgcagctagcaaaagtctctgagatgcgcattatactttcagaccctggtcaacttttggatcctttacaaagtttttcagttgatgcacttttcgatgtcttctgccattgtgctgaactgaaccctgatcctaatgctgtgcgcaatgaagagaatggctggtccggtggtgaaaatatggctgagggtgggtggattcatggtgatgaagacatgattgatggaaatgatcttgaagcccacatgttctttacgaacttgataggccaaaatggtctacatgaccttggtcgttctgtacgtgagcttcaaattgatgaccagcgtttcgaggatgctgaggaagaagacgagatccaagaaaatggacattag

SEQ ID NO: 42137 - DNA, 406 bp, Oryza sativa
  Clone ID: PAT_MRT4530_45416C.1
taaggggtactgtttccgaccgtatcgattttggctatttttaaattgagtaaagtccatcaccggtccctaaacttgtactgctgtgtcatcccggtccctaaactcgcaaatcgaccgttcaggtcctcaaacttgttctactgtgtcatcccggtccctaaacttgcagatcactcgtttaggttctccaacttgttcagttgtgtcaccccggtctctaaacttggatttgaatatcatctgggtcaaataggacgggaccggggtgacacaattgaataagttggaggacctaaacgagtgatctgcaagtttagagaccgggatgacacagtcgaacaatctgggtcgttttcaactgtatagtagagtgagtggtctctggcgtggcggcacgtgcggc

SEQ ID NO: 42138 - DNA, 727 bp, Oryza sativa
  Clone ID: PAT_MRT4530_45417C.1
ctgccatcgtgctgaactgaaccctgatcctaatgctgtgcgcaatgaagagaatggctggtccggtggtgaaaatatggctgagggtgggtggattcatggtgatgaagacatgattgatggtaggtatgcatgatacattttgactgcatttgctgttgatgttcattgtagctgttgatacttcatgcaggaaatgatcttgaagcccacatgttctttacgaacttgataggccaaaatggtctacatgaccttggtcgttctgtacgtgagcttcaaattgatgaccagcgtttcgaggatgctgaggaagaagacgagatccaagaaaatggacattagaagcagaatgttcattttacttgttccgttccttgaggggactatgtcattggttcgtctgtagattaccactgatgctgcttggttcgcaatacttgcttcttctacttcctttccctctttcttgttctataggatcaacatctctagggagcatcgatggtaacttttgtgagaaaaaggtcttgctgctggtcaagaatgtaacttgtagagcatgatggtgaatcgagtgaaattagttcgatacttttgatctgacagataggaggggaaatcgggaaaagaaatatgttctcttttcccttgtatatcatggcactgttgtgttatcatttaggatttaaagatttaaatgccaaactggatggaattgggacat

SEQ ID NO: 42139 - DNA, 447 bp, Oryza sativa
  Clone ID: PAT_MRT4530_45418C.1
agcggtattttgtataaagagtaaagtccatcaccggtctctaaacttgtaccgctgtgtcatcccggtccctaaactcataaatcgaccattcaggtcctcaaacttgttcgactgtgtcatcccagtccctaaacttacagatcactcgtttaggtcctccaacttgttcagttgtgtcaccccggtcccgtcctatttgacccagatgatattcaaatctaagtttagggaccgaggtgacacaactgaacaagttggagaatctaaatgagtgatctgcaattttagggaccgggatgacatagttgaacaagtttgaggacctgaacggtcgatttgcgagtttagggaccgctatgacacagcggtacaagtttagggacaggtgatggtctttactcttgtataaactattcgttttatatgggccattctttttccaac

SEQ ID NO: 42140 - DNA, 439 bp, Oryza sativa
  Clone ID: PAT_MRT4530_45419C.1
tggcagattatttatcaaaaaaagtaaaacggtccctaaacttgtaccgctgtgtcatcccggtccctaaactcgcaaatcgaccgttcaggtcctcaaacttgttcgactgtgtcatcccggtccttaaacttgcagatcactcgtttaggtcctccaacttgttcagttgtgtcaccccggtcccgtcctatttaacccagatgatattcaaatccaagtttagggaccggggtgacacaactgaacaggttggatgacctaaacgagtgatctaaaagtttaaggatcgggatgacacaattgaacaagtttgaggacctgaacagtcgatttgcgagtttcgggaccgggatgacacagcggtacaagtttagggaccggtgatggactttactcttattattttgtgatgaacaattatcatttgagattattg

SEQ ID NO: 42141 - DNA, 420 bp, Oryza sativa
  Clone ID: PAT_MRT4530_4541C.1
ccacgcgtccgcgattcttcaagaaggaatcgcaaatcgcaatgcatgcatgaggaagcaattgcatcgatcgatgtcatcagcaatggcggcggcaaaggaggcagcaggtgaggaggcgtcgtaagatgtttggcagctgcggcggcgggtacaggacgcagacgatcaacgggaggaaggggacgttcgtgcggctcgagcagcaggaggatcaggagcggcagccggcggcgacgtacaccatggacggcagcggcggcggcggcagggtgcagcacgtgatggacagctacttctcgagcgcgcccaagatccggacgcggtcggtgcgcatggcggcggcgggcgtgatgagcatcggcggctaccgggcggagcggctcaagagcatcggccgcgtgttccaggaggacctcg

SEQ ID NO: 42142 - DNA, 445 bp, Oryza sativa
  Clone ID: PAT_MRT4530_45420C.1
atgccaaacaggtcagactatcttcaaaacacattattaaaaaaagagtaaagtccatcaccggtccctaaacttgtaccgttgtgtcatcccggtccctaaactcgcaaatcgaccgttcaggtcctcaaacttgttcgactgtgtcatcccagtccctaaacttgcagatcactcgtttaggtcctacaacttgttcagttgtgtcaccccggtccctaaacttggatttgaatatcatctgggtcaaataagacaggaccggggtgacacaactaaacaagttggagctaaacgagtgatctgcaagtttagggaccgggatgacacagtcaaacaagtttgaggacctgaatggtcaatttgcgagtttagggaccgagatgacacagtggtacaagtttagggaccagtgatggactttactctaaaaaaaaatgcacga

SEQ ID NO: 42143 - DNA, 718 bp, Oryza sativa
  Clone ID: PAT_MRT4530_45421C.1
ccccccccctttttttttttttttttttttttttttttttttttttggatatttaaatgcactacagccaggtaaaatttctgtattgatcatttctaatatgtgaatcaatagtcagttcaaaatagctagttggtatttggtagtgaaacttcatgacccgcagactacgatttttgagtcacaagtgtgcaggtttcttcttccattgaaaacattttctacttaatagtgggccagtagcaaatgttgctccgtcggtgagtaaataagtgggattgctgaaatttcccccttatctcctgcccaacatacatattcttcgatctgctcggaacaaagatccatttatcatttcttgccctctagatgtgtcaaggattttgccggctgttcttatatatggacctgcgactagcagtgcagccctctcccctgctcgacggcggcggcgtgcgctggcggaggcacctcggggcatgatggcggtgagcagcgaaggagcaacaacgtggctcgtcgcttgaagcgttgatccggtgagttccccttttatttttagctcagcgtactgggttcctccatcctaccaccttctcgttccttcatcgccatgccacgtatgggaacgacgacccctccgttttcagaacaaagttccgcttcgttcccgttcctcgttccgggacgaggaactcacccacgttccacgttccct

SEQ ID NO: 42144 - DNA, 1476 bp, Oryza sativa
  Clone ID: PAT_MRT4530_45423C.1
atggcgggcgccgccgccgccgccgccgccaccccgccggaattcgtgtgcccgatctccggcgagctcatggccgacccggtgatcgtccccagcggcgagaccttcgagcgcggctgcgtcgaggcctgcgtggcgctgggcttcaccccggcggcgctgccactgtccgtggacctcgccgcctcgccgccaccggcgctcatcccgaacgccaacctcaggaaggccatctcctcctactgcgaccgcgtcggcttgccgcgtccgctcgccgtctcgccggaggaggcgaggggcattgtccgccacctcatggcgatgcgggagcctggtcgcgccgggggagtcaacggcgagcggttcgagtcgtcgtcgtcgtcctcgccggagttcgcggcgttggggttgaccttggaggaggctgttctggtgaggctgctcgacgacgagccgagccggcaggagggcgcgctggaggcgctgaagcagacgctgcgcggcggcgagaacggggtgaggcgcgcgctctgcacgccgcggctgctcgacgggctgcgccgcctgatggggtccggccacgagggcgtcagggtcagcgccgccgcgtgcgtggtcaacctctcgctggagccggcgaaccgggtgcagctggtgcgcgcggagctcgtgccggtgctcgtcgggctgctcgccgcggcgtccccggagctccgcgaccacgccgccggcgcggtgtacagcctctcgatcgaggagaggaaccggatcccgatcggcgtgctcggcgccgtcccgccgctgctgcgcctcctcgcgagcgccgccgacggcgaccgcgcgcggcgcgacgctggcatggcgctgtactacctctccctcgacgagatgaaccggtcgaggctcgcgaggtcggccggcgcggtggcggccctcgtcggcgccgcgggggacgccgcgctgcgccgcccggcgctgatggtcatggccaacctcgccggctgcggcgaggggagggaggcgctcatcgacggcggcgcggtggcggcggtggcggggctcatgcgccgcgccaccgtggcgccggggtccacggaggaggagtactgcctctcggcgctgcacgggatgagccgcggcaacgtccggttcggcgggctggcgcgcgccgcgggcgccggcgaggtgctccggcgcgtcgcggagggccccggcggcggggtgcggcgggacgtggcgtggcggacgctgcgcgccgtgggcggggtggccgccgccgccaccggcgagtctctgtacggcggcgaggacgccgccgccgccgcgccgtggatggacgacgtgagcgtcatgtcggaggccatggcgatgccgcagttcccgagacggctggtggagcacgcgcacgcgcacggggcgccgccgcggtcgaacaccacggcgctcgacaggctcaggcaagcgcccaacggctga

SEQ ID NO: 42145 - DNA, 396 bp, Oryza sativa
  Clone ID: PAT_MRT4530_45424C.1
acttcttaatatatagcataataacttggcaaatgaatcagattcgttacaatttcgttttgttcagatcaaggaaacgattcctcattgatttgtgcatatttctatatgacatagattggatgtttcaaatgatgcatattttccccgttgcaacgcacgggcacccaactagtcacagccaaaaagctcagaactaaagtacaaaatacaggagaggactcgaggaattttggtgctgcctctacaagcgcagcttttctggtttacttaatgcttagtataaagtaaactacacggataacttggccttagtggccgtacaactagacccatgaactcacaaacgacgcgagcggcacagatcttaacagaaaaacacgcatgataacagga

SEQ ID NO: 42146 - DNA, 359 bp, Oryza sativa
  Clone ID: PAT_MRT4530_45425C.1
gcgagacgtacctgtactggctgcggcggcggccggcgctgtacgtgacggacccggagctcatcggcgagatcgggcggtgcgtgtcgctcgacatgggcaagcccaagtacctccagaaaggccaggagccactcttcggcggcggcgtcctcaaggccaacggcgcgtgctgggcgcgccagcgcaaggtcatcgcgccggagttctacatggcccgtgtcagggccatggtccagctcatggtcgacgccgcgcagccgctgatcgcctcctgggaatccaggatcgacgccgctggaggcgcggcggcggcggaggtcgtcgtcgacggcgacctccggagcttctccttcgat

SEQ ID NO: 42147 - DNA, 1105 bp, Oryza sativa
  Clone ID: PAT_MRT4530_45426C.1
atgaccatcgcccacacagataacctcagcttggccatcgcccccggcggcggcagatacctggtccccgagttcaaccccatcatcggcagcgacgcggcacgctactctgtttctcgtcgaagaggggggtgtgctgagcaggatatcgactacccctcccaggtcgcccatgggacagccacagcgtggtctcatgacagtggagtcctggcgtccaaagccagcggggctgtggagccaagcggagggcgccagcctcgtcatcgtcgtcttctggtgcgcagcgggcgcagccgtcggggagcccggcagagcgacggggtggagtggggcggtggcggcgcgcgaagccggtggggcagagcggtagcaatctgccggcggcgcccccaactccctccgatctccactctcaccgcttgggccacctccactgcgcttcttctctccaccggccgagcgtaccgccgaggtgagtggcggaggacatgggaagggcgtcaagagtcaagaccggccttgtctgccttcttgaggtcgttgtcccctgcaccgctgctcactggcgtcgaggggctcgacccgctgcgcggcccgacgaccatctcctcgccggcctccaactcaccgtccacgtggacaaccgcaaggacgtacggcgattctgcaggccgccgacgtagcgctgtactacaaccgcgtcgtggtcggccgatggggtgaggtgccggccttctgcgtggacaagttgtcagcggtcgacctgaacgtcgccatgtcgcgagaaggcgtgtccctgcctcagcggctgcgtgaagccatggctgtcgacatgcacgtcggggaactggagttggcggttgagatgaagccagcacgtccggaggatgtctcccgggcgtgcttccactcgtgtgctgcaagagctttcatcgtcggctcgccgccctcagctgtcatcggtgcctctaacgttcgactcctcgctgtagcccccaagccgtcaacgtcgccaaatgcgagggctgctctcccgctgggtcctcacaggggctcgggtgcattgggttacccggtttgcaatgcggggtggggaggaatg

SEQ ID NO: 42148 - DNA, 387 bp, Oryza sativa
  Clone ID: PAT_MRT4530_45427C.1
atgctccaattgaagcaggtgcagcccaagtgcgcgatcgccatcgccgacaagggatcaaattgcagcttttggtctctcggctcgggttgggcatttttcccctcatcgtttcgtttcaactccgatgaaaagcgagcgccgagcagagcagagctgagcggattgcatgacttgtatccaccgcgcgtcgcgggtcaatactatggaggagcgactcgtgtagcggtgtacctcgaaatcttgacgttgaaacatggcaaaaccgggcccgtcgtcctcgtcaggaagctcgagacttttcggacctacgagaaaagtcgcaggttaagtgtggccctcgcgaacgcttgtggtttgtggctatgtgcggtgtgctggtgctga

SEQ ID NO: 42149 - DNA, 235 bp, Oryza sativa
  Clone ID: PAT_MRT4530_45428C.1
tcgcccacacgtccgtaccggcgcgacggtggcgcataaggccaaagaggtgaccgccgacaccgcgcacaaggtggcggaatacgcgcgggagaaagcggaacaagggaaagaaggcgaggtccgcgccgccgactggtcggaggagccgagcttctggaccgcggacaaagtccgcgacatgggcggacaaaccaaagacacgacgagcgacacaacgggaggcatggtgcac

SEQ ID NO: 42150 - DNA, 423 bp, Oryza sativa
  Clone ID: PAT_MRT4530_45429C.1
atggatctgatgaaggcgatgggtaggctgctccccaagctcggccagatgctcaaggacgagtacgacctgcacacgggcataaggaagaagatccagtctctctcacgtgagctcgaggatgtgcacgccgtcctccgcatggtcggcgaggtgccaccggagcagctcgacgggactgtcgagctgtgggcgcacgacctcagggaggcgtcgtacgacatggaccttgcttcatcatccaacggtcagaaatcgtccgtacctcatggtactgcacctcctctttcaagcagtatcattggtggaaaggatgagacatctgcatttttggattccctatgcaatcttcacaagatccagaccgtgaagattttggacgatcgtgatgaaagtaaggtggtgtttggatccagggagtag

SEQ ID NO: 42151 - DNA, 597 bp, Oryza sativa
  Clone ID: PAT_MRT4530_4542C.1
atgtcagtcaccctctcctctcttcttctcattctctactcttttctcacatatctctgcttttcttcggtgagggaggctggcagcgggcagcgcgcgcggcggccaaggcggagcaggcacgacgccaagcggcggccggggcagatggtggcgcggaaatggggggaggaggcgggcgtgacggcggacgacgcggattgggggagagaggcgggcgggacggcgggagcgacgggcggggcggagggtggcgcggagaggggaagaggaggcgggcgcgccagcgggcagtgtggattgggggagaaaggcagccaggacggagggtggcgcggagagggggaggaggcgggcgcggagggcggcgcagagagggggagagaggcggtcgggatggcgggagcggcaggcaagagcggcagcggagtggcgagcgaagctggcggtggacggccggtgagagcggcggcgctcatcatgctccagctcttcactgcaagcgtcgtcatcatgttggttgacctccacgagcgcagcaggtggagcagcggtcggtggagggatgcggagcggggtcctggtcggcaagggtga

SEQ ID NO: 42152 - DNA, 1309 bp, Oryza sativa
  Clone ID: PAT_MRT4530_45430C.1
atatcagtggaccacaaaatgtcgttgtacccaggatgcgatccggggcacaaaaagttgggtaccacgctggaattctcgcaatggaataccaaaattggtgtgagtgacaaggcatttggcgagttattgaaactcataaagaacattcttcctgaaagaaacgaattgcacgaaacaacgtacgaagctaagaaggtagtctgccctctatgactagaagtatagaagaaacatgcatgttcgaacgattgtattctctatcgcggtgaggagtacgagaacctagaagaatgcccgttttgtaaagcactatgatacaagattagacaagatgatccaggtgatgtcgacggacagccttcgaagaagagagttgctgctaaggtgatgtgctatttccctataataccacggctcaagcgttggttcaggaacaaagcgcatgctagaatgatgcgctggcacgcagaagaatgtcgacaagacgggatgctgagacaccccaccgatgagtcacattggcgaaacatcgatggaacgttcggtttaagtatgtatggcatgaatctatttggagatgagcagcagccgtaacacttggcctgtgaccatgtgtatctccaacttcccccctatgaatgaagccgaagtacatcagggtgtcgatattattgaaggcccaaagcaacctggtaacgacattgatgagtactaaagaccattggttgaagttctgaaactgcgtgaaagaaataaggtgtcctcgtgcgggatgagttcaaacagaagcaatttaacctacgagcgttgctgttcgttaccattaacaacctatctggacagtcaaacaagggatataaggcttgcacccactacatggatgaaactgaaagtacgtatctaaaacattgtaggaaggtagtgtacatgggccatcgtcgattcctttttgcaagccacctgtacggaagaaaggaaagtacttcgaacagaaggcaagccaccgtactaagcctaaacattgcaatggaaaagtcatgtttgctatggtgaaagatctgaaagtagtatttggaaagggagctagcaaccaacctatagagagctaagatgcgcacgcggcgatctggaagaagaagtctattttttttgagagttaccctattgggaagtcttggatgtccgccacgcaattgacgtgatgcacctcactaagaacctttgcgtcaacttgctgggcttcctaggtgtatataggaagtcaaaagatacacatgaagcacgtaatgatctcaagcatatggaa

SEQ ID NO: 42153 - DNA, 835 bp, Oryza sativa
  unsure (1)..(835): unsure at all n locations
  Clone ID: PAT_MRT4530_45431C.1
tttttttttttttttttttttttttttttttttttttttttggatgaggccgcttttttttttttttttttaacaaaaaccagacgcgttaattacaaaacaagagttaacagtctcaagctcggtatatgtacagatgcataactagctagttactaaccggcaagcaaatcaagcagcgtataaccccacgtacgtacgcataataggcgtgcggatatcaaagacgacgagtagcagtagaatcaatgatcagggcttccacatgtcctggaaggtggagtggaaggaggcgaggacgaggaggagcaggacgaccatggcgacgccccatggggagctcccctcggcggggcccgggtcgtagcggttccagcggcgctcggttgggtagaagctgaagtagccgtcgaaggtgtcgacggaggagatccagcggatgaggaggacgagcgcgacggggacgagcagcagcgcccagctgagctgctccgccgcctcctccatgaagtcctcgtacgtgaagaaccacgacacccccagcagcagcatcaccatgagcaggatcaggatcaccgggtacggcagcggcgacagcgtgaacgcctccaccaccgacgacgtctcccccctctggtacgccatcgccgccgtgctctctctctctcgctcggtctcgctctcgctaggtggttcttgatgaaatcgctcctcgtgcgggaaagcgagcgaggccgangcncggggtnataggggcgggtaactaccagcgcgtagtggtagtggtgggctagtggcctaccgccgcgcgggcgcgaggagatgattaaatggg

SEQ ID NO: 42154 - DNA, 2099 bp, Oryza sativa
  Clone ID: PAT_MRT4530_45432C.1
agtgaactgggaatgattcacaaccaaaggaggaaaaagaaagaattattaattacttttccaattaaattaatcactgaatgatctttcatttattaaaaatgcttccaatgctcaaataattctgggaaaaatctagaaaatacttggacattaaaaatatttaatacaaaatttagcgatttttatggtgtgacaatctcacatagagagttaggagttccaatggacaaagatgaagtagaagacgagagcattccagactgggctcaatatggtggatttgatgaaaatacaaaaggaaggtggacagggctgttgaagataacgttggtgcgaatgatcttggtcagaagttgcgtgacgtaaaggaggacggcaaaagtgaaaaggaggtgcagaaacttgagcgcatatcagtggaccacaaaatgtcgttgtacccaggatgcgatccggggcacaaaaagttgggtaccacgctggaattctcgcaatggaataccaaaattggtgtgagtgacaaggcatttggcgagttattgaaactcataaagaacattcttcctgaaagaaacgaattgcacgaaacaacgtacgaagctaagaaggtagtctgccctctatgactagaagtatagaagaaacatgcatgttcgaacgattgtattctctatcgcggtgaggagtacgagaacctagaagaatgcccgttttgtaaagcactatgatacaagattagacaagatgatccaggtgatgtcgacggacagccttcgaagaagagagttgctgctaaggtgatgtgctatttccctataataccacggctcaagcgttggttcaggaacaaagcgcatgctagaatgatgcgctggcacgcagaagaatgtcgacaagacgggatgctgagacaccccaccgatgagtcacattggcgaaacatcgatggaacatttcaagacttcggagtggatgcacgaaacattaggttcggtttaagtatgtatggcatgaatctatttggagatgagcagcagccgtaacacttggcctgtgaccatgtgtatctccaacttcccccctatgaatgaagccgaagtacatcagggtgtcgatattattgaaggcccaaagcaacctggtaacgacattgatgagtactaaagaccattggttgaagttctgaaactgcgtgaaagaaataaggtgtcctcgtgcgggatgagttcaaacagaagcaatttaacctacgagcgttgctgttcgttaccattaacaacctatctggacagtcaaacaagggatataaggcttgcacccactacatggatgaaactgaaagtacgtatctaaaacattgtaggaaggtagtgtacatgggccatcgtcgattcctttttgcaagccacctgtacggaagaaaggaaagtacttcgaacagaaggcaagccaccgtactaagcctaaacattgcaatggaaaagtcatgtttgctatggtgaaagatctgaaagtagtatttggaaagggagctagcaaccaacctatagagagctaagatgcgcacgcggcgatctggaagaagaagtctattttttttgagagttaccctattgggaagtcttggatgtccgccacgcaattgacgtgatgcacctcactaagaacctttgcgtcaacttgctgggcttcctaggtgtatataggaagtcaaaagatacacatgaagcacgtaatgatctcaagcatatggaacaacgcggtggccatcatccggaacaaaagaagaaaggaagccattacttgagtaaggaagagaacgaaagtatgtttgaatgcctagagagcgtcaaggtaccgtctagatactcctcgactacaatgagaataataagtatgaaggagaagaagttcacaaaactgagcagctcacgcaaaaaattgctatacactcttcttctcccccttcctctcccttcttctcttcctactacaacacaccataaaatttaaaaaaataaaaaaaagttagaaaaaattatggatagaaatactatatataaaaaatttgaattcaaatttaaaattgaaacggg

SEQ ID NO: 42155 - DNA, 316 bp, Oryza sativa
  Clone ID: PAT_MRT4530_45433C.1
ggaggaagtagtacacaatactagactgagcaccatgtgaacatgcatacttagaacaagacaaatgttggcacaacatagtaaacacaaccaattgacagacggatgcccataactctggaaaaggcaatgacgaacaaaatcttattacatccatggctaaatctaatacaagaaccaatggcaaggacatatttaaactagagcttaattagccaacaaataaggctgttctatagcggtctgcatataattacggcgatccctcgacgaataatatcgataagaatcgaaaatatttctaggagggagcaaa

SEQ ID NO: 42156 - DNA, 392 bp, Oryza sativa
  Clone ID: PAT_MRT4530_45434C.1
ggaaaataacaggggcttaattaacaaaaggatttggttcaagggttacaagttgaccccaacccacttcccaggggaaaataactaggagcaaaccccctttttttttttacaaaatgaaagctttaaaacctggaagggagggggaaaaaaagtaaaaaacatcccccaaggggggggaggggggggcacctttcctaggcggttcttcttatttagaccgcaaaaaaaccgggcaaactaaaaacgaacccaaatttttgatcgggttcacttcacaattccccctgaaaaaaaggctttttttttgttaaacattagggcaggcccttccctggggagttttttgggggccactgcgggtgctagggtaacccccctggcgggagggg

SEQ ID NO: 42157 - DNA, 177 bp, Oryza sativa
  Clone ID: PAT_MRT4530_45435C.1
atggattgggagggctacgccaagggccagcactgcctcagtgcctcgcttttgacatccggtgcttcatcagggtcatttgaatcagagcacgccgtcacttgccgcttgctgcggcagccgcatcttgcagcacaccatccagttgcccacacgatgcagcgattagtcctgcag

SEQ ID NO: 42158 - DNA, 172 bp, Oryza sativa
  Clone ID: PAT_MRT4530_45436C.1
attcctccaagacctcaagtcgattccaaacccacagagcccaaccagaatccaattatttgaagcgcccccccccgacgtaattatccattcccatacgttgaaatttcgccaccccacctggaaccatgcttcctggacgcccacaacatgtcgtaacttcttcgtgcaa

SEQ ID NO: 42159 - DNA, 630 bp, Oryza sativa
  Clone ID: PAT_MRT4530_45437C.1
atgtgctacgagtcggagtgctgcggcggccgcggctcgtaccggaaccgcaggttcgcgctcggcttctggttcggcctcgccatcctcgccgccatcgccatcatcgtcgtgctcgccgtcggctacggccgcgtctccagcctcagggtcgccgtcgacgacgcctccctgacgcgcttcgcggtgaccgccacctccgtcgcctacaacctcaccgtcgcgctcgtcgtccgcaaccccaactgggccatgggcgtcacctaccgctccctcgaggcgtcctacctcttccacggcaagcgcttcgacggcgccgccgccgtcgtctcctcgggatacgagcaggcggcgaggaagacggaggtgttccgcctctcgtccggctccgacgcggcgccggccgcgctggggagcggcggcgagagggagtaccggaaggagagcgacaatggcggggtgttcgacgtcgaggtggacctgtccggcgaggtgaagtacgcgctgcacagcgcgtggtgcagggtggaggccaggtgcccgctcaagctgcagctcgccgccgccggcagcgtcgccttccaggagaccacctgcgacatgctccggtcgtcgcagagtggatgctga

SEQ ID NO: 42160 - DNA, 209 bp, Oryza sativa
  Clone ID: PAT_MRT4530_45438C.1
atctgaatgataaataaactcggactaggtgaaaaacacacaatactttcaaaaaacaagttagataagaccgaacatacttggggcttcaaggaactggagttcaagggctcccgaagtctagaggccaaatacaattccaggctagacccccctggcattttcgaggttgacggcacattgctaaaaaatggtaactcggagccaat

SEQ ID NO: 42161 - DNA, 531 bp, Oryza sativa
  unsure (1)..(531): unsure at all n locations
  Clone ID: PAT_MRT4530_45439C.1
nnnnnnnnnnnnannnnnnnnngatcctcgcgctccccggcgtggacccggacccgttgcccgccctcgtcgagcacaacttcccgaccctcctcgccgtctcgccgctcgcctccctcgagctgctctccctcctgcggcccaatccccagctcggcctcgcggtcttctcgtcccgccggacgctctccccgcccgcgaccctcccggagttcgtcctcgccatctcgctcgccggccgcgcccgcgaccccgccgccgcggcccgcctcttcgccgaagcctccaccgcatactgccccgaccaggcgctctacaatgccctcatgtcctcgtacatgcacagaggtctcgccgaccgctgcatcgaggccttccacacgctggagcgagacccacgctggggacccgccaatgcggactcctacaacatcctcatcgccctctttggtcgctccctcctcgttgaccacatggaagccacgctcctgtcgctggatgcatccggccaccctcggacaatcgggacgt

SEQ ID NO: 42162 - DNA, 451 bp, Oryza sativa
  unsure (1)..(451): unsure at all n locations
  Clone ID: PAT_MRT4530_4543C.1
ggacggcggngnacggtngggtntttgtgttctgttgccatatcaacaatggacagaatgataggtatcttttatttagtcttttattaagtccggacacaagtacacaactgatctcatatttgcaagcaaacactaggaattcaaacagcctacagtatattaccataagagctatttatgcaatgagatagtctgtctggatcactgctgctaaaaaagatgaaggctccatgaagaattgtaggattacattaaacttggcctaatgttggcacttactcaggatgagggacaggtttcccttatgtccttgatcagtagttggaggaaacacaaactgcaggggcttaataactcatcagcgtgccgaggatgcagactccataggatctttcaattcatncttgaactgacatagntacaacccagtactancaaatcataccag

SEQ ID NO: 42163 - DNA, 554 bp, Oryza sativa
  Clone ID: PAT_MRT4530_45440C.1
gtccttcttagctcaaaaaatggagaagaaattaggtgtttgatctgataatactctttcacatgcaggtagagttgtacacatcaatgcatggttatcctctatccctcatatgctatgggtttctatcaactttatgaatgattacatcataactttgacttaattagtggtagatactattggctaggaaataaacaaggcatgaaataccacatggtgaagtggtctgatctagctttccctaaagagtttgggggactggggcttactgaaactagaatactgaacactgctttactagctaaatagttgtttaagattgaatcccctgataagagtttgtgtgttgagctattgaggaagaaatacctacacaatggtgggatgttccaatgctcccctgatagagcttctcaattctgggttggggtgcttcgtgcaagaaagtggatgaaacttgggtcaaagtggcaggtaggtaatggtactctgttaacgaccaaatttgatgtgttttttgcatcaacataagccgggctgggctttgccta

SEQ ID NO: 42164 - DNA, 143 bp, Oryza sativa
  Clone ID: PAT_MRT4530_45441C.1
cggacgcgtgggcggacgcgtgggcggacgcgtgggcggtaggcgttcgaccgcctcgtggcaccggctgtcctcggattagccggggccccgcagttcccgacgctgtgggccgcgccacggaggctgacggcgcaggcggt

SEQ ID NO: 42165 - DNA, 1518 bp, Oryza sativa
  Clone ID: PAT_MRT4530_45442C.1
atggaggagacaaggagacacttggagaaggacttagagtcatggaggatcatcgaggacgtccaagtcaaggtggaggcccaaaccaattcgacctcgggtgcaatttggagtccaggatcagtctgcactaaaacgggcgcccagatgaggacggcgacggcggcggcagggtacgggcacggcgatggcggcggtagcgggggacgggcacggcggcggcggcgggggtcgggcttggcggcggcaggggacagcaacggtggcggcggtgtcgacggggcacgggcgcggtggcagcgggggatagcgacgacggcggcggcggacgggcgcggcggcggcggcggtggcggcaacggtggaggcgacgggggacgggcgcggcagcggggggacgacgacgacaccacgtggccctacatcctggccctacccccgcaccttgcgaatcgcagaagtggtcggggggcatcggggtgccacgtcatgcccctcgggccctcgtgccgccttgccccgaggccctcgcccaactgccatgtggcggggggagcgagcggggaggggacccaggctgaaccactatcaatgcgcgcggcgccccaactgcccctcgccgcatttaatgtggtgggggcagacatgcggtaccgcccgactgacgcacgtcagtcaggaatgaccggagttcttcgatttgtgtttatcgggttttggtggtctaaccggcgatctaccggcggtcagaccagcggcaagcggtggtcagaccgatgggagcacggcggtcagaccggcggtggcgacaggagcggcgagcagcttcggtggtcagaccggttgatctataccggtcagaccgacggcatccgagcgcttgggagaggcaaaagagaagacaaagatggtgagaagaccaacaacaacaagcccaacaacaacaagtcgaagggttcataccaagggaggaagatggagaatcttaggaaggcttttcaacaagtttgcgccgccttcgagccactaagtgatgtagatggtgaaagtggagatgatgataagggaaagaacatctccaatgtttgcttcatggcgcgtggtgaatctgacacagagtatgaagataatgaggctttggtggcaaggaaggagaacgtgtggatcgtggattccggtttggttaagggggaggatggtcgtatttttgaagacgagagcgacaatgacaacgacaacgacgaggtcggctcggccggtcagaccgccggcacacctccggtcagaccgacaaaggagaaggtggatcaacttcagaagttgctgctcctttgcatattcaatgtcgacatccgccggaacaaatcattggagttcttcgatttgtgtttatcgggtttcggcggtctaaccgtcgatctaccggcggcaagcggcggtcagaccggtgggagcacggcggtcagaccggcggtggcaacaggcgcggcgagcagcttcggcggtcagaccggttga

SEQ ID NO: 42166 - DNA, 522 bp, Oryza sativa
  Clone ID: PAT_MRT4530_45443C.1
tgcacgcacacgtgcgcgggcattgctatacagtgagcggcctgtccttttttttttttttttttttttaattctttttttttttttatatttgggggggttttttaacaaaaggggggggaacaataccctcaaagccaagtcctcaagacaaaaccgttggtggcctagcacacctacccaacgtcacccataaacatcactactcctaaggggatgctaaccagttgacggatttcacccttcaccagacttaaaccataaacctcccatcaaatcctcctaatcgacggcatataatatgacaaaccccatcccggactctccaatggcccccaaacgaacttcaaggccccactttttattcccaacttcgattaacgcgcctggcaacccatatcctacaagtgccggacctaaaataacccctaaactggaccgtaaccaagatcagcctgaaacttgtaaagcttcgtcagcctggcaccaagcttcccaaaggggagggcggccaccttctcg

SEQ ID NO: 42167 - DNA, 624 bp, Oryza sativa
  Clone ID: PAT_MRT4530_45444C.1
atgtctgcccccaccacattaaatgcggcgaggggcagttggggcgccgcgcgcattgatagtggttcagcctgggtcccctccccgctcgctccccccgccacatggcagttgggcgagggcctcggggcaaggcggcacgagggcccgaggggcatgacgtggcaccccgatgccccccgaccacttctgcgattcgcaaggtgcgggggaatgctgtgggacgggataccgtcccccaacgggatagctcctcctccacaacgcgattcctgctcactcactgtcgtcgtcgtccccccgctgccgcgcccgtcccccgtcgcctccaccgttgccgccaccgccgccgccgccgcgcccgtccgccgccgccgtcgtcgctatcccccgctgccaccgcgcccgtgccccgtcgacaccgccgccaccgttgctgtcccctgccgccgccaagcccgacccccgccgccgccgccgtgcccgtcccccgctaccgccgccatcgccgtgcccgtaccctgccgccgccgtcgccgtcctcatctacatgggacggctgcaggtgaccgactgcgcgtgtcgaggtgctccttccccaacgggatgcccagctatatctag

SEQ ID NO: 42168 - DNA, 451 bp, Oryza sativa
  unsure (1)..(451): unsure at all n locations
  Clone ID: PAT_MRT4530_45445C.1
cgccncccccgtactccnaggtgtcgccggaggacaggtacctgtcgccgccgccacctccagcctccaagaaacgccgccnccgccgccgcagtacnaggtgtcaccggaggacaggtacctgtcgccgccacctccatcaccggtgaagtggaagctgccggtgtacgagtactcatcgccgccgccgccggcagcaancatggaagccataaaattaaaatcgattctttcgggattttttttttcacacactatgatcatacatattgttaaatttgttngtatngttgagtaaaaaaagggatngctaaatcttttctgttactacccctccttcctgattttcttttngcttgtactgtatgtatttttcttcttttatttttttctccttctttgaatgaacagcaggaaatctgcttttcctcccaaaaaaaaaaaaaaaaaa

SEQ ID NO: 42169 - DNA, 418 bp, Oryza sativa
  Clone ID: PAT_MRT4530_45446C.1
tctcaaccatttacttaatggatgctcattgggtaactacaataatccatgaaccataagcaaactgaaatctttaacttgtacctagttatttctcaaagtagtattgaagtaggcagcattagcaatcagtaatgactctgcgcaaggttgaagcattcaaactgcatatatttactgcaagaacttgtgcatagtacacaacttgttataaacgcaaacctgtcaattcttcatgtttgtgtgctactagtgggagagttcagaggacatgaagagttgctgcaactctgctcatttgcttgaattggtggtccagcatttctggaaaataactgcaaaacttttggatcaagcaaaatcttgcaattaggcgtcaactaatatcatccaaactgaattaaaaattaggataggt

SEQ ID NO: 42170 - DNA, 3894 bp, Oryza sativa
  Clone ID: PAT_MRT4530_45447C.1
atggcctcttcgagtgccctgtctccaaacgtcgcatgggttctttgtctctgcaccttcttttgctccatatcgttagccatctgcaatgaaactgactatgatagacaggccctcctttgcttcaagtctcagctctctggtccatctagagctctatcctcatggagcaacacatccttgaatttctgcagctgggatggagtcacctgcagcgcgcgacgtcctccccgggtcattgcaatagacctcgcatctgaaggcatcacgggcaccatatcaccttgcatcgccaacctgacctcccttacgacgcttcaactgtcaaacaacagcctccatggcagcataccacccaggcttggcctcctgagtgaactcagcaacctcaacctcagcatgaactctttagaaggtaacatcccatctcaactttcttcatgttcccaacttgaaatcctaggtttgtcgagcaattccttccaaggtgcgatcccagctagcctaggcaaatgcatacatcttcaggagattaatctcagcagaaacaagttgcagggtagcatcccctctgcttttgggaatcttcctaagctgcaagcactggtcctcgctagcaacaggctcaccggtgacataccaccatctctaggcagcagcgtttctctcagatatgttgatcttggcaataatgctctcacaggaagcataccagagtccttggcaaacagctcatctctccaagtacttaggctcatgagcaatagtcttagtggacaactcccgaagtctctattcaatacttcatcgcttaccgccatttgcctccaacagaacagctttgttggttctatacccgctgttgcggccatgtcctcccccattaaatatctctccttaagggacaactgcatctcaggagcaataccgccctcactagctaacctttcttccctacttggccttcgcctttctgagaacaatttagttggcagcatcccagagagcttaggtcatatccgaacactagagatgctggccttgagtgtgaacaacttgtctggcctagttccaccatctctcttcaacatgtcgtccctgacatttcttgccatggcaaacaactcgctcgcgggaagattaccctccgatattggctacacacttccgaaaattcagggcttgatcctcccggcaaacaagtttgttggcccaattccagcttctcttctcaatgcctaccacctagagatgctctaccttggtaataacagtttcactgggctcgtcccgttcttcggatcattgccgaatttggacgaacttgatgtgtcatacaacatgctagaaccgggcgattggggcttcatgacatcactctcgaattgctctagattgactcaactgatgttagatgggaacagcttccaaggaattttgccaagttcaatcggcaatctttctagcaatcttgaggcgttatggctaagaaataacaaattctttgggcccataccgccagaaataggtaatctgaagagcctcagtagattgtttatggattacaatcttttcaccggtactataccaccaacaattggaaacctgaacagcttggccgttctatcatttgcacaaaataagctctcaggccatatccctgacgtttttggcaacctaggtcagttgacagatctgaaattggatgggaacaacttcagtggaagaatacctgcaagtataggccagtgtactcaactccagatactcaaccttgctcacaactcattagatgggaatataccaagtataatattcgaaatttcttccctttctcaagagatggacttgtcacacaattacttgtctggaggaatgccagacgaagttggaaatctcattcatttgaacagacttggaatctcaaacaacatgttgtccggcgagatcccatcctcccttggccagtgtgtggctctggagtatctcgagattcaaagcaacttctttgtaggaggtattccgcaatctttcgtgaacttagtaagcataaaagggatggacatatctcggaacaatttgtctgggaatatcccacagttcctcacctcgctgagctccctacatgccctcaatttatccttcaacaattttgatggagtcgttccaacgggtggcgttttcgacattgacgctgcagtgtcgcttgaaggaaatgatcatttgtgtacaagcgttccaaaaggtggtattccttcttgttctgttttggctgaccggaaaaggaaactcaagatcttggttctagtcctagagatactgataccagctatcgttgctgctataatcattctatcctatgttgtgagaatttatcgaaggaaggagatgcaagcaaacccacattgccaactaattagtgaccacgtgaagaacataacatatcaagacattgtaaaggctacagataggttcagttctgccaatttaattggcacaggatcgtttgggacggtttacaaaggtaatctagaccctcagcaagatgaggttgccatcaaagtatttaaccttggtacttgtggggcccaaaggagctttagtgtggagtgtgaagccctaagaaacattcgccatcgaaatcttgtcaaaatcatcactctctgctcttcagtggattccagtggggctgacttcaaagcccttgtgttccactacatggccaacgggaacttggacacttggctacatccaagggcccatgaacacagcgagaggaaaactctgacttttagccaaagaatcaatatagccttggatgtagcatttgctttggactatctgcataaccaatgtgcatctccgctagtacattgtgacttgaagccaagcaatatccttttggaccttgacatgattgcgtatgtcagcgactttggcctagcaagatgtctaaacattaccgcaaatgcatatgaaggaagttcaaaatctttggcttgcctaaagggatctatagggtacatcccaccagagtatggcatgagtgaagtgatatcaaccaagggtgatgtctacagcttcggtgtgcttctattggaaatggtaacagggagcagtcctacggatgaaaaattcaataacggtacaagccttcatgaacatgttgcaagagctttccccaagaatacctgtgagattgttgatcccacgatgctacaaggtgaaatcaacgtaacaacagtgatgcagaattgcatcattccattggtcaggataggtctttgctgctccgcggcatctcctaaggaccggtgggaaatggggcaagtttctgccgaaatccttaagatcaagcatgtattctcaagcatacatggtgtaaatggacttgggccggcctctcgtggacctctctgggcccatgtaggcaaagaaggaaaaaagaaacgcagcgtacatacatgtgagagaattcagtcccacaacttcgatttcatgaaaatagcatgctacgaaggagttttcaaaagttacatacaagttacattattgtaccataattacatttatcaaattaagaaaatttgtcaacaaatagatgtaaccgtgacggttctcccagcacgtccctgtagtctctcagggatgattcttcagatactcaggaagccggtagcgctccagccaagttcttcatcaaaaactaaaaaagttgagtatttccatgagcatcaagcaaatgcagcagcaagagtgggtggcatggtgccatggcgacgggaggttgaggagaaggcgacagtgacggaggagcttgaggaagttgtattgcccccgtatctcagcggtggcaaggcggcaggagttcgagaagagaacaaaggcgggtga

SEQ ID NO: 42171 - DNA, 347 bp, Oryza sativa
  Clone ID: PAT_MRT4530_45448C.1
tcgacctcgtcgacgccgggcgctagcgctgctactatcctacgccgccgcctactacccgatacgacccgcgcgccctcccccgcggcgccacctcgcctgcgcctgcccctccgccgctcgccgccccccgcgcgcgccaagttcggcaagttcgaggcctccgacgccgcccccacggaggcctccgccgaggaggcggaatcggcggcagcaggcgggagatggggcggcagaacagaaagcggaggaggacgacagctgattgccgtcagacttggagggcgcgatatggcaaactgggaaggcgagcgaagacttcgaaaactatggaggaacgcgagcca

SEQ ID NO: 42172 - DNA, 393 bp, Oryza sativa
  Clone ID: PAT_MRT4530_45449C.1
atggcaggggggccgctgccgctgccaacgcccgccgcccgccgccgctgccatcacccatcacccgtcgccgctgccgtcacccatcacccgtcgccgctgccaacgcccgtcgcccgtcgctgctgggagacaccggctgccgctgccacagctcacgagaagggaaggggaggatgggatcgaaggagaggtaggaggggatcggaggagggtgtgaggaggggatcggaggatataagggagagagagagtctgggaggcgtgcgcagcggattccgagaaggtgctaatgtggtttttagccaacccaacaaagatgatttttctagtagtgatataactcctaaggccattaagagggcaggctacacagacggaatggccttgtga

SEQ ID NO: 42173 - DNA, 492 bp, Oryza sativa
  Clone ID: PAT_MRT4530_4544C.1
cccacgcgtccgcgagagcgcacactgcagaagcatgcggcatgcctgccttgcgcaggcacagctacccgctctcgcagctgcatccggcacacagattttcggctcgaatggatatccgccgtagtctccaagtcgatctgttgttccttcccccctgtacgtctcaccgtagagttggagtggcatcatggcatggctatcccgtctccatgcttcttggctcctcgcgagcgcgaaaggccgctccagcctgggaccgatccacctatataaatcggcctcgctctgctccagttcggactcagatcgcaaccaacagttgagttgaattgagctcgaattgtactcgattcaccacacagaggaatcaaatcgaagcagccatggctctcgtggagggaaacaacggcgtgtcggggggagcggtcagcttcagcgaggagcaggaggcgcttgtgctcaagtcgtgggccatcatgaagaaggatt

SEQ ID NO: 42174 - DNA, 116 bp, Oryza sativa
  Clone ID: PAT_MRT4530_45450C.1
atggagtggggagaagatcttttccatgaagaaaaattcatgctctgtccgggaacttttgcatcgtctgatggcgacctggcactcaatttgctggacttttttttaactgagat

SEQ ID NO: 42175 - DNA, 304 bp, Oryza sativa
  unsure (1)..(304): unsure at all n locations
  Clone ID: PAT_MRT4530_45451C.1
cgagtttgtatactcgataaattaaggcccacccccagtgccaatgaccgacgtgaaggctgccgccagtgcggcgggtgccgttgcggctgtggccggtggcagcgacgcgaagagcgtngtgcggcgaaattgattttggtgaccggtggtgcggggtatatcggcagtcacacggtcgtggagctgctcgacttcggctatgatgtcgtcatcgtcgacaatctggtgaactcgacggaggtgtcgattgaccgcatcgctcagatcaataagcgcaaagtgcgtccggcgttttacaaaa

SEQ ID NO: 42176 - DNA, 495 bp, Oryza sativa
  Clone ID: PAT_MRT4530_45452C.1
atggcggcgaggacgacgccgttgcctctgctgcgtggcgcggcggcggcggcggcggcgcgctcttgcctgcaccggccgcaggtgggcgctgccgccgcgcggcgcgccgccgtcggcgtccggtgcggcgggacgccgccggccgagccgggcccgtccatcccttcgccgccgatgccagaggtccccgacgtgccgcgcaaccccgacgtcccgccgccgaagccgccggagttggacccgccgaggccgccacccgaggtcgtgccggagccgacgccgccggacgtcgagccgccgacctttatagttcgtgcagaggtcgcaggggaggagcgacagcggctcgatgacgaggaggagcagcggtggcggtggctggcgatgaggagcgacaaagtggatgtggcggaggctcaacgatgcatctgggggcatggaggcacacaggcagtggatctggaagcgatgggtcgacgtatgtggcagtga

SEQ ID NO: 42177 - DNA, 618 bp, Oryza sativa
  unsure (1)..(618): unsure at all n locations
  Clone ID: PAT_MRT4530_45453C.1
cgggtcgacctcgcgtccgggctgtttcatctagcctcccgatcgtggcgggggtggcagcgaggacgacgccgttgcctctgctgcgtggcgcggcggcggcggcggcggcgcgctcttgcctgcaccggccgcaggtgggcgctgccgccgcgcggcgcgccgccgtcggcgtccggttcttctggacgccggggggggggtgccnnnaacggaccggtcgctggaggagctcccgagcatcgacacgccgccggagttcgaggcgccgccggggctggacgtgccgatgccgccgccgggcgcgccgacgcccgggccggagcagccgggcccgtccatcccttcgccgccgatgccagaggtccccgacgtgccgcgcaaccccgacgtcccgccgccgaagccgccggagttggacccgccgaggccgccacccgaggtcgtgccggagccgaccccgccggacgtcgagccgcccacctttatagtgtaaaaaaacaacgacggcgaggtgacacgcgcctgccacgtggcgggctgagagattgtcgatgacgtgggcaccgtcgggactccccgaaagaacagtgacctgtcccctgttcgtctcgtctt

SEQ ID NO: 42178 - DNA, 2169 bp, Oryza sativa
  Clone ID: PAT_MRT4530_45454C.1
atgccgcgccccgccgcctcctcctccagccgccctccgccggaaggcgagccggcctcgagccgcgcgacctcctctgcggagtcctccatcgcgtccctcatcgaccgcgccacctccaccacctccccctccgtcgacccggccctcctccgcgccatcaagtccgccgcccgcgcctccgacggcgccatccgcgacgccttccggatcctcctctccctcatgtccaagccccacgcccacgtgcggctgctcgcgttcatcatcgccgacgagctcttcatgcgctcgaagctcttccgctccctgctgaccgacgtgctggacggcttcctcccgctcgccgtcggcttccgccgcgcccacccgctcccgccgcccgctgcctccgcgaccctgctccgcaaggccgccgtccaggcgctcgagcgctggcaccacctgttcggcgcgcactaccgccagctccgcctcgccgtcgagtacctcaaggagtccgcccgggtccagttccccggcctccgtgccgccgtcgaggctcgtgccgcgcgggaggctcgcacgcaggagatcttaactgcaaaggtcgagcagttgcgccgaaacctggcagcgattaaggctgaaatccgctccgcgattgatgagatccgcaatgggttggatatcattcgcatcgagagtgaaaaatttaacaattatgcaaatgatgaggatgaggagcaggagattgcctctttggcgatgcggagtattaggatggcttctttgatggctggggagtgggttcctgagactcaggagaatgaagcagttttcgacgcgttgagggagtcatatcggctccttgtgtcaaagcatttggtcacagttcaggaatggatatctgtgctggttagggtcaatctcgcagataatcgtttcagagattctgctttgaaggaattcattgatgttaagaatgaaatacgagcggtgagaaatcggtgtagtgagcttggtcttaatcttgacaatgtccataggcggaagggtgttcaggaggaagaggatgatgacttttgggttgaggggaatattgaggttcctagccctggtagagtaggtaccagtgcagatgttgcaagtagcagcaaggacactagaaagggaaagaagccagtaggtggcacggatactgatgatggcaaggcacctaatgctggcaatagtcctcaagagctggatccagagagggcaaagctgcatgcagaagcccctgtgctgccatggagctctgttttggatcgttggggttctaacagggatgcacttgtaaaccaaaggggacttgagctcgagagccattggggaagggtggataatgatgctgttatacctgctgcaaagattgcagaattaaatgttcatagttcaatatatagagaagatccagttgagattctaccatgccttgcacctctgaagaaaggaggcctttgccagagaagagatctcaagatatgcccgtttcatgggcctattgttccacgagatgccgaaggaaatccaattcatcagagtgatggccattgtgatgcagaaggaaatccagttgggcagactgatggccattatgatgcagcagtaagtcctattgatccgaatgaagacagttctgatgtaagagaaaatatgattatgccagatggaagcagtgatggtgaatgtatttatgagtcctctccttcaagaacggcaaacataaataatgacattagcgacagcgatgtaggtcatgacctcggtaaaattacagtggagcagttggcgagacaggcagtgcagaatgtccggaaaagagacagggatgacaaaaaagctctggaaaaagcccaacgagcgagaattcgtcagcataatcaagatgttttgcgggaagcggctcttgcttcaacctcgcgctcagcggcagactatgacctcccttcgccagcagtgtctcgacggggacgccgaggtaagacttagccacctgccctcgcgtcgatgctgaagaagaaagttacttccaaagatagaattgcagagaggcttctgaatgctcgagctagggatgcgacaataagagaagtttcacatactgaagatatgagctacagagaagcattcccaaatcaatggtag

SEQ ID NO: 42179 - DNA, 1642 bp, Oryza sativa
  Clone ID: PAT_MRT4530_45455C.1
accgggctgcaggaattcggcacgaggcccaagttcaaacacctcgctctctctctctctctctgcccgtacactcggggcatcgcctcctcaggcggcaacagcggcggcggcggcggcggcggcggcggcggcgatggagttccagcagggcggcgggggcggttgcggtggcggcaaggcgcgggacaagttctcggtctaccggaacccgtccctcgcccgcgcgctcgcctcccgcagcgtccgcccctccctcccggtcctcgtcctcctggcgctgtcccccatcgcctccgcctcctccatcctcgtcctctcctcctgggaagggcagctcgtgaaggtcgccggccgtgcgggcctctccatggctgctgccgtgcttgtctttaggttgattgaggcagcgctgggtctggtcgcactttttacactgccggctttcttcagggcggtgatgctctacaatgggaagagggcacttgccaaagaggacaaggttgtgttatctgaacgccaactggggcttctcgggttaaagatgacaggttcagaagcaggtggcaccagtgagaaaaccaaaaggcctcccaaggcaaagccatcgactccgtcagagccaattgttccgattaggaggtcttcgttcagctatacgccatctcggtctttagggcaatcaaggattggttccagcaatttgagccctggtggtgagagactgaccacatcagtgcaaatatcaccttccactccactacaaaagcctatttcttcaccttcaaccccatggtctaggaaaagctcaggcagtgcgaagggcatacagacagaggcgatgttggagcagttcttggctggtttggacgaaaatattgacacaatcacagattcagccagtaagattgcaacacctcccgcaaccattacgagctttggtgctgcaagccctgtatcagtcattacatcaaccaccccttctggtgctgcaagaagcacacctttgagggctgtgaggatgtctcctggctcccatcagaagtacagcacgccaccaaaaaaaggcgagggtgagcttccacctccaatgtcattagagcaggcagtgaatgcctttgaaaatttgggtgtataccctgagattgagcaatggcgagataatctcaggcagtggttctcttctgttttgatgaacccacttgtccaaaagatcaaaactagccatattcaggttaagcaaacaaccgctactgttggggcttcagttactgttagccaggttggaagtgatcttccaagcacaacagcgccggttggcttatctccacttggtgggactaaagattggcaaccgactatcacggttgatgaagatggcattcttaatcaattgcgcactgcacttctgcattcccgtgatacgcctgttgcacaaacctttggcagtccacaacaaccacaacagaatcccctccttccgtctattcaagcatgtattgatgcaattacggagcaccagaggcttaacacactgatgaagggagagctgataaaaggcttgctaccacagagtagtgtccgtgctgattacactgttaagagagttcaagaacttgctgaaggaacatgcttgaagaat

SEQ ID NO: 42180 - DNA, 822 bp, Oryza sativa
  Clone ID: PAT_MRT4530_45456C.1
acttctatggataaggatccgatctaccaattgatctttaattatggcattactcaaatcattttcttttgtgcgcacgacgaaatagagaaaatgagaaaaaagcgttgtttgggagagtccaaatatccatctgttctactctggcgccaagactttccacagccgcttcacaggagctatcccagcttacaatgacattgcaaggtatttccctctctgaggaggaggacctcagattctcgacgctttcacagcaaggtgatctcactgccagggggatataccatgccctattgcctccgtcagaaatggatccagttcacaccttcatctggaagaatgcttcaccgccaaaggttcaattctttgcatggttgctctcaaaggatcgattgccaactgccaaaaacctttttacaaaaacaatcctgcagtcacctctatgtgccatctactagacaggggacgaaacgtcgaatcatctcttcttcatgtgccccttcgcatcagctttttggacgacaatcggagttatacccaatgtggccgaagtgagtaacattcatcttttagcccggccaccaaacataccttcaaaacactacaagaccttctatctactctgcttatggttatggcgtctctggaatcaccgacacgatgtcgtcttccgcgaccttcagccgtcagtccaacggctgatcctgcgctgcaaagaagaattatcactctgggcagagcatcttaaagttaacgacagattagaggctgatgcttggtgtagtatttttttcaaatagtctgtcttctctacatcca

SEQ ID NO: 42181 - DNA, 1704 bp, Oryza sativa
  Clone ID: PAT_MRT4530_45457C.1
atgatgtcaacttccgccatcccgtctgccgcgccatcgaccgaatacgcagagcacttgtccaacctggtcgcaattcccagtttgtcacatgaacatcactactttctcggtccaatcggcaatcccgatcccactaagtttattattgctggaaccaataggatcccttttagattggccaacccaatcctaagtcactggaagaataccttcaagtcttggccttctcttgagaaaacttcccctgagaaaagctggtctgtgtggtataagcgtgtattagccagcaagcaagttcattgggacgaactaggaatcggccatgcccttgctcttacattagcaaattcggctaaggacaaacccttgatggcctctccagcctattgttggtccaacgcccttaatgctttcttgtttaatcaagggccgatgactcccactctgcttgacatcaccatgattactggtctagatgtgaccttatcggctaaccccatgagtttgaataccaagaatcaatttgattttaggaccaacagcataggtggttggtctggctatgtagccgcatatatgggcaaaggatctgccaccccccgagagcacactgcctttctcttcatgtggcttgaaaagtttctgttctgtggatcaagctgcggtcctaccaccaactggcagttcttagccgaagcccttgaaagcaagagacaattccctctaggcaaaatccttctcggctatctgtaccaaatgttgagtaatgcatcggctaagatagccacaggctcagtagttgtgaatcggccgcctctgatagatgctgaattcccaaggctggagcccaccaccaatgatgacagggaagaagttacccatcgccgatgcctgtcgtatggtgaagctacatcaacaccagccgattctggagcaaagctatcggctcaactgctcaaggactggttctgcagtttctatgaaggcttccaaagagatgctcgagtctggtttccatatgaggactcagtaaactttgatctcccatcggacttcagatttgaagacatcaactctgaaaattccaaaaatccagagaagtcttctcggctgccattagtccatgcatccttcctgttggcattcaccaagggagaaacatacaagtatcttaggagaccccctttgggtagtattgataacatagagctggcaaggttcaggagcaggaactttgaaagatggtggggtgaatggaagcaacatatattccatcagctagcctctatgtatatgacagatctattcccagatattgttcctcagacaatagaatcttctcctcctcgcaaaagcaacagtggcagagatatagaatatgtcctaggccttctaccaaatggaggtggactagctcctcctgtcattggctatcatgcccccaggaccacaagtctgcttcaagagcaaatgagagaaccacccgatattcgtaagaagagaaaaaccaaggcatcggctattgatccatcggctctggctcccaagaagaagaccaagaagaataaacccaagccagccgatgacctgcctactttagatccatctattgagcaagcctgggatgaagaagagatcgaagaagatgtttgtcacaccctgaagttctcctcccaagccaaaaatttaatttataaatga

SEQ ID NO: 42182 - DNA, 573 bp, Oryza sativa
  Clone ID: PAT_MRT4530_45458C.1
atgaccggcgccggcgtcgagacatgctgcggcggcggcgggcaggcggcggcggcgtcggcgtccggcccgccgccgcgcgggttgatcgttgtgtcggccgtgttcctgtccatcttcctcgccacgttcctcaccctcatgtcgctcgccttctgctgctgccggagatggagggagcgcgacgcggtctccggctacgtcgacggcgagggcgcggtcgtcgtcgtcgctgctggcgaaagcggcggcggcgagccgttccctgtggaggccctccccccggcctacgcttatgtagttggaagctccgacgacggtggcgcgacggcggcgagcggcgtcgggcgggagtgcgcggtgtgcctgggcgcggtgcgggagggggagatggtgcggcggctgccggcgtgcgagcacgtgtaccacgccgactgcatcgaccggtggctcgccgctcaccggacgtgcccgctgtgccggcgagagcttgacccgggcaagctggcggccggagcaccgccggcgcctgcacagcaacaagttgatccaactgatcagttgccggtttaa

SEQ ID NO: 42183 - DNA, 350 bp, Oryza sativa
  Clone ID: PAT_MRT4530_45459C.1
gtagtctgggcacctctcactgcttagccggagcacatcgcgtcaagcgaaaaacactcgagaccgctgagagcacatcgccgcgaggcacagcttacaatcgtacactacccatctgtcctcaaagagcaactggaaatcccgcgcaaagcgggcaaatccaggctagtatacgacgatctaagtggcggcggtactcacgatcgggaggctgcataacactagggagaccgagcaggaggcccatcggaaaaagagctaacgtcgggaagcaacagattaggcacctgatcgtgcctcatactccgccccgttacacccacaccaaaaacgcacccgtggggtggtga

SEQ ID NO: 42184 - DNA, 372 bp, Oryza sativa
  Clone ID: PAT_MRT4530_4545C.1
atggcgtggaccatggacaccatgattgatgccaccaacgcctacgctaccaccagcgcatcccacgtgtcaatccggaggagctaccaagtaccaacaatcagcagtacgcacatcctggccagaggagcaaggtcgacctcctcggtgtcaatagtggccgacggcaagcagcacatgcacaacagaagggaggcgtcggggcagtgcgcggccgcggactgcgacgaagggcgaactggaaatggctgcaggagaacaaagaccagtggagggcggaacttgttgcttctttcggcaggagaacgaagaacaggactcggcagggctccctatgagtttgagaaagaaatgactgttgatggaaattaa

SEQ ID NO: 42185 - DNA, 416 bp, Oryza sativa
  Clone ID: PAT_MRT4530_45460C.1
aaataaaaaacggccaaatatccactcaaaaagccgctcaagttttgagggggggggaaaaaagggttagaaaatcatcttttttaaagagtttggggctacagaaaactcccccaccagttcattgaacacacaaaacacatggggttagtcattatgggaaaggaccccccggcgcctttgaaacgaaactttcgtctgtttgcagaggggggaatagatttgccccaaaagggaaaaaagcccttttttcaaacaccttttaaaatatttccaccgggcggagcggttttaaaaaaaacatccccccccccttttgttttattagggtttaaccaaaacttatgggggagagccttttctttagcttcaaaaaaaaaaaatggagcaaggatattttgccggcggtcctaaag

SEQ ID NO: 42186 - DNA, 366 bp, Oryza sativa
  Clone ID: PAT_MRT4530_45461C.1
atgcagtgcagcaacaagctcggccggtttaagagtgatgacaagcacgcggtccctgctgcggtttgtgcccagaatgggactgtgagcatggccgggacagatagttttgttggattggatgcacactgccggccggcctgcaccatcgccgtcccgtgtgtcacgggcactctgggaagctggaagagtgttggcaagagaacagtgaggctggttgttgctggctatgatgttaacctgacctattgctactgctcctgctgcacactgtggctctccagtgactctccagttaaagtggtgtacccatccaatgttgctgctgctgttcttgatgtgcctgtcctgaaacatcacaagtga

SEQ ID NO: 42187 - DNA, 210 bp, Oryza sativa
  Clone ID: PAT_MRT4530_45462C.1
gggacgacaccagtccttttggagcgtggcgcagaaagagcaggacggacttgtctgatgctaccgaaggcatgctgtctggattggcgcttccagttgcaaaaagcgcgtaagcagcactgacccatgctcatgcaagacctggatgctcatgtcctacatctacaacatcttacccactgattatgaacacggcggtgtgatgacaac

SEQ ID NO: 42188 - DNA, 464 bp, Oryza sativa
  unsure (1)..(464): unsure at all n locations
  Clone ID: PAT_MRT4530_45463C.1
ttcnttttttttttttttttttcaaacccccccccccactttttaatctcctgcctttttctacaaggggtctttcccccctccccccccccttataacacccccacaatacattgccaccaccatcatatcttcctattcctacatgcataacataaattcccttccatttcttaacaactccacttcataaaaacatctctcatcccactattgcactttttcttctctatatctactttcaccatccattattacaccacacttcctcacattatataccccttcattcatcactccatttatctatcctaatcccctccagaaggaccctatcccttattcttctcttcaacttccatcttctcctttgtcattgtaccaacatcagtgccatccttttcaactttgttgaattcttttttaacccactaatcccctgtgaacacatacctattcttcat

SEQ ID NO: 42189 - DNA, 117 bp, Oryza sativa
  Clone ID: PAT_MRT4530_45464C.1
taaatatttagcatgcctttgaattattggggatagcacttacagcgtattgaaagttatattcactgagacagaaatgatgtcatactacggtagtttcctttcttcttgacgcca

SEQ ID NO: 42190 - DNA, 642 bp, Oryza sativa
  Clone ID: PAT_MRT4530_45465C.1
atggcgaaggcgaaggttagcgtgctggttgctggtgtgacgacgctgatgtgcataatcctgctgattctctcgtactccgcggtgacggcagaggccggacggcaatgggaagggagggagcctacggtggcggcgagggggcgtttcaggaagataatgcgagaggagacgacgctggacgacggcggcgccgccattgtgcgtgaggtatggtgcctcattgtgctcgccatgatcgtcgtcttcgcggcgacgccggcaatggcggcccgcgacggccgccggcttcacccgccggcgccggcggctcgcggcggcggggcgtggaacagggtgagtgtgacggcggagatcgtcggcggcggcggcaagtgggaagtccccggcggacctgacccgcagcaccaccactaatctgatgatataatcgttttcggaggatgtaactcacggtgacgtcgacttagtttggtttggtcggactcagactgcatgagtgaatgaacgaataataaatcggcaatgtttggagaatccatgcatatgctgcaggaataatgcatggagaatctttatgtaatcccttgtggtttcctatgtgctttgtgatcattattttacttcctgggtgatgtcgtt

SEQ ID NO: 42191 - DNA, 242 bp, Oryza sativa
  Clone ID: PAT_MRT4530_45466C.1
ctattctttctcactcggctcttgcaactcgatcctgtctgacatccgacgccgctgccccagccccagctcttcatttcatgacggatgcactcgaagttactgacaaaaggtcacagagcgtaccacacacttcgggacacacattggacgatcataacacacacattagatatctaaaggtccactataatacacaatgcctgagaacagcaacattagcatcagcaactatttccatt

SEQ ID NO: 42192 - DNA, 481 bp, Oryza sativa
  unsure (1)..(481): unsure at all n locations
  Clone ID: PAT_MRT4530_45467C.1
cccacgcgtccgatttggaactgctgtcagaattaccaagtcaataacccatgcttgattattacaagaagtgataccagtgaaagatcaagtacacaaatgcagcaggtaaatcagtggtcataggatcatatcgagccaggaataagaacatttcaagaaaggcatgcattcatatttcttaatttttttttggttcctggctatcataacttttgacatagcttgctccattgaatggtaatctcgtgttagaaagtactccctccttccataagtggaaggagggtgtatagaagcactgtaactatagtttgtcattgctgatgagacaagtatattgcactagaaaagagtactgacctatacatgttccagaaaccattacttccgcgttgcctgctaatcancaccagagctgcgctaagatgtatataaagaacggagagaacaagcaaaagaatctcagtgttagtacatc

SEQ ID NO: 42193 - DNA, 1632 bp, Oryza sativa
  Clone ID: PAT_MRT4530_45468C.1
cccgggctgcagggatggccccgggttcgctcgtctccgctctcgctgcgtcggtatggcggcggcggcgtcggcggcgccgcgcgtcctctccgcggagccgaggaggagggatccggtcgccgtgggagtccccccgtggcggctgtcaccggggagtagggttcgcgccgcctcgcgcgctcgccaggaaaatgttcgtcgtggccagttgatatcgactaatatcaaatcaaggccattgctgtgccctccatgccgttgtgttcagatggcattggccaacacaaggattgcttatcagcctgatgttcagaagcatagtggagttttggcctatgagctggttcaagggagccttgtgcaatggaactcatttatggacaaatcagtacctgatccaccaacagctgttctccttcatggcatccttgggagcaggaaaaactggggatcttttgcaaagaggctggctcaggaatttccgatgtggcagttcctcttggttgatttgcgttgccatggagattcagcgtcaattaagaaaagaggaccgcatactgttgcctcaactgctcttgatgttctaaagctgatagtgcagctcaggctaaccccacgggtgctggttggtcacagctttggtggaaaaggttttcctgtttcctttgtctccccttaccatacatttatggtatgggttcttgatgctactcctggcaaggttcgtgctgggggagatggcgaagatcaccctgctgaacttattgagtccctcagaagaatgcctatgcaggtttcttcaaagcaagaagtggtggatgctctagtcaaagaacaattttctgtggatgttgcacggtgggtggctacaaatctccgacgaagcagtccattagggtcactatcgtcttcaagcttctcatggatttttgacctaaatggcatatctgacatgtacaagtcctatgaagagactaacttatgggggattgtagagaatgtaccaaggggtgttcatattaatttccttaaagctgaaagaagtttgcatagatgggctcttgatgatctccagagaattcatactgctgaggaactggctgcagatgagggtggaggagttgaaatgcacgtgcttgaagatgctggacattgggttcatgcagataaccctgatgggctatttagaattctctcatcaaccttccgcatcgaggctaccataagagggatgcagaattgaggtgcagaagccccaaaacagcttctgcactatgcagtactactgtacgtgcgtagggtagacaatacattacatgaagagagaagacacatgaaaggcatcaacccaaacttgtattcagttttgtagaatatgaagagctgaaaaaacttcagcgagggatcaagctaactgccaacattgttgtgtgtgggtcatttgttcattcatttgattcttcgatcttgtatgtaacatgacagtcggctgcagttcttggaggaaaaacctgtaattatgttctcatgcaatgaacagatgtgtaggtgttacagattttggtttcagtcttcacttgagatatcaaatatgctattttcctaaaaaaaaaaaaaaaaaaaaaaaaa

SEQ ID NO: 42194 - DNA, 669 bp, Oryza sativa
  Clone ID: PAT_MRT4530_45469C.1
atggcagcagcggcggcgtggtgttctctgtcaaggggggtccggcgggcggcgctcgagctgcggcagtggtcggagaggggggcggcgtcgctggcgccagatgaggacgagctcgaggccgtggaacggcagctcgatgttggtcccacatccgtccggagccccgtcaagcgcaaggccaagctgccggagagctacgagatgctctgcgagttcttcaattgcttcgagagttccacccagttgcttcgtatgaagggatccaaggcatccttccccaacatttgtgctaccacccagcatttgtctgaacgtaagccacaatcaattgatgttgcactcttgtggcctggaagatttgtcttatgtgattttcctggatggcatgagtgtttggaaattctggaggttcactctagagaggtttcattggcaagtgatgccagtctggaagacgttgcttctttgactgaaagatttacaggtgcggatccatcacttgccagtcttgtccatatgccagtagttttctctaaaaaccagttactacattttacctggttggtttacaattcatcagtacgcactgtgagacaacctctgaagaatttgaaggacagttcctatacaatccgcatgtttatccctgctcacgtataccaatga

SEQ ID NO: 42195 - DNA, 381 bp, Oryza sativa
  unsure (1)..(381): unsure at all n locations
  Clone ID: PAT_MRT4530_4546C.1
cgcgtttgaacctgatactctccctgcgattcctgccatcttcaggtcaagcaaaccccttaccgccacacggcagcttgttgttttgctgttttatgatcggttccaattagcgcctatcctctttctttttcgtgatgagccaattaggatttttatccccaaatcgaaaccaagttaagtaggagtacatagattagattagagagtggagttaggtattttcgcgtcacgacgatgaccggcgacagttggncgtcgttgaggagattgaattcttaaccagtggattacgtgaggaanccggnctctcctccgccgcgaggaggaggagacgacagggtcagccggtggccaccggagctccatcggctgacccac

SEQ ID NO: 42196 - DNA, 1338 bp, Oryza sativa
  Clone ID: PAT_MRT4530_45470C.1
agggcgatttttaaaaatctcgccgtccgccgaggaggaggaggcgaccaagtgcccgcagtcggtcatgcactccgccgacgagttccatgggaggggccgcatggtggagttgtcgtgcgggctgacgctgggggtgaccctaagatcgcggtgctgagcaagggggagcaaccgatcatggtgtcgcagttcatgatggagcttcgggggctaaagaccgtcgacggcgaggacccgccgcgcatcctccacttcaacccacgcctccgcggcgactggagcggcaagccggtgattgagcagaacacctgctaccgaatgcagtggggcaccccgctccgctgtgagggctggaagtccaactctgatgaggagaccgtggatgggttcgtgaagtgtgagaactggattctgaacgcggatgaacggtccaaggaatcgacgacaacctggctgaaccggctgatcggacagaagaaggagatgaattttgattggccttatccttttgtggagggccgattgtttgttcttactatcagcgctgggttggaggggtaccatgtgaacgtcgacgggcgacatgtgacttcttttccataccgtcctgggtttgttcttgaggatgccacaggtttatcattgagtggggaccttgatgtgcaatcagtgtttgcagggtccttacccactacacacccaagctttaccacagagttacctggatatgtcaactgtttggcagtcctctcctctgcctaatgaacctgttgacattttcattggcatcttgtcatctggcaatcattttgctgagcgcatgggtgtgaggaagacatggatgtctgctgtccgaaactcaccaaatgtggtagctcgtttctttgttgcactgcatggccgaaaagaagtgaatgtggagttgaaaaaggaagcagaattttttggggacattgttttgtgccgttcctggacaactatgattcagttgttttgaagactcttgcaatatgtgaatatggggttcatgttgtctctgctaggtatgtaatgaagtgcgatgatgatacttttgtcagacttgattcaataataactgaagtcaacaaggtacaaagtggcagaggcctctacataggaaatatcaacttccatcacaggtcgctacgtcatgggaaatgggctgtaacttatgaggagtggccggaggaggtctatccaccctatgcaaatggtcctggatatgttatatcttctgatattgctggtgccattgtgtcagaattcagagaccgaaaactgagggttctatcttgtgactctgtgagctctgaa

SEQ ID NO: 42197 - DNA, 2034 bp, Oryza sativa
  Clone ID: PAT_MRT4530_45471C.1
atgcggaggccttcgtcggcgtcggcgtcggcggcggcgggggcgtcgtgccgccggcgcgcgatcgaggtgctcgccgcggtgctcgtcctgtacgcggtgctcgtgttcgtcctcgagtcgccgctcgtgtcgacgtctctgtcgggtggtgggggaggtggagggggaggtggtggtggcgcgaggtatctgcggctggccgggggcggggtgcgggcggccccggcgcgcccggcgaaggagccccgcctggcggcgtccgcgtcggtctcggggccctccgcacgagggcggcgcctctcggggatggtctctggtctcgacctcggcctcctcaactcgtcccgcgccggcccgctccgccgcccgattgccggcgccgtcgagacgggcgcccgcgtgttcgcggaactcgaggacctcgacaccgccgccttcgagtcgccgtccgccgagggggaggcggaggcggccaagtgcccgcagtcggtcatgcgctccgccgacgagttccatgggaggggccgcgtggtggagctcccgtgcgggctgacgctggggtcccacatcaccgtggtcgcgacgccacggccggcgcacgccgagggtgaccctaagatcgccgtgctgaaggagggggagcagccgatcatggtgtcgcagttcatgatggagcttcaggggctaaagaccgtcgacggcgaggacccgccgcgcatcctccacttcaacccacgcctccgcggcgactggagcggcaagccggtgattgagcagaacacctgctaccgaatgcagtggggcaccccgctccgctgtgagggctggaagtccaactctgatgaggagaccggttggggacccctgcaattccattttgattatgttagttcagtggatgggttcgtgaagtgtgagaactggattctgaacgcggatgaacggtccaaggaatcgacgacaacctggctgaaccggctgatcggacagaagaaggagatgaattttgattggccttatccttttgtggagggccgattgtttgttcttactatcagcgctgggttggaggggtaccatgtgaacgtcgacgggcgacatgtgacttcttttccataccgtcctggatttgttcttgaggatgctacaggtttagcattgagtggggaccttgatgtgcaatcagtgtttgcggggtctttacccacaacacacccaagcttttcaccacagagttacctggatatgtcaactgtttggcagtcgtctcctctgcctaacgaacctgttgacattttcattggcatcctgtcatctggcaatcattttgctgagcgtatgggtgtgaggaagacatggatgtctgctgtcagaaactcaccaaatgtggtagctcgtttctttgttgcactgcatggcagaaaggaagtgaatgtggagttgaaaaaggaagcagaattttttggggacatcgtttttgtgccgttcctggacaactatgatttagttgttttgaagactcttgcaatatgtgaatatggggttcatgttgtctctgctaggtatgtaatgaagtgcgatgatgatacttttgtcagacttgattcaataataactgaagtcaacaaggtacaaagtggcagaagcttctacatagggaatatcaacatccatcacaggccgctacgccatgggaaatgggctgtaacttatgaggagtggccggaggaggtctatccaccctatgcaaatggtcctggatatgttatatcttctgatattgctggtgccatcgtgtcggaattcagagaccaaaaactgaggctcttcaaaatggaagatgtgagcatgggtttgtgggttgagcagttcaacagaacaaggcctgttgaatttgttcacagtaccaagttttgtcagtttggatgcgtagatgattattatactgcacattatcaatcaccaaggctgatgttatgtctgtggcagaagttgctagatggaaaaccacaatgttgcaatatgagatga

SEQ ID NO: 42198 - DNA, 608 bp, Oryza sativa
  Clone ID: PAT_MRT4530_45472C.1
ctcgactagcttggtggcgatccagacgatctgggtgaagcggacgcacttctggcccgggttgcagctctggccgcgccagacgtacacggaggactcgccggcccagttcttgacggcgtgcgtggcgcgccagtcctacccggtcccccagaacacgttgtccccggacggcgactccggcgagtgcctcatcacgcaatcgaaccgactctccggcgaccactgtcgagcgtacctggacagcttgttgctatacttgagctgctggcgcccgaactgggcgcgcaccttgatgcgagcatccaggaactggagcgccatgtacttgaacgccccgagcccgacggtgaactactgccccgccctgaccgggggcggcgcctgcggaccgtccttctgatcatggccgtcctcctgctcggccttatcggacaggttgatgttattgttgtcatcatagaacagcttctgattctggttctggtgctggacctgggtctgaatctgtgtgccgatgccgattgcgccgccgtttcgctcttcgacgttgacacgaaatgacgcaaccgggcgtatcaacaagatgaggtacaccaggatcagca

SEQ ID NO: 42199 - DNA, 410 bp, Oryza sativa
  Clone ID: PAT_MRT4530_45473C.1
ggggaaaaaggtaccaatttttttccccttttttggcggggtggccgccctgccttacttttggcatcacaactcacaaattacctatttttacacccccattcccgcacagcgcaaaatccattacaaacccgacccaccccattgccctcaccaaaaattcgttttttttctttcaccacaaggagacagcactggacatccaaaccggaatttgaaatttggttttccacccggcacgaaagggaacccttgaaaagaagaagaagaagaatttatcggcccccaaaccttttttggtggaggcccactcggccaggtccctatgtacaacgttttttaaggaggacttgtaggggaaccactcaacgcacttggcgatcctcctcctgagggaaaactggatctcc

SEQ ID NO: 42200 - DNA, 134 bp, Oryza sativa
  Clone ID: PAT_MRT4530_45474C.1
ctcatgtgttccttgtgtactttacgtagcactaggatatagttagattaataatctatacgaggggtggggcggtgcggattgagcagtcagctacgttcgccgatgtccgtatcacatagctacaagaccag

SEQ ID NO: 42201 - DNA, 495 bp, Oryza sativa
  Clone ID: PAT_MRT4530_45475C.1
gaggagaggaaaaccctagcacccacacggcatctctctgactctctcactcgatcctctttcacgttgccgccaccagccgttgcacggcaccacagtgcttcacgctgccaccgccagccgtcgcgcggggaagactacgcggtggcgttcggggtctcctgccacggcgccgtcgaacccggccttctccgcggcggatggcgtcgcctccaaggacctccccaccccgccgccgcaccccaactcctccctctccgtccgcatcttcctccccaccccgccgccgcacccgcacagcctagggctccgcccgagccgcgccatcgtcgtcgcctggcgggaggggaagacgacgcgatggcgttcggggtctcctgccgctcggccttctccacagtgtcatctgaaaggacctccacatcgaccccaactccaaccttctcatctgccaactggatggtttggatgggttggctcgcgagcctaacgagc

SEQ ID NO: 42202 - DNA, 106 bp, Oryza sativa
  Clone ID: PAT_MRT4530_45476C.1
cctcgtgccggttgttgtaaaattgtgtgaactaactgatgattatactttgtacctctgggcaccatttactgtatttatcaattctgagggaaattaccttatc

SEQ ID NO: 42203 - DNA, 205 bp, Oryza sativa
  unsure (1)..(205): unsure at all n locations
  Clone ID: PAT_MRT4530_45477C.1
agaacatgctggccaacgacgacgntgccgnccggttcttcaaccacctcggcgactgttggngcgtncaaccacgtcagncacgtcttcgtcgggctctacaaggangtggaccgctactgngggacatggtggcggaggaagacggcggngctccggcgngactacttcgccagnccgtggtcggccatctccttcgtcgtcg

SEQ ID NO: 42204 - DNA, 125 bp, Oryza sativa
  Clone ID: PAT_MRT4530_45478C.1
tgtcgcgcgcgcttgaccccgagtcagcgtgcggtcccgactccgactccgcgggcgcggttgcgcgctgttggttggagtacgccgcggcgaacgacggggagagtggtggactggactggtag

SEQ ID NO: 42205 - DNA, 511 bp, Oryza sativa
  Clone ID: PAT_MRT4530_45479C.1
gaacacatcacagcccaagcagagcattaggtgatcgagcactcgagcagctagcttagcttagcattggcggcgagcagcagcgtcggcgccgtccaccgcgcggtcctagtcgtggggctcctcctgctcgccgtcggcgccgtcgcgtgccacgaccgcgagggccgtccccggcgagcgcggagccggagacataccggccgtagaacgagtacggattcagcggcttctaccctggccccaacatcaactgggtgttacccggtcccaacggcgtcacgccggatgtcggcttcaacggtatgccagcctcctcctcctccgtcttccccggcgccgttggagcctcgccgttcacgcccggcggcggcggcatcggctttcatggcgccaccaacaagccgagatgcatagggcatcatgaggcttgttggcccgaccctcctatgtaaatacgaatgacgaatgcgtgcttagctagctaggactatctatggtcgtgcgtatg

SEQ ID NO: 42206 - DNA, 3711 bp, Oryza sativa
  Clone ID: PAT_MRT4530_4547C.1
atgtccgacagccaaacacagtacgccaaaccacagagcgccggatactccaacaggaaaacaatgggcataagagacgcgaagcggataacgcaggtgggcaatttcatgcactacatcagccggttcctggccggcttcgccatcggcttctcgcaggtgtggcagatcagcctcgtcaccctcgccatcgtcccgctcatcgccatcgccggcggcatctacgcctacgtcaccatcggcctcatggcgcgcgtccgcaagtcctacgtcaaggccggcgagatcgccgaggaggtgatcggcaacgtgcggacggtgcaggcgttcgtcggcgaggagaaggcagtgaggacgtaccgggaggcgctgctgaggacgtacaagtacggcaagaggggcggcctcgccaagggtctcggcctcggctccatgcactcggtgctcttcctctcctgggcgctgctcatctggttcaccagcgtcgtcgtccacaagaacatctccaacggcggcgagtccttcaccaccatgctcaacgtcgtcatcgccggcctgtcgctcgggcaggcggcgcccaacatatcgacgttcctccgggcgaggacagcggcgtacccgatcttccagatgatcgagaggaacaccgtcaacaaggcgagctccaaggccggccgcacgctgccgtcggtcgacggccacatccagttccgcgacgtgcggttcgcgtacccgtcacggccggacgtcgtcatcctcgacaggttcagcctggacttcccggcgggcaagatcgtcgcgctcgtcggcgggagtggctccggcaagagcaccgtggtctcgctcatcgagcggttctacgagcctctcacgggcgcggtactgctcgacggccacgacatcaaggacctcgacgtgaagtggctgcgccagcagattggcctcgtcaaccaggaacccgcgctgttcgccacgagcatccgggagaacatactctacggcaagggggacgccagcatggatgagatcaaccacgcggcgaagctgtcggaggcgatcaccttcatcaaccacctccccgaccggtacgagacgcaggtcggcgagcgcgggatacagctctccggcggacagaagcagcggatcgcgatctcgagggcgatactgaagaacccgtcgatactgctcctcgacgaggcgacgagcgcgctcgacgccgagtccgagaagagcgtgcaggaggcgctggaccgcgtcatggtcggccgcaccaccgtggtgatcgcgcaccggctgtccaccatccggaacgccgacacgatcgccgtcgtggacagcggcaggatcgtcgagaccggcacgcacgagcagctgatggcgaaccctcgcagcgcctacgcctcgctgatccagctgcaggaagcagctcagctccagaacaagcaatctttctccgacagcgccagcctcagccgaccactaagctccaagtattcgagggagctatcgaggacgagcatgggtgggagcttccgctcagagaaggactcggttagccggtacggcaccgtggaggcgcacgacgaaggagggcacaagagcaagccggtgtcgatgaagaagctctactccatgatacggccggactggttcttcggcgtgtcgggcaccgtcagcgccttcgtcgccggctcgcagatgccgctgttcgcgctcggcgtcacacaggcgctcgtgtcctactacatggggtgggagaccacgaagcgggaggtgcgcaagatcgcggtgctcttctgctgcggggccgtgctcaccgtggtgttccacgcgatcgagcacctcagcttcggcatcatgggggagcggctcacgctgcgcgtccgggagaggatgttcgcggccatcctccggaacgagatcgggtggttcgacgacaccagccacacgagctcgatgctgtcgtcgcggctcgagacggacgccacgctcgtgcgcaccatcgtcgtcgaccgctccaccatcctgctgcagaacatcggcatgatcgtgacgtcgctcatcatcgccttcatcatcaactggcggatcactctcgtcgttctcgccacataccccctcatggtcagcggccacatcagcgagaaaatgttcatgaaaggctacgggggcaaccttggcaagtcgtatctgaaagccaacatgctggccgcggaggcagtgagcaacatccgaacggtggcggccttctgcgctgaggagaaggtgataaagctctacgccgacgagctgaaggagccagcgaagcagtcattccggcgaggccagggcgccgggctcttctacggagtttcccagttcttcctcttctcttcctacgcgttggctttatggtatggttcggagctgatgagcaaggagatggccagcttcaagtcggtgatgaagtcattcatggtgctgatcgtgacggcgctggccatgggggagacgctggcgatggcgccggacatcatcaaggggaaccagatggtgtcgtcggtgttcgagatcctggacaggaagaccgacgtcctgatcgacgccggcaacgacgtcaagagagtcgagggcgtgatcgagctgaggggcgtcgagttccggtacccggcgcggcccgaggtggtggtgttcaagggcctcgacctcctcatgaaggccggcaagagcatggcgctcgtcggcatgagcggctccggcaagagcaccgtgctctcgctcatcctccgcttctacgaccccatcgccgggaaagtcttgatcgacgggaaggacatcaggaaggtgaagctcaagtcgctgaggaagcacatcggcctggtgcagcaagagccggcgctgttcgcgacgaccatctacgacaacatcctctacgggaaagacggcgcgacggaggcggaggtggtcgacgcggcgaagctggcgaacgcgcactccttcatcagcgcgctgccggagggctaccggacgagagtcggggagcgcggcgtgcagctctccggcgggcagcggcagcggatcgccatcgcgcgcgccatcgtgaaggacccggccatcctgctcctggacgaggcgacgagcgcgctggacgtggagtcggagcgcgtcgtgcagcaggcgctggaccgggtgatgaggaaccggaccaccgtgatggtggcgcaccggctgtcgacgatcaagaacgccgacgtcatctcggtgctgcaggacggcaagatcatcgagcagggtgctcaccaccagctcatcgagaacaggaacggcgcctaccacaagctcgtcagcttgcagcagcagcaacagcagcaggaccagatgcagaggcattgatcttgatcgatctcctgtgcttctgtatatttgctgtgtgccttcgcttcttcttggttgttaaggagtacagtacatggaatgaaacaaatcgctgcggtacgattcaattatttttccattgtaaaacgaggggttctcgattatgtacaagagaaagtattggatttgtttctctttttctgtacaagttaaataactgaatttagtagatacgcgattacatttacataaaaaaaaaaaaagctaacgctctcctcgtcccctctcctgctgcccgaaaaaaaaaaaaaaaaaaaaaaaaatagactagttctctcgtctctcctgcagcccggg

SEQ ID NO: 42207 - DNA, 303 bp, Oryza sativa
  Clone ID: PAT_MRT4530_45480C.1
agtcgacctctgcggaccacccacggtgccatgggggccgaagatgagtacaagatagggggaaatgtggctggaagccaaggacatctggcatgtctccggccagggtcgccgctctaatgacaacggtggatcctgcagctacagcgtgatgccgccaggctgcctagcaaccatgaactcctggtggagcgaccccattttacacgacggtaggggctggaggtcatgcatagggatcacctgctgcaaggcaaacgcctgatggaccaggacatgccttatccactgcaccgacatgaa

SEQ ID NO: 42208 - DNA, 784 bp, Oryza sativa
  Clone ID: PAT_MRT4530_45481C.1
ctagtggatcccgggctgcaggcgcatggcggcgtccacggcatccgccccgttcacgccgctcctccaccggcggcgagcgagcgtccacggccggcgcgggagcgggagggcgttcgtcgccgtcgtcgtcgcggcggcggcggggggcgcgccggagacggagccgtccccggctacggcggccggggcggcggcgcaggggaagaagaagacggtggacacgaggatacactggtcggacccggacgaagggtgggtcggcgggaacgccaagaaggacggcggcggcggccggaagaaggagccgctcggtgggaggttcgccgacctcatcaacaacccatccgagtctcactaccagttcttgggggtggaaccgaaggcggacatcgaggagataaaggcggcgtaccggcggctgtccaaggagtaccacccggacacgacgtcgctgccgctgcgggaggcgtcggagcggttcatccggctgcgggaggcgtacaacgtgctgagccgggaggagtcgcggcggttctacgactggacgctggcgcaggaggccgagagccggcgcctccagcagctgcggtccaggctcgaggacccctaccagcaggacctcgacagctaccagtccgtccccgacatggtcgaccgcctcggcggccgcaacatggacctcagcgaccaggccatgaccgcgctcaccatcgacatcggcatcatcatcttctgcgtcttctgcctcatctacgccgtcttcttcaaggagcagtactag

SEQ ID NO: 42209 - DNA, 227 bp, Oryza sativa
  Clone ID: PAT_MRT4530_45482C.1
aggtgctaaggcatagaactatcaagtatgtcaagattctctggacgcaccagacagagcgagaagcaacctgggaacttgagtcacagatgcggaagaagtatccggagttgttcacacttggattgggccaaaacatagcacaggttattgggggcccattaagcaacctcccggccgaaggagaggccgagagcaatgtttttgggttcggccgaacccactag

SEQ ID NO: 42210 - DNA, 309 bp, Oryza sativa
  Clone ID: PAT_MRT4530_45483C.1
aattaggggggggggtacccttaaacaggcttgtgtgggtagccacgagaaaggcgaaccaggaaacgaaagaaaaccaacgaccaaaaggggacggaggattaaaactcggcataaaaaaagaaaaaacgggaatcagcgcgaaacccatataagcccaaaatgccaaaaaagaaacgaacaacaagcagaaaaaaaaaagccgcgggggccaaatgagaaaacaaaacgacaaaaaccgcgaaggccgaaggcggaggtaaaaaaaaggaaaacccaaaaaaacaaacagcataatgaaagagacaa

SEQ ID NO: 42211 - DNA, 430 bp, Oryza sativa
  Clone ID: PAT_MRT4530_45484C.1
atggcgctgacagtctggtcccgcatgtggctcctcttgctcagatgcacctgcgaccagcggcagaggaagcaggcacggtggctgtcggcggagctcaatggaggagagagtggcagcgactggcaagcccgtccgcgggagacagcgcggcggtgggagcaaaaggagaagaggagggagatgagggagtcggcgagctctagctcaccgacagtccatgggaaggtggcggaagcgctccacatcgagtcagcaacggtagctcagcccgcttcctgtggggcgctccgcccctgcccgacagctcgacggaggcggcgagctgatgaggttgaaggtgaaaggggaagagccaacctggatgacgagctcctcctcctattcggaagctgaggaagtccctcctcgccttgagctgcttcctcat

SEQ ID NO: 42212 - DNA, 2144 bp, Oryza sativa
  Clone ID: PAT_MRT4530_45485C.1
tctttcttgagttaaatctgaatcgtcattcatgtctttagttacgttactttcatgcgacggcggcccgcggcgcacgggaggcgcgcgggcagcagcggcagtggccgggcgtgcgacagtggccgcggcggcggcccactgcgcacgggaggggcgggcggcgaggacggcggcggcggggctcgcggtggccatctcccgagctcctggcgcgggtggacgcaaaggcggtggccgaccggagcggcgccggcgtcgaggcgcatggcggcggatccggcgtcaccaccaccggatctggcgcgctcgcagctggatccggtcgcggaggcgcgggcacggcgtcggcgaggcgtgggcgctggcggccgcgacaggcggtggcaaacgcgacggtggcgcaggcacgggcggccgggcggcggcgtcaggcgtgacggcggagcaggcgcgggcggccgcggtaggctcggaggcgcagctactgtggccggcggctcgatgcctggcggcgacggcagcgatgcccccagatccacgcctctcggctggatctggaggatgggagcagtcggcgacggcggcgacggtgtggcgacggcggcggcggcaattggccgacggcagttggcgacggcggtggcagctgtggtggctcccgcgggcgtcgcggaggccggcgcactccgggcagcagtgctcatcgaggaggagggccacgagcctcaggttgccggcggcggcggcgacgtggatggggtactcgccgtcgccgtccgggcggaagggtaaggaggggtcggcctcgaggagaagctgggtgggtgtccggcggccgtggctcgacggcgagcggagacagcggcggaggaggcgatggcggcggcggcggcggtggggcggtgtcgatgaggtggtgcgccgacgccatgaggctggtgaagcggatgcagcgggagcttctggtcatgttcaagaaggccgacgtgccggtgggcagcgccgtctcctacggcggcggcggcggaggcggcgacggcggcgggtgctggttcgagcactacatgcaggagacggcggcgctgctcgacttctgcaacgcgttcaagtccgccgtgtcgcggctgcaccgctactgcatggtcgtcgacttcgccgcgcaggtcggctgcgccggcgccggcgccgccgcggagaacggcggcggcgccggcggctggtggctggaggaggagccgggcggcgacgacgcgggcgccatccgccacaggctgtccgacgtgagggcggcggtgagcgaggcggagcggctagggaggaagatcatgtctagctccagcggcggcggcggcgccggggacgacgacgccggcggcatggtggtcgtcatgctcgtcgccaagatcaccatggccgtcgtgtcgatgttcgtgctccaggccctcacctcacccatcgtccccctcgccgccgacgtcgacgacggccactgcacccttggccgcgccgccgccgtcccggtccccgagctccagccatggcgagaatccctctccgtgatcaccgaccggttcccgaggcggccgggcgtcgccgagcacgagagggtggccatggtggtgaagtccatgatgatcaacaccaagatggaaggagaagaagagaccaaaaatggcaaacaagaacaagaagatgaccatgttgagcttctaagaacaagatcaggtgagctcagggaaggtgtggagatgtttgattgtgttttggatgaagtgtttgatgaggtgatcaagggcaggaatgagatgcttggcatcttcagagataaggccctcacactgggctgaatttttagatgttagctaatctctgaaaagttaattgaccttgagcaatctggaaaccagcagggtatgtatgtaacctggggtggatgctaatttgactgatcaatttgagttgttttgttgagggtttagagcttcttgcaatgtgtgagtatgtgtttatgaaggtgtttaattatatttggtttccttttatactttaatttctcctttggtttgtaacttgtttcagtgtgacatactgatcaataaagcatctgaagtttagatttgttttataaaaaaaaaaaaaaa

SEQ ID NO: 42213 - DNA, 1443 bp, Oryza sativa
  Clone ID: PAT_MRT4530_45486C.1
atgtgggccgcctcaccggccttccgcaggcgcctcttcctcctccgttccctttccccctccccctgcgccgccctccccggcaacgccgcctgctcctcctccccctcgccgtcgacctccattcgggtcaacgcgatgtcggcatcgggccccgtgtacgaggcggacgctgaggcggtggacagtgttttgcataagggtgttttgatcggcgacgagtttggtgatacgttcgcagtgttcgttgtttctccgtatgatttgaagttcctcgatttctgccttgaaagttgtcagtatcatctaaatgtatcattccataaattacgcaacagtacaaatagttcacatgatgttattcagggtgcagatctctcacatgttttctgcacaagagatgctgcaacggacttgatattttttagtgatctgcaggatggccttttccttataaccaataaccttagtcttgttgagggtaacttgcttgccatcctaacaccaaatgtatacgagtacaaacgtcttgtccagaaggttcttaactgtgaagtaaatgaggaaaacgcttctgaacaacttactgcactatgccaaaaaatcggtggcataaccatcatgcggaaaggaaaagcagatataatcagtgatggcaaaactgtaacacaagtaagtacctttggttccccaaggagtctcctgagtaaagagtacactacagaaaaaagcgtgaatccgatgatgcttgggtgcattgctggctctctactacttaggaaagctgcatcacatgcttttgagaagaacaagagatcaactgtcaccactgacatcattgagttactgggcaaaagcttggaagatatatgccctgctggtcattagtttagatctttaccatcattggtggtacggcgccttagcacctgtaataatggtaatccatatgttcggataccagtctctccctgcttaatgtacatgtttcttgactgaaaagatggtgttacaatgcttggttttgtttagcctccgttttgctcagaagaattctacagaatgaataatgaattgccccataaatggggctttgattttgtaaaaaaatagcccaaatttgctggagtatggattaggcccgtttgagctccggggtggtgatccccgcaaggatcaaagtgcagctgcaagaagaaaaggaatggaggggaaactgtaccaaacagaattctggcacagctcacatgtctcatgatatgcctatgcaaattccagttgtgtacagttttgagcacacgtcattggagccaaaggttcttcactccttcactgtcttgtcgcatctacactgaaggaagctgtttgcgtaacgctgtattctgagattcgaaattgtttctcaacaagtcaagcagagctgtgtgcctgtgacaattgtgt

SEQ ID NO: 42214 - DNA, 452 bp, Oryza sativa
  Clone ID: PAT_MRT4530_45487C.1
tctttttgttcttgcatccttgacattggaaaaaatagattcggttttcacaagctctttgtttctctctctctttttttcttgtgttaatttcgatttgtaagcttgtaatgataagtagtacttgtttgcataaacttattggagttgggttattgtactttccccaaagagaggagtacatctaagatttggttaattgttgcactcccttaaggggcatgaacttgtatgcctgaaatgtgcttcctttcttttgctagtacttgtccaagattcaacctcaagtgtactctccttcttgaggaataaagttaatgatgtactacaataccatgtttagtttcaaacctgaagtgtatgattcatctggtcaaactcctgctttgaccagtttttgccctttagtgttcattcatgccaaagccccaaatcttttttattgggtattt

SEQ ID NO: 42215 - DNA, 2508 bp, Oryza sativa
  Clone ID: PAT_MRT4530_45488C.1
atggctagctcgtcttcttccacctcctccaatccagtctttggcttcaccatcacggagaagcagaccaaactgaaccatgcagtctgggcagcacagatgctcgcggccatccgcggcgcacgccttgaggggcacatcgacagcaagaccgcggccccaagcgctgaagtcaatcaggagcaggcggacaagacggtgaagaaggtcccaaatccggtgtatgaagaatggtatgctgcggatcaacagctcctcggctacctcttctcctctctatcacgagagatcctcaaccaactcgctgattcaaggacggaggcacaggcatggcgtgcgattgggaagctgttctgctcccagacgcgcgggcgctccctcaacaaccgcctcgctctccaaacaaccctaaaaggtaccatgtccattactgaatattttgggaatatgaaggcgctctctgatgacatagctgcaacgggaaagcctctagatgaggaagatttgattgcttatattctaaacagcctagatggtgattatgattctgttgtttctgcaatcggcatgaaatctgaactaatctctgttatggaagtatactctcagctgttaaattttgagaacatacttcagctcagacaggaagggatcactgctgcccatgcagcaagtcgcggccgcggtgggtttatcccacgcagcggcggcaatggtggtggcagcgccgcagtggcggctctaggcgtggtcgtggtgcaccgccagccaacattggtggccgtggccgtggcaatatgccgcgcagccgcggacagcagcagcaacgcacagaccctcagccgatatgccaagcatgtagctgctgctgcccaagcttcctcctacgccattgacacaaattggtacattgactccgaagcaaccgatcacatcacgagtgagcttgacaagcttgcagtccgggagaaatacaaggggcctgaacagatccacaccgcaaatggtgcagcagaaaatggaggagatttggatgtctcagttacacacgatggggtccacacaacacatggtgacgccctctcggaagacctgggatccatgccacaggagtctctaggatccgtttcacaggcgccgttgcatcacgtgtccggctctccgcctaccatgccgacccctgcgccctcagctccctccccgagacaatcgccgaaccagcctgatgaagcttttgctactaaccactggagggaggctatggatgcagagtatcaggccctcatgaaaaatcaaacatggcacttggtaccaccgcagcaggggagaaatattattgactgcaagtgggtatacaaagtcaagagaaaagctgatggtagcctggacagatacaaggccaggttagttgcaaaaggcttcaagcaaaggtatggaatagactacgaggacacgtttagtcctgtagttaaggctactacaattagaactatcctttccattacggtgtctagaggttggagccttcgtcaactagatgtgcaaaatgctttccttcatgggattttagaagaagaggctccacgagcttggtattctaggctaagcacaaagctacaagcacttggttttaaaccatcaaaggtagacacgtcactattcttctatagtaagggcgatgtcactgtctttgttcttatttatgttgatgatataatagttgctagctccactccaagtgccacctcagcattattgcgggatttaactaaggagtttgctttaaaggacttgagagagctccattactttctgggcatagaggtgaccagaacagaagatggaattctgttgacccaagctaaatatgcatatgatgtcctcaggcgtgtggggatgcaagactgtaaaccggtaaatactcctttgcttacgtcagaaaaattatctgtaaatgaaggggatttgcttggtccaaaggatgccactgaatataggagtattgtgggagcactacagtatttaaccttgacaaggctagatatttctttctctgttaataaggtgtgtcaatgtcctactactgtgcattgggctgcagtaaagagaattttgagatacctcaaacatacagtaagttgtggactaaagattaataagtcaccaactcttcttgttagtagtttctctgatgcagattgggcaagctgtctagctgacagacgttcaactggtggatttactgtttttctaggctctaaccttgtgtcatggagtgctagaaagcaagccacagtatccaggtcaagtactgaagcagaatgcaaggcactagctgatgcaacaacagagattatgtgggtacagactctcctatgtgagattggaataaatgctcctaaggttgtgaaaatgtggtttgacaacataggagctaagtatttatcagctaatcctgtttttcatgctcgtactaaacatatagaagttgattatcattttgtttga

SEQ ID NO: 42216 - DNA, 677 bp, Oryza sativa
  Clone ID: PAT_MRT4530_45489C.1
atgctggtgttggagtcggaggtggcgccggagtcaaatccggcacccgagacaggggcaattcggtccgtacaaaaatacggtcctcatcggtctaagctcaagcctcatccaaacatgccatatgatgggaccttgaagatgtgttcggtggtgggtgttggaacccatcacccaaatacggaatacaaaatggttacaaaaggaacgatggaactcgatgaaaccggcgagatcgtaatcgagttggtccgactagatcctccggcgacttggctcctgcaggttccgacttcgtaggctctggtggttgtgttggctatgaaattcgatccttaggtcctcccaggggtcccttttatatcgcaggtcaggcggtttccaagtaggactcggagacatcggaccctgcaccatacattgacgacccagtcctgtccgagtgggactctttccatctacaaactccgtgaaggatttccttaatgtatacagagaacgtccatatacgcgcaggcatgccatatcgatacgtgacgtatatcgaagggtaaagggtatgcctttgtaattactatatatatttttcataaaaaaattttatagatacatttttagtatttttggaagataattctaatagtttcttctataaatataagactagaacccgtaat

SEQ ID NO: 42217 - DNA, 311 bp, Oryza sativa
  Clone ID: PAT_MRT4530_4548C.1
aaaaagaaaaagcattttttttggcttttaagggtccaaaaccaaacacccacatttaattttaaaaaagagacaaaagagcccccgggggggttaagcccaccttggggtcccaggaatgagacccgcttatacaaactaaatcccactcgcttggaacccccctaaagggtagggggccccctttgcccctcctttttttggtgatggagcttaagttgcccccttttattgacaactttgggggtttaaccccccggacataaaacttttacggcccctgccaaccagggggccccctaagttccttt

SEQ ID NO: 42218 - DNA, 641 bp, Oryza sativa
  unsure (1)..(641): unsure at all n locations
  Clone ID: PAT_MRT4530_45490C.1
gccgcagcagcgcagaggcggcggagcagcagcgcctccccggagttccgcttctggcccctcgacgccgaccccgccgcatccccctcctgcgccgacgagctcttctccggcggcgtcctcctccccctccaacccctcccctacccccgccgcgacgccgacctctccatgtccctcgccgggggggatgatgatgatgatgaggacgaggaggaggaggaggtgcagcctggtgcggccgtcgcgtccagggcgccgcccactgctgcggtggcggcgtcgggtggtggtggtggtgggtcgaagaggtggacggatctattcgccaagaagcagcagcagccggcggcggaggataaggagaaggatcagccgacgaggcggcggagaccggcgggaggcggaggcggatcggagctgaacattaacatctggccgttctcccggagccgctccgccggcgggggcggcgtggggtcgttgaatccccgcccgtcgccgcggaaggccagtatcgccccgtgctcccgcatcatctcccgcggcgaggcggcggcggtggcgtcgtcccttcctcctcctcctcgccgctgggccgccagccccggccgntcangcggcggcgtgccggtgggccg

SEQ ID NO: 42219 - DNA, 341 bp, Oryza sativa
  Clone ID: PAT_MRT4530_45491C.1
gcgtgactctctctctctctccctctccccaccagcgagcaccggtggcagcgtcctccacacctactagtgccggcggcaccgccctcccctaacgccctctccggcggtagcagcaggagggaggcagcaacagcatgtggcgactggactagaggtggtagcgacgaatctggtgtagcggcgggtggatcttgcggtggtggtggtgttgacagcggctgctggcggatccagcggcgacgggtccctctgacccctctcgcaaccctccggcggcggtggcggtggcggcggtgatggcagccgcaagtagatccagcggcgatggcagcgtcagc

SEQ ID NO: 42220 - DNA, 812 bp, Oryza sativa
  Clone ID: PAT_MRT4530_45492C.1
gaaaagcttggtacggcctgcaaggtaccgggtcccggaaatttcccgggttcgaccccacggcacgagggcaaagccgacgcgagagcgagcggccaccgcgcgctagtagtagtagcgagccactatagatttggctcccgtataaagggtcgctgagacttgcttgtcgctggcagtggcagctgccgatccgtccgtcaaggcacagcgcaagcacaggctctcgctcgtggaggcgaatggagctggacatgggagcgggaggaggcggtggagtagtgggaggtgggcgagcggaggcgcactaccgcggggtgaggaagcggccgtggggccggtacgcggcggagatccgggacccgtggaagaagacgcgggtgtggctcggcacctacgacacgcccgtcgaggccgcgctcgcctacgaccgcgccgccgtcgcgctccgcggcgtcaaggcgcggaccaacttcggcagcggcagcagcggtggtggtggcgtcggcgggcacggccatggccacagccacgcccagctgccgcagcttcaccaccgcatgcacccgccgcggccgccgcagggccctggtcacttcggcgggctcgacatcagccacccttcgccgtggcactatgtctacttcccggcgagggtgcaggcgatggcgccggcggcggctggccatgtcgcggcgcacgtcgccgcgtcgctgccgtcgacgacgctggagctccggacggggccgagcgccggcgagctcccgttcgacctcaacgagccgccgccggcgctgctgttcggctcgtga

SEQ ID NO: 42221 - DNA, 199 bp, Oryza sativa
  Clone ID: PAT_MRT4530_45493C.1
caccatgagttatgtgttattatcatcatacgggaccagatgtatcataaaaagccaaagatagctcgattcatctccggatcaggtttcaacctgaacattgcttaatgcataacatcgcttaacggtcgctttgttacatccggacatattgaacgcacacagacaggtagctggtttatcatttattaggcattac

SEQ ID NO: 42222 - DNA, 1790 bp, Oryza sativa
  Clone ID: PAT_MRT4530_45494C.1
cccgggctgcaggcttccaccacaccaacgaacaaaacttgagagacagagagaggcagagagcaatggcagaccttgccattgggatctccaagacgatggttgaggcacttgtaaacaaggtcaagagcaccatcaaggaggaagaggagctgtggcagatcgtgcaacgtgatactgtgttcatgaaggatgagttcgagatgatgcagtccttcctcaagaccgccgattgggaacggatcaagaacaatgtggtgaggacgtgggtcagccaggtccgtgatctgtcttatgacgccgaggactgcatcaaatccatcctcctcctggacacaaataggtcgttctggaccatgtgtctccgcttgctggcatcgtgcagctgcaagtcggaagcagcatcgccactggaccaagccgttgccgagattgagctgctcaaggcccgggtcgaggaggtcagcaatcggaacatacgctacagcctcatcaacgactccggctccaagcccgccgccatgccgcgacacttggcgtccgccgcctctgccgtcggcacatcggcagtgggcgtcctcaccgaggcatggtgcaacgcgaagaagcagccaggcttcgttgatctcaccatgctggtcaccgagaacagtgatgcccttcgagtgatatcactgtggggaaccggaggcggtcttggtgggatgacatccgtcatcaaggaggcctacgaaaagccagaaatatgccaaaagttcagagctcgtgcctggttgaagctagcacatcccttcaacccccaggagttcatccgaagcttggggcatcagttctatcgaaacacatggaaagaacaacaaggagaaatcaccggtatcgatgttctgacggggatggacgcggcccaaggcaccaatctcgtgaaggagtttgtgaaggaactcaacaagcataaatacctgatcgtcctagaagacctgtccaacatggcagagtggcacgccgtccggacatatctaccagacggtaagcatgggagccgtatagtcgtgtctacacagcaactcgagattgccagattgtgcgcggggcaacactaccaagtattggagctcaagaaattatcagacaatgactccatctgtgtctttttccacgaggcttttgaacgtgtcgaagttggcatggtggctggtggaccttccttattggaaatgtccaacgaagttcaccttgttgggtgcagctcggatgaggagaaactctctaacctgatttcttcagcacgccatagcgacagatctcatgtgatctctgtatggggttttcctggtcttgggaaatcggttctagtaagaaccgtcaggcgacgccaagcgagtaatccgacatccccatttgattggtatggctgggtcgatgtgtcctatccattcaattttagcgacttctgtcgaagaatgcactcgtatatgttcgaacaatcacaaggagagtatgcgtacatgcccatgaatccaaaaccagaggaaaatatcatccaagagtgtagagagtttctgcagaattctcgatgccttatagtgatcgatggcctgcggtccagggaacagtgggactcgataaagtcgttgattgatggatcctctaagtgttgcatccttgtcgttactgcagaagaaaacgtcgccaaatattgtgccgtgcaagacgatgccgcagtacacagagtcaacgctctaggatctgaggcagccctcgagattttcaaacagaaaaagtttgactaa

SEQ ID NO: 42223 - DNA, 223 bp, Oryza sativa
  Clone ID: PAT_MRT4530_45495C.1
ctcgagaggctgacggcggggcgcctcgaatttcgccctctccgacgagcggaggcggaggagggagcccaggaagaggatgcgaaagcagtgaagagaggaggagaagaggggggaacggaaatctcagctgctgcgtcagtctcgcagatctgctccgttgagctgctgtttcacggaatcaccatgggtggaaatcatcgccatgggtggtaggattggt

SEQ ID NO: 42224 - DNA, 306 bp, Oryza sativa
  unsure (1)..(306): unsure at all n locations
  Clone ID: PAT_MRT4530_45496C.1
ggatntnnnggagatcgggcccacaaagcacagtgattatgttctttcaaaacgtgacacaccctttttttcccggcgaacccgttaaaaaaaccacccccaaggcgggtggtttaccgacggggaaaaatggttggcacacggccattaacgggttaaatcgcacacacattgagacagacaatgttcttttaaaaacccacccattacacgatgaaattttccaagattacccgggcctgttggccaagggtatttacttgttggatacatcaggggagcgcgcgggcggcccaaaaaatttta

SEQ ID NO: 42225 - DNA, 599 bp, Oryza sativa
  Clone ID: PAT_MRT4530_45497C.1
caaaatctccagccacaaccagaagaaagaggcaccagtctgctcaacctatacatttttagagagagaagctgcaaagggtgtgttagagagagatggagatgtgcatggatgacaagtggaagctcaccaagaagggcagccgaaggttggaggagggccgggcttcgagaggcccatcccggtctgtgccagggcggctggcgagcctggtgaaggagcaaagggccaggttctacatcatgcgtcgctgcgtcaccatgctcgtctgctggcgggactagtgatcgatctcttagagctacgggcctaaacgggtcgggctggctgatgcatcaagaggtcgccttgcctagtaacaaatttattcgtttagtgatgatgtttgttctttcttttttttctgagaaagagagcgatgtgccttttcagtggccatcctgtggtagatagttgttaatttgtgtggaaagaattaaatagcttacgttagctgtttgagccatccatacagaaatgtaaactgtgacaagtgtctctttgaaagactaatacattccatggtttctaaaaaaaaaaaaaaaaaaaaaaaaaaaaaa

SEQ ID NO: 42226 - DNA, 621 bp, Oryza sativa
  Clone ID: PAT_MRT4530_45498C.1
ggggcccccccgctgttttttttttctttcttaattactaatatcaaattcatcactttattggtgatactagtacatatatgtagggtggttacaatttaacaaagagggcaaaaaaaaaaaacaaaacactaagaacaactgattattagagcaaggaccgaaacacaaacatcgtacatccatataccatttcaccatcctctttacgtctaacatcatacagccaagatcaaactcaagattcatccggctccaatccccaacaccaccaccaacagacatccaccgaataattgccaaaggatacaagttgccctaccttagtagaggtaaaagtcgtcgactatggaggccatgcatagccattcctccccaagaagaagaagtagcttagctagcctccatggccaccattagcccacgctctataggcgtgtgaagcacggccacccattgcacggacacactccaaaattaagaacaagatgatggtagttatcgcatgacataagctaagaagatcttgtggattacatgatgcatatgcatggataatgtggagtgtgccctgcccttgagcccccgacctggtcccccgctgcgtattccctttagtga

SEQ ID NO: 42227 - DNA, 2849 bp, Oryza sativa
  Clone ID: PAT_MRT4530_45499C.1
gaagtaaaatgcaatccgtttttatagaccgtgtttcaaaatgtcacaagtcgggccacgtaatgaaaatacaactccacggaagcccccgtgtaaccaacaacatatggacacgtcggtgttgcaatgcctactgagtgggctttgctattgtcatttaaaggaacaattcgcaatgggtgggcttcggtattgaagacccactcatcgaaggatatgactgatggaggagagaacaggaggtataggtacttgagagtctctgctaggaagaagctttgcatcatgttatccttctcgccagtattcacatctctcagcccaacgtaaccagattctatgcgggagttcttttcaaatgcctggaatatgtcccacccccagtcttggtatgttttgttccccgtaagacgccacaagtacataagtgattcgacagtctcaggtctcaggatattccatgatgtgcccacgttcatatcctgtccagtatggaaaaaataattctccccagccaactttgtaggagttgtttggtagaagttataacaggtccgagcaagctctttcgcaagattcataatttcttcagccttttcagtctcctcatagccagaggcccccagtgccagcataccaggggcaaaacatgcaagctcatccatcttgtcagacaatgaaccaccattcttctcgcaaatgtagtagtaattagagggtgtagtttttttggtcaagcttagtaggccttccattgatgtctcccacatttgtctgtaatgctttacatgctcagttttattcccctggacccaaaccttgagcaagtactcgtagaagcaattgatttgatccatgcaatagcatgtcaaataaataggataaggaacaaggttatttaggatcttttgttgatacttgggatcaccagtcctctgtgacaaagctataaattcaagttgctccgtgccagaatcagcaaggatactatcaccattggtccatccaggattatgggctcgtccatgagctaggttgattctattataagggataccagatggtgtatcccaagcaggtagtagacggtcagtaatatctttggccttctcaagaaatactttgtcaccagatagatcatatgcactgaggaggcctccaacaacttctctggccctctgaaattcatcctttaggcccattatatacagtgtatcaagtgagtccacaagagttgccccgagaccaccaaagctattgacaccattctttgattgtggttcatccatttcccaacatgcacggcagttatccattaatattacagatgtagacccaggcaagacaaacatgccaagaatgcttgtattgcaaaaccgtacactttttcttcaatgatttaaagcctcatcatacaatccttggataattttatagcctcatggtacaaaatatcgaatcataacttgtttattgctacagagctaagtgtagaagtttaaagtaaaatgcaccactctgtcggaacgctatcaccttcaaacattgactcacttctttccacctccagacacgttaaatttaaagaagatgatatccccgtcctgtaccacgtaggtcttcccttcctgcctgtattttccagcagccttcacagcagattcactacccagttcttttagatcctcggcctttcgtactccatgtcaaagcttagtgaatcggccacccagtctctggccctctgaaattcatcctttaggcccatgatatacagtgtatcaagtgagtccacaagagttgccccgagaccaccaaagctattgacaccattctttgattgtggctgaagttcatccattccccaggcatacttcacataggaattccaagcatgggccatagcctccttaaccttttctctcctttcattattaataggatcaatttctacaagcttttctctggatactttgtcacctgttggattttcatccagatgaactccagcctttcttaactggtcacgcaactgatttactttatcatccaatcgagaaatttctgactcgtactcgcggacgagcgactgtcgatcccagaaggcgaaggtggcggcgacgaagacgaagaagaggagggcgaggcgcttcggccgcttgaggtaatacgccgggttgaggtaccgccacgcccccgacgacgacgaggaggaggaggaccgacgagccatggacggacgccgcccgcggggaggagatcgccggcacccgagctcgccacctccggcgaggtctccggcgattcgcgcgtgtcacgccgccgcgtgggatgtgttttcgtgcgtgcggctcgtcgggcccccgagtgctctcaatacatgaaaaattccatcaacagcgcgtatatgggataggaaggcattgcccaaaccctccccagcatgggctcctctaacaagcccggctatgtcattgatttctagatatgcagacacctcactctttggcttgtaaagttgacaaagccaatcaaatctctcatctggaacatatacccgtgcctcatttgggtcgatggtacagaaagggaagttctcagctgggatagacagctttgttactatgttaaagaaagtggatttgccaacatttggtaacccaacgatcccgatcttgaggtgggaggagaagcggccgaggatggggcgctcggcgggggcggcgtccttcttggacgccttgggcggcatcgtcgccggctactctgggctcggggcggcgcggcggcgatgaatctggaagaggagggggaggctagggtttttggtgggaaaaggcggacgcggg

SEQ ID NO: 42228 - DNA, 363 bp, Oryza sativa
  Clone ID: PAT_MRT4530_454C.1
atggctggggctgataatggcaagagggcacactcgaggaggcaccctagcgacgcccttgtcagcgaatccccaacaagctacaaagaatggctacacgatagctacctctttgggcgagttgaggaacttgcaattcgcgaggaagaggaaagacaaaattgtgaaattgttcaagtgaaaggtggcaagataatgattgcctttggggcctgttttccacaagactggctcgcaattccttgtgagttgcagagttttccaagagataaaaagaaaggaacttgccattttgccaagacgagagcagtggaaggcaagggcaaggcgtccggaaaatacaaaggcgtcaaaacccgttga

SEQ ID NO: 42229 - DNA, 1281 bp, Oryza sativa
  Clone ID: PAT_MRT4530_45500C.1
agacaaacatgccaagaatgcttgtattgcaaaaccgtacactttttcttcaatgatttaaagcctcatcatacaatccttggataattttatagcctcatggtacaaaatatcgaatcataacttgtttattgctacagagctaagtgtagaagtttaaagtaaaatgcaccactctgtcggaacgctatcaccttcaaacattgactcacttctttccacctccagacacgttaaatttaaagaagatgatatccccgtcctgtaccacgtaggtcttcccttcctgcctgtattttccagcagccttcacagcagattcactacccagttcttttagatcgtcgaacttcattacctcagcgcatatgaagcctctctcaaaatcagtgtgaattgtaccagcagcttgaggtgctttagtttgacgtctgatctgccaacactttacctcgtcagggccagcagtgaaaaagtatataagatggattgctgcaaaaccagtcttgataatttttgggatcacacaggcatgtatcttaggtaggaacttgttctttttcctctggtagtccttctcactcatgttcaccaaatagacaactggcttagctgtaagtagctggaaggtattcaagatctcaatgtcagcacttttccaatctccaaagcggacatcctttccatcttcaagatgggctttgaccttctcacataattcatgctcgagtttcagctgcttatcattgcttctcttcattgatttctcaaggtcatcaattttgttctgcacaaactcaatgtccttgagtctcagctcttcaccaatagtttccaaatctctaacaggatccactgaatcatcaatatgagtaacttctttgtcttcaaatgctctcaatacatgaaaaattccatcaacagcgcgtatatgggataggaaggcattgcccaaaccctccccagcatgggctcctctaacaagcccggctatgtcattgatttctagatatgcagacacctcactctttggcttgtaaagttgacaaagccaatcaaatctctcatctggaacatatacccgtgcctcatttgggtcgatggtacagaaagggaagttctcagctgggatagacagctttgttactatgttaaagaaagtggatttgccaacatttggtaacccaacgatcccgatcttgaggtgggaggagaagcggccgaggatggggcgctcggcgggggcggcgtccttcttggacgccttgggcggcatcgtcg

SEQ ID NO: 42230 - DNA, 704 bp, Oryza sativa
  Clone ID: PAT_MRT4530_45501C.1
tttgttttgaagtaaaatggagtccgtttttatagaccgtgtttcaaaatgtcacaagtcgggccacgtaatgaaaatacaactccacggaagcccccgtgtaaccaacaacatatggacactgttagatttacatgacagatcaataatgcagggagcgcaaacaagtacagaaatataaactttcatggggttattggtcttcgatttatactctgaagtttcaatgtgccccagaatatctcatcgtgctctacctataattccgttgcctaaacagcctattgccatgactttcagcccttatactgctacaggcagaatcgctgctcctgtcagaaccttggatcaggcaggtcaaaaatcagagggcagatgaaaaattcctgtgctctatggttcaaatctactcttgtttcccctgcttcctcccgaacggtcgtaccgtcggtgttgcaatgcctactgagtgggctttgctattgtcatttaaaggaacaattcgcaatgggtgggcttcggtattgaagacccactcatcgaaggatatgactgatggaggagagaacaggaggtataggtacttgagagtctctgctaggaagaagctttgcatcatgttatccttctcgccagtattcacatctctcagcccaacgtaaccagattctatgcggggagttcttttcaaatgcctggaatat

SEQ ID NO: 42231 - DNA, 417 bp, Oryza sativa
  Clone ID: PAT_MRT4530_45502C.1
tcggtatcgtataagactaaagccatagtggtgtctgaatcctttgtgatcaacctgacagcaggttctctgggcaacacgtgcttgggaaacatcatgaagactgaggttgtgctgctgttgatgggcgtggtcgccgcacaggtccaggagcatgccatcaacactgtgaaagacgcaaaggcagaactcttcggcaagatcattgctgctgcgggtgctgacgatgagctggcaaacgccaaggctcgtgtcacagtgttgggccctacagatgaggctgtcaaggccttcctgaaggacatgggtctgactgctgacgacgtgcttaagaaccccaaccttgcccgtgacctggtgggctaccacacaaatctgggtgtggctgcgggacctaaggagctttttgccagggaa

SEQ ID NO: 42232 - DNA, 1007 bp, Oryza sativa
  Clone ID: PAT_MRT4530_45503C.1
atagcctcatggtacaaaatatcgaatcataacttgtttattgctacagagctaagtgtagaagtttaaagtaaaatgcaccactctgtcggaacgctatcaccttcaaacattgactcacttctttccacctccagacacgttaaatttaaagaagatgatatccccgtcctgtaccacgtaggtcttcccttcctgcctgtattttccagcagccttcacagcagattcactacccagttcttttagatcgtcgaacttcattacctcagcgcatatgaagcctctctcaaaatcagtgtgaattgtaccagcagcttgaggtgctttagtttgacgtctgatctgccaacactttacctcgtcagggccagcagtgaaaaagtatataagatggattgctgcaaaaccagtcttgataatttttgggatcacacttgcaatctggttttcagcacaatatttagcagcttcatccgggggcatatccgctagcaacctttcaaaagcacagctaaaaggaataatagtttcaccaccatgttcctgaacccaggcatgtatcttaggtaggaacttgttctttttcctctggtagtccttctcactcatgttcaccaaatagacaactggcttagctgtaagtagctggaaggtattcaagatctcaatgtcagcacttttccaatctccaaagcggacatcctttccatcttcaagatgggctttgaccttctcacataattcatgctcgagtttcagctgcttatcattgcttctcttcattgatttctcaaggtcatcaattttgttctgcacaaactcaatgtcctgcaaaagaaagtgcgataggatttaaaagaaggtttaaccaaagcatttactgacgtgcaaatcaagcatccctataaaaaccttgagtctcagctcttcaccaatagtttccaaatctctaacaggatccactgaatcatcaatatgagtaacttctttgtcttcaaatgctc

SEQ ID NO: 42233 - DNA, 1524 bp, Oryza sativa
  Clone ID: PAT_MRT4530_45504C.1
atggcactgcttataggactgcttctgatcgacgccgtgttcatcgtaagcttggttgggccgatggcaacaatggcgatctcgctgacgcgcctgatacagcacgactacgatggctcagacgcgtcgagcaaaggaaagctcagggcagccctgttcatcttctactctctggctctgctccatagcctgtgcttctacttctggctcctgctgcatttgtccctcgaaatgttgccgattccggcgagcatagaggagtatgggcacggcgacggcggctactaccagatgctgcttcgtcagtacctccaggaaaccaaaaccaagtgtgcgaatgatcccaagctgccaggtgactggaacctggtgacatacgccgttgggttgctggattctgcatccccggatgatcatctggatgggctaaggatgctcgacgtcttggccatcaacaagcagcgctctgtacggcttgagctgctgtcctcgagacactctgtccagaatctcatcgagatgcttgagtgggatggtccggaccaggagatgagagagcgtgccgcgaggattgtcgccgatgtcgctgctgcgctgcgcgtagcccagatgccagcgggagctctgcactgcatatcttctctgctagaagcctcaccaagatctgacaccttgaagaagccgaaaggcgaatatgacagtgaatgggttgatatcctaagcattttgttgaggctggtgatgcggcttatcagtgctcctggagaagccggcacagtgctgtgccatgaaatctcagctagcaatgatgcagtccacaacttgctggggatccttgacggccaaatcaagttttccttgcaacttcaggaaaacgccatggatgttctttcagaaatatcaataggtttatctgcagccatgaccgagaatttagttaagaagttgtaccacatcttccttgccaacagtggagatgaggaaactgtatcagaggcaagggaaagcaataattctgaaatgcataatgatgaagaaagcaaacctccaaaaccagctggtctgaagaagtccttggtggagaaaaatgatgagctatctgaagagaggaaacatctagcagctctgctatcccttcttgtggtgatatgcgacaatttggttgatgcagatcttttttctaatgtcacatctgtgaatgatgaactggcgaagaagctcaagaagataatagaagcaaataatgaaaacacagctgactgtctgagaatagtgaaacttacctgtcaggtggttatagcgataattcatctcaaacctagctccctcaaagacttcaatgaaagtaatttcaatgatgtagtgtccacggctttcaagaacatgtcagatatcgaaaactgcatgctctttgcagtcaaagatcgtcagataacaaagcctgccaaaactctctcttctcttgtaaaagaaacccagggactcctccacaatgcacaagaaacaggtaacaattctatctga

SEQ ID NO: 42234 - DNA, 227 bp, Oryza sativa
  Clone ID: PAT_MRT4530_45505C.1
cacaccccaaccacaggaaagctaggttgtgtaacatgaatcattaacttttacagaccacttaatgtctctttaacactgggaacatgccctgtaggaggcatagatttcacgagaacacccacaagcttctcagaacatgcatatgttagaacacatacctgttccctatgttatataaccgaaggggcagtccatctataatgacacacacactttgccttaag

SEQ ID NO: 42235 - DNA, 2168 bp, Oryza sativa
  Clone ID: PAT_MRT4530_45506C.1
cctggatgatggtgctgccgatctccagctcgtgcattccaggctccatgaatcccagcgaccgcagcttgggcgcattgcggatcttgaccatggaggagaggcagctccggtgcttgctcgtcatccagagcatgagccgctccaggcgcggcgcgcgaagagcgcggccgggaggcggaggtcgagcggccacgggcggttgacaaacactaggtcctggacgcccttggcggcgagggcctcgagccagcgcgcgacctcgccccggtgcgcctccatggagtatgtttatctatttgcacatggatatttctaaaaatagcgaatagttagtatataggtttacttaaaagccgtgggatcggttgaaaagcgggcgatctagcaccgctctcacgcttccgccgccgccgccctcgggagtagcgatctcccggggacggccacccattttttcttttttcttcctcgtcgctgtcgtcgtcgtcttggagagatcgatctccacgactgttcttcgtcgagtctagtcgtcgtcaagcagcagcaacagattgcatctcctctgccaacctccgtgcgcggcgctcttgtatcgccgtcaggccgcccgtcgtcggcttcattctcagcgtccgttctgctccgccggcctcaccctcaggccctgccgtcgtcgtcacctccactggccgacgatcgcatcccgatggacagacgaacggcgcagctcggctccacctccggcaccggtctccccctgcaaccccggactcctccgtctccagcaccaccgtcgaccgggggacgagctcccggcgctgcttctccgctgccggtcctcgcctaccacctcgcctgtcctgccgggaccatcctccgccggctcaccggacgtccgccgctcgggaccactaggatttgaggccgccggtgccagcgccggcgctcgcggggcactggcgcccggctacgatttctgcaaccgatcgtcatcaagcacgcgtctaagccatcaagctttggggtgccgctgcgtcgcccccctcaggccacagtgtcgctgcctgtggtccacacctccactggttgttgcagtgctgagaggcgccctcctcagcatttctacatcaccggtggacttcttgccgctgcatcgacatggagctgcagctgtgatgtcctctcggaccgcagctttgccgctttcgtcgtcttcatcgccgttcgcgcatcgacaacctcgtcgtccgcactggtcatcgttagccgctcaggctacctctacatggctaccgacgtcgccatccaggccgttggtcccactacttcgccttcgtcttcgtcgccttcgtcttcatccagcatgattcatcgcccgtatcttcctcgactacacttcgctcttctccgacaattgcgcggtattggcaacaccgttgcgcgcgttcgtcccgagttgtccccgggtctggcaaacccgacgtgacgtctcgtccttcacggttcgactacatcagctcttcggcgtcatcttcctccacgatcgccgcgattgtgtcaccgtcttcgtctctaacgcgtctttgcgcaccattggtccacgacgcccctcccgtgcgtccacgaccactctacggcgccccatgcgcgcctgcggctcggctacctcgacatcagcttctctacttcggctacatcaaccacggctactctacgcacggcttcatcgaccacggctccctcgcacccatcgctttgtctacatcgactatggcacaaagggctatcatccgtgttgagcactcttgccggtttcttctccagtccaagtgtctgcgctgctcacgcttggactgcggggggatgttagagtatatgtactcaatatatatcggccccttgaggctcaatacaaaatgtgtcccacgttacgcagtctcctatactatccaacatatacaactatttcgcgggtgtgtgagcgagtgagagggtgaggaccttggtcgtagatggcgttggcatccacccgaagctcctcgaccaggtacctgcacaccgccagcttccccgcgccggcggcgaggtgcagcgcgcccgcgccgcactcccgcacggcctccaccgcctccgcggggcggcccctccctccgtccagcgac

SEQ ID NO: 42236 - DNA, 179 bp, Oryza sativa
  Clone ID: PAT_MRT4530_45507C.1
aacactaaacacctattaaatggcggacttttttaaaatatttgccaccaccccatttaagaggcttccttacccccaaccagacctgtctacacatacccccacctcctctgctccaagaaccttaaatgcaatacttcaaaaccatcgattggaaaccttacatactacaaaacccc

SEQ ID NO: 42237 - DNA, 424 bp, Oryza sativa
  Clone ID: PAT_MRT4530_45508C.1
acaggagggcgtcgtggaccaatggcgcgcgaagacgtgctagagacgaagacggtgacacaatcgcggcgatcgtggaggaagatgacgccgaagagctgatgtagtagaaccgtgaaggacgagacgtcacaccgggtttaccagacccggggacaactcgggacgaacgcgcgcaatggtgttgccaataccgcgcggacgaggtaggggaccaccatgaaccatacgccaatattggaggagactagcaaagaaggcctccgagacggtcgcggcgcaagaacggccgacgagaagtccaccgatgatgtagctatgctgagaggagggcacctctcagcactgcaacaaccagtggaggtgtggaccataggcagcggcactgtggcccaagagggcgacgcagcggcaaccataagct

SEQ ID NO: 42238 - DNA, 558 bp, Oryza sativa
  Clone ID: PAT_MRT4530_45509C.1
atgcggtattggcaacaccgttgcgcgcattcatcccgagttgtccccgggtttggcaaacccggcgtgacgtctcgtccttcacggttcgactacatcagctcttcggcgtcatcttcctccacgatcgccgtgattgtgtcaccgtcttcgtctctagcgtgtcttcgcgcaccattggtccacgatgccctcctgtgcatccacgaccactctacggcgcctcatgcgctccctgcggctcgactacctcaacatcagcttcctgacttcggctacatcgaccacggctactatacgcatggcttcatcgaccacggctctctcggctccttcgctttggctacgtcgacaatggcacaaagggctatcatccgtgttgagcactcttgccggtttcttctccagtccaagtgtccgcgttgctcacgcttggactgcggggggatgttagagtatatgattgcaacttattctagccctggggcacaaaattggaatttgacacagcagcctcattcttgggccctgcaatttcattggcaagggcccaaataa

SEQ ID NO: 42239 - DNA, 1876 bp, Oryza sativa
  Clone ID: PAT_MRT4530_45510C.1
tttgtctttgtcttcttcaggtcttagtcaacgtccgacggagtactgtgttcaccgcgctcctgaatttgcggcgcactcgaccttgtcttggctacccccttggcgcctctctccgatggcgcctgtccatgcctgttgctctccccgcctggttcccccgccgcctcgtcccccccgcgcttcatctgcttgtcggaagcttctcaccatgaaggaatgcatttatcagcataagcccttcagcaggtttgttgaggggaaccaggtgacctgcccctctgacagtcaccattgtcattccatggtactccacaaacctcccagcaacctgcttgtcaaggtaccaagattgccaatcggtcttgatcggtaggccgagtgcttccacgcagtaccgagaactgataaccgggaccctgccgtcagcatcaccgctgctttgatgaacagagactgattcaggtaaattgtagggcattgttgcatattttttatgtagatgcatattactgtagagccaaactctcagccctgctttgatgagcttggagtatataggtaggatggaaagtactgagaaattgtaagagttgaggatttggtcactgcaaacttgccacttccctggaagcagtccactggcatttgcatggaatgcttcttgcacatcatgcttattgaagtagtcctcagcataggatgagtagcatggatcatagcctgaaaacatcttgattctccacctgaattgttcctggttatttgcgaagaatgcacgatcaggtgaagatgctgaagtactgtttagaaggcactttggggcataaatgttgtatatatctatctgattgtactgactgaagattatgttcattgcagcattgcaatcgtcagtccagttggagttcttgaagttgcaagttttcttgatgcgctcgtaaacttgatccgacacaattgcatggctccaggcatactcagccaaaccttttgaatcatagtaatcatcggtgagagggttgcctacaatgaaccccttgaggttgatatatgtgctggcccttttgtctttgttcctctcatagacaaggtcagcaagttggggcacatagtgacctgcatagctctcccctgagatgtagaactcattgtccttgtactgaggaaatctcttgaaccagttcaccaggaaactataagcatcctcagctacaaaatcatcattaagattggagaggtcagaggatgtgttggtgtaggagaagccgaccccaacaggagactccaagaacaggaggttagcctctttgttccagccatactggttgaactctagtgctgctccttgtcttgcaactctgagaggccctagctctgatgcagcaccatagccaatggaagagcaaccaggtcctccattgagccagaggagcagcggcttcttctccggcgccggcgacgcctgcgcctcgaagaaccagtagaacagcgccctgccgtgccgctcgtcgacgccgacgtagccggcgaactgcgacacggcggggctcgccggctgccccgggagccgcgccaccctgtcagcctcctgctcgccgccgccgccgccggtcgccgccattgacgagctgaagcacaggaggaggagaagacaagagacatctcgccgcctcgccgccgccgccgccgccaccgccattgctaacccgtggtgccgagctctagctatagctcactgttgcgccgtgtgcagcagcagcagcagcgtcgccatggatggaaatggaggaggagaagaaaaggtgaaaagtggtgcgattcttggtgaattattgcgagcttggagcttctcgcctgcagcccggggatccac

SEQ ID NO: 42240 - DNA, 507 bp, Oryza sativa
  Clone ID: PAT_MRT4530_45511C.1
atggtggtcccctacatcacccgcacggtactggcaacaccgttgcgcgcgttcgtcccgagttgtcccggggtctggcaaaccctgtgtgatgtctcgtccttcacggttcgactacatcggctcttcggcgtcatcttcctcaacgattaccgcgattgtgtcaccgtcttcgtctccagcgcgttctcgcgcaccttggtccacgacgcccctcccgtgcgtccacgaccactctacggcgccccatgcgcgccctgcggctcggctacctcgacatcaacttcccgacttcagttacatcgaccacggctactctacgcacggcttcctcgaccacggctccctcgcacccttcgctttggctacgtcgacaacgcacaaagggctatcatccgtattgagcactcttgccggtttcttctccagtccaagtgtccgcgctgctcacgcttagactgcggggggatgttagagtatatggtagttagagtcatattaggatag

SEQ ID NO: 42241 - DNA, 524 bp, Oryza sativa
  Clone ID: PAT_MRT4530_45512C.1
agggtaccggtccggaatttccccggccgggccgcacggcgtccggtctgagaagaggagagagacccttctgcctgacaagaaattctgagaagagggagaatggcgtcggcgacgttcctggaggtgctcctagccatcttcctgccgccggtcggcgtcttcctgcgctacggcttgggtattgagttctggatcgatctcttgctgaccatactgggatacatcccggggatcatctacgcggtgtatgtgctggtggcctgatcgaaagagttcgagcagagccagcgtcgggtgatcgagcgatcgtgcaacggtgcaagagcaattgatgctgtgctgtggtgttaagagtacatttgtatgtgtgaaaatgtgatttatgcgatgagattagggtcttgacgtcttgtgatgagagtctttatgctattttagagactgtaattgggtgtcatgttgcttgtttctcttatctaagatacttttttgagaactctaaaaaaaaaaaaaaaaaaaaa

SEQ ID NO: 42242 - DNA, 604 bp, Oryza sativa
  Clone ID: PAT_MRT4530_45513C.1
aatgtctactactctatttggttggtggattgccaaaaaaaaagtgaggttagaatgatatgcaggtaaaattagccaaaaagtaagtctatgacatgtgggccacaagaataaaaaagagaggggagaccggtttgtgatagtgaactaaacatttttctgtagaaatttgccaggatttaggttggcactgttagtcacgtgatgatgtgccatctctggctaatagtatcttgattttttttctgaaatgtttggttctagtaattcaagcctgttattaaacactaaccgatgcagttctaggcaaaattaaaactgcacaacagaacaagttgttcttcacgcagaatgtcacaaacctcatttttcagtagtttttttttaattggtggttctagaggttttgaggttcgtataggagtaccccatccttttaaatttgatgaaaattttgatgaaataaatgtaaatttaatattatgaaatttcaaagtatgaggtaggaccatctaacgaaaatttcttccgccactggttttttttcaaagtcttttatatcagtctccctgccctgaaccacgattacaaaaaaaaaaaaaaa

SEQ ID NO: 42243 - DNA, 630 bp, Oryza sativa
  Clone ID: PAT_MRT4530_45514C.1
cgggctgcaggaattcggacgaggacaaatctctgattccaatcttgttacgttcttggttgttctttgccttgcgatttgggagcggcagcagcagtaaggcgctcgtcaagatctcttcttttcaattgttggggtcgcgcttgttcgtcgaaatttatcctttccgattgctggattgcgtcatttcgttaatatttctccttcccaatacctatcttgtgctatttggaaacgagagcactaatctacttcttcgatctaatatgtttgtacaggcccttgtatataaacgaacaaactttactcatatattcagtccattaattttaggtcctaatagttgttttttaacttatgcgaaaattgcaatgtgctgaacagtgcaggtgatatctctttcttaacgaaaaatagagtcagcatgtaattatctatatggtacttaagatcctaaaaattaagcaagggctaggttgattgcttgctgtatgaaaattgttccagttagcattttgctccattctttgttattagtcagactctcaactgctatcatgttatttactcaggaattagatttttacttcagatatcatattatgcaaattgtattctatttctcatcgt

SEQ ID NO: 42244 - DNA, 130 bp, Oryza sativa
  Clone ID: PAT_MRT4530_45515C.1
gtgattctgagtttggaaggttcgatgcggatgcacctacctgatcgtgctaaaggcgtatccccttagcgctgttgggatagcgaacacaatggtaatgcctcacataatcggatgcggatctaactgt

SEQ ID NO: 42245 - DNA, 885 bp, Oryza sativa
  Clone ID: PAT_MRT4530_45516C.1
atggcgctgggaaggagcagctccgcgcagggaggaggcagcagcaagcagttgggtcgcagagacttgtttgagctttcatcaaccacttctgcaccttcatgctgtgtttcaaaatgttctatgtacagcagcatggtcgccgagcttgacggcaagcccgcccctttggccaaggagaagagtggatcggcaacgagctcaacggagtctgcacctttggccaagctcggggccgtcacaggtgacctcatctgtgattgctttgctacttcagccagccaaaggcttggagagaccctcgtctctgacaggccggaaaatactggcctgtcaggggtaactgtcacctctgacgagccgccgccggttaaagcgacgagccccatggcggctgcgtccccgcacgacgagctcgacggtggtggcgtctggcgcgcgacgaatccgcgtagccgtggtgtcaccgttgagagcgacgagaggccgcttccccgctggcccgccgtggctgcagcccttcgccggagactagctagcggcgtgctgacgctcgacggcgacgagcactcgcggctgcatcttcatgtgtattgcattgactcagttctttcagtccatccaacaattttaatcttggattcccctccggcgcagtgcatgtgcatgcgcgcagtagtgtttggtggcgacatgcatgcgatcgttagagcaggtcatgattaccaatttaattataagaaatataatggtttagacggacttagatattattatcaaaagaaatgtgtgtcatcaagaactgaatataggattatactaagtggggcacttcaacaaatggtacgtaagaaagagtatgccactaaaccacaacaacaatag

SEQ ID NO: 42246 - DNA, 418 bp, Oryza sativa
  Clone ID: PAT_MRT4530_45517C.1
tttcttttttattctttaacccgcacatttttcttttttcaagaactgggaagcattccgcccccaacaaatgggggcgctctattaaacctttttttttgccggggacacattacaaccctatttccccctggtgtgtggatattagcacctccccagccgtgcaaagggatgctaaatcctgacatgtgggatgcttaccgggagggattgggtggttctaaaggggcccaaccaaaaaaagctgaaactgccacgaatgcgacgcttttactcaaaggccgggaatcgctcccaggtagaccttctctgatgaggtaagcccattctttgggccctgctgtgttatgggttgaaccagtgcgtccaatttccaaaggtaggaagaggaggcattgtgatccgggggtggaatcgg

SEQ ID NO: 42247 - DNA, 344 bp, Oryza sativa
  Clone ID: PAT_MRT4530_45518C.1
acgcatatttacaccagtcagttggcacactagctggaggcgatctagcgaagctcacctagcttatataacaagctgtcgatctgcttgctgcctttgtgaattgcggcggaagcatgtctcgcgcgttgaccatggaagcgctccacgccgcggctgctaaggtggagcagctccagcacaaggtggaggaggcgactggcgtgacgagtagcagtcccacgagcggggaggagggcggacacctgccgcatgggtggtcgaagcggacgccgtcgcgccttcagtgatcggtggaggataaccttaggttccgtcttctaatgctcgcccgtagtggtcac

SEQ ID NO: 42248 - DNA, 204 bp, Oryza sativa
  Clone ID: PAT_MRT4530_45519C.1
ctagctaagcttatagctttggacagacgcgacctgcgagaaggcgacaaccagccaacaccgcactgtcattatggtaaacgatgtgacgctggtatagtacaatgggtgtatccgtgtatgccctccattcacatagtcgagtcgcacaccgctgaaacgaatgtaacagtgccctaccgtcgcagttgcagcagctggtgg

SEQ ID NO: 42249 - DNA, 369 bp, Oryza sativa
  Clone ID: PAT_MRT4530_4551C.1
atggctagggagagtactctttggagcattgctggagccaaagcactccatgagcattttttatcatactggttcgcgagccggtgcaactggagtggtccagctggcagcagtggccagacgcgcgagtcgggtagaatgagattagtacctgaggatttaattcacaactctgagaattggccccttgttggtttgtttgctgttgaagttgctgctgttgctgttgaaatagctgctgttgctgtgtcatgttttgttgctgctgtggcatctgcgagagatactgttgttgctgcaataattgctgttgaagtagctgctgctgcagctgttgctgctgttgatacatctgctgctgctgcataa

SEQ ID NO: 42250 - DNA, 185 bp, Oryza sativa
  unsure (1)..(185): unsure at all n locations
  Clone ID: PAT_MRT4530_45520C.1
tcncacttgttccatgcacanatccgcatgcccttcctgcanatgcctctccatcacagctctcttcctttggcccatctccnaagcccaagctctcctccaacacatcccatatccaactgggcccnacaagcagtggcagcaacctccttccgtgctccccatgcccactgcacctcaaaccc

SEQ ID NO: 42251 - DNA, 462 bp, Oryza sativa
  Clone ID: PAT_MRT4530_45521C.1
tatccagcttatatataaaaaaaacataaaaaaattaataatctaccactacatatttaaaagagtaaaatccatcaccggtccctaaacttataccgctgtgtcatcccggtccctaaacttgcagatcactcgtttaggtccttcaatttgttcagttgtatcaccctggtccctaaacaggacgctcacatgaaaaagttataaattatttttaaatataaaatatttaaaccgtcctatttgaccaagacgatattcaaatccaagtttaaggaccggagtgacacaactgaacaagttggaggacctaaacgagtgatctgcaagtttaggaaccgggatgacacagtcgaacaagtttgtagcgcccgttccgtcgtcgccgctttggacgctagccggagcgccagctcgccggcttgaccgcccatgtcggttcccctctctcaaaccgacatt

SEQ ID NO: 42252 - DNA, 262 bp, Oryza sativa
  unsure (1)..(262): unsure at all n locations
  Clone ID: PAT_MRT4530_45522C.1
cgaatccctgtcgaccacgcgtccgctgctntgttacacatatatcatatgccagtcaactacagcctccgcagcatgatcacccacctcatgtatcatgacacgcgtcctgaacagagcgagagcgtcatcgacaccttccccaagaccacccttgccaccatcatcgacaagtacgtcagcagctgattgcatcatcatcgtcgtcttcttcctattcttcttcagctgcatcaatcaaatcagacttgatcgatcttag

SEQ ID NO: 42253 - DNA, 1461 bp, Oryza sativa
  Clone ID: PAT_MRT4530_45523C.1
atggtggcgctcatggcggaggcgtcgtccaagcccatgtcgccgcccacctcccacaacgcgctcccccgcgtcctcgccttctaccactactggcgcaagatctacgggcataggttcttgatttggttcgggccgacgccgaggttgacggtggcggagccggagctgatccgggagatcttcctgacgcgcgccgacgcgttcgaccgctacgaggcgcaccccgtcgtgcgccagctcgagggcgacgggctcgtcagcctccacggcgacaagtgggcgctccaccgccgcgtcctcaccgacgccttctacccggacaacctcaaccggttgataccgcacgtcggcaagtcggtggcggcgctggcggcgaagtggggcgcgatggcggaggccggggggagcggcgaggtggaggtggacgtggcggagtggttccaggcggtgacggaggaggccatcacgcgcgccacgttcggccgcagctacgacgacggccgcgtcgtgttcgccatgcagggacagctcatggcgttcgcctccgaggccttccgcaaggtgctcgtcccgggctaccggttcttgccgaccaagaagaaccggctgtcatggcggctggacagggagatacggcggagcctgatgcggctcattggccggcggagcgacgaggccgagcaaggcgagaaggccgacgacggcagcttccgcgacctgctcggcctgatgatcaatgccggcgccgccgccgccacccgcggcaacgccggcggcgagaagaactccccggcggcggcgatccccgtggaggacatgctggaggaatgcaagaccttcttcttcgccgggaagcagacgacgaccaacctcctgacgtgggccactgtgctcctcgccatgcacccggattggcaggagcgagctcgccgcgaggtgttcgacgtctgcggcgccggcgagctcccctccaaggagcacctccccaagctcaaaacgcttggcatgatcatgaacgagacgctccggctgtacccgccggcggtcgccaccatccgccgagccaaggtcgacgtccagctctcggacgggtgcatgatcccgcgggacatggagctgctcgtcccgatcatggccatccaccacgacacgagatactggggtccggacgcgtctcagttcaacccggcaaggttcgccaacggcgcgtccaaggcggcgaagcacccgctggcgttcataccgttcgggctaggctctcggatgtgcgtaggccagaacctggcgcgcctcgaggccaagctcacgatggccatcctcctccagcggttcgagatcaggacatccccgaactacgtacatgccccgacagtgctgatgctcctatacccgcaatacggagcgccattgatcttccgcccgctctcatcacatccacccgattcgacgggcccctag

SEQ ID NO: 42254 - DNA, 230 bp, Oryza sativa
  Clone ID: PAT_MRT4530_45524C.1
cttcttgacatacaagagaagcttgaatatattgcgtcttgattatgaacaggatctgtagactgcctagagcctattctctgctgagaagagctatcagttcacagatggacaagtcatcacaatcggcgcagagaggctcaggagcccagcatggctgtgccagccatggctgattgtgaccgaagctccggtgatccatgagaccacctacaactgtatcatgaagt

SEQ ID NO: 42255 - DNA, 299 bp, Oryza sativa
  Clone ID: PAT_MRT4530_45525C.1
gacgtgtggaggatgacttacttatgtacgggatgtctaacacatacactcggtggatacatcatggagaaccattggtcattgtcactggaaatgttgagcatttgaatgaagatattggctgcaatgttgagcatttgaatgaagatgttagctgcaatgttgaatttgagacgaatgagcctccggatgacccaaagatgatcaaatgtaccgagttggctaaaaaggatgcatgcccaatatgtggtgcttcaagatggaaggatgcagatagccgaaggaagattccagaaaag

SEQ ID NO: 42256 - DNA, 1179 bp, Oryza sativa
  Clone ID: PAT_MRT4530_45526C.1
tcattggatccgtcgaatttggccgcgcgccccattattgaggatgaatggaggctgaacagattccagaaggtccattactgattttcggtcaggcatgctgggtatggctccctttacttgaacacatagagatgcagcagcagcagcaaatctcatgcactcttccttaggtttaccctcaactagagctacagcaaaagctgaggtgaaagtgtcaccggcaccagtcgtatcaacaacttctgtggcaggaattatcggctgcctgatcggctcccccccttcaataaataaagcagatccttgtgatccgagtttaaccagcacttctttcacacccttgatgcaattcctcatgttacaattatccattttatggcatgctcctgcagctcgactgatctgttcaaatgtttctgtaggcatcccagtcaaacgtgcaagctctgtttcatttggactaaaaatatccaccaggctcagtagttccccagggacaggagcatccattccaccggcgtccaagataacaggcacacctgcaccttttgctgcctgcgcaacctgcacgttgacccaatcgggtatctcccgctgcagcagcagcacgccagcccggcggatcaggtccaggtcgtccgagccgacccccgaggcccacccctccatgttggcgccgccgacgatgatgatggagttctgcccgccgggcatcagcatcaccacggcgtggcccgagggcgcgccgggcgcgcgcgcgacgcggtctaggcggacgccgccggcgtccgcgagggcgccctcgaggagccgcccgttggcgtcgtccccgacgcgcgccacgaggtaggtgggccccgccgcgaggcggcccccgcaggcggcctggttggcgcccttcccgcccgcgaggctgcggccggcgcgcgccgccaccgtctccccgacgagcgggaggcggtcgacctcgacgtagatgtcggcgttggcggagcccacgacgacgatgggcggcgccgccgccgccggggcactggcggaggatgacagggaggcggagggcggcctgagggcgaacgagaggctgcccggcttgggggtggatcccgggaaggaggtcgtcgccggcgatagtccggcgagagggaggcggaggcgagcgtcgagagtaggcat

SEQ ID NO: 42257 - DNA, 1425 bp, Oryza sativa
  Clone ID: PAT_MRT4530_45527C.1
atgaagcccggcgtcctggagctgcagcaagctggcatcgagctcctggggatggggtggggcttgggatccagccggcggtgccgggctccagaagccgcgttgggcgaagggcgacggcgtcgagctccaacagccgggcgctacgttggggacagggtggggctacagcctgcggcgttgggctccagcgggagcaatgggaaagggcggcggcgtcgggtccagcaggcgcgatggggaaagggcagtggcggcggcgtcggggggcggcgactccgggttggcgaggctcgcgacgaggccgactttgccaggcgcggcatcgagggcgggagggaggcgacaggggaggagggagccaccgccggccagcagccgccgccaccgctgacggacccacctgccgacgccgccgacaccgccatcgccgccggatctggggcaggaaggagtcgagaggtgagaagggagcccccccgccgcccggatccacccggcggctaccgccgccgccgccaccaccggcggatctgccgcaggagggaggctagaggggcttggctgatcggcgagctatctaacgctaacgccttctctcctattctcccttaccctcgtctccagccttgctccctgctggtgctgtgggcatcgcgttgctactatcgtgaccagcgtaggacctccttgcatcccaaccaccggtgccaccatctcctactagcactgttgcctctcttcgcatcggctggtgtggctctgctcaagttttctaaggctgcaaacagccactatcttttcaacaaaaccagtgctttggaggcggccgacgtcaatggcaacaatagtgcggaaatcttggctgctccactgtacccggtgagtcatagttacctattggagattgctgttgggtctctgggcaaaactagacttgtcagcttcgacacagccgtcaacatgatctctgttacgagattctcctactgcttgccatcctgggttaagaacgagcttttctcacctccctacgtgctatttgggagcaacgcggtgctgcagggcgatatgacaccgttcctcccagggtttcccaagtactacctcaagctcgaagggatctcctatggaattgttcgtcttgacatattcggcagcaatgccgctgccgccgaccaatatcatcagcaggcacaattttgtcgtggaccttaccttccagatgctcagttctatgccatgaatgccacctttatggagatcacctccatgaatggcgaccaagaggagcgctatgtgtgccttatcgttgacaagacggtggatgggacagcggtactgggcttatcaccccaacttgaccacaacataggatttgatctggagaacaagcagatctcaatttatcgcaagatatgttag

SEQ ID NO: 42258 - DNA, 892 bp, Oryza sativa
  Clone ID: PAT_MRT4530_45528C.1
ttccataggagatcccttcgagcttgaggttagtacttgggaaaccttgggaggaacggtgtcatatcgccctgcagcaccgcgttgctcccaaatagcacgtagggaggtgagaaaagctcgttcttaacccaggatggcaagcagtaggagaatctcgtaacagagatctgctgtgggagtgagtatttacctaggcccaggccaaccacaccactactaccatattgatctaaggtatattttgagtggtctaccgtggcacaaccaaagatgatgttggtgtcaaaaaggaagaagaaatggtctgaaatagatatcctatcagaccctagaatgccttgtacccagccgccgttattgtccaaggaatcgactttgaaagtacatgtgccatccatgcactcagctaatacttgttggtcatggttgtcaccggcaccgcagagtgggtgatcgcaagacagaggattgtagcttatagacatgctagcattgtaatacgtagtactagtaccaacttgggagggattgcaatccctacaataatctgaacactgcagccataccatgttgacggctgtgtcgaagctgacaagtctagttttgcccagagacccaacagcaatctccaataggtaactatgactcaccgggtacagtggagcagccaagatttccgcactattgttgccattgacgtcggccgcctccaaagcactggttttgttgaaaagatagtggctgttcgcagccttagaaaactgtaggaaggtaagcagtagggcgaacaccaccgccgtgaaactggaaggaaaacccatggctccaaaattctccgccccgggccgttccagggagagagaaggccgggattgggaaggagtcgttg

SEQ ID NO: 42259 - DNA, 3656 bp, Oryza sativa
  Clone ID: PAT_MRT4530_45529C.1
ttactcgacatcactatactcaccatcatcattagggatcataattgtacattcattttcactatcatactgccctaaggtatcatcatcgtcatcatcattgtacaggtcatcttcttcaacttccagatcccgttgcctgcgaatctgatcaactagggactttggtacacttataccatcttcgttgactggttgtttgtcgaccagagatccttccatggtttcaactcgagatatttcctgctcatcatcttggtatgtcagatcaacccctccctcttgcctgtcatcattttcctttgttgcctgtgtggcaagaatgaaagcatcatccttgtaccaacaacttccatggctgatgcttttgaaatatccatcattcttcatcctagactttttgctacaggtatcaaaccaatcacacttgaataacaccactgtcctttgactgtcagcgtcagagttgtactgcaactgtattacttcttttagctgaccataaaagtctatatcttctccattatgtgtgccctcaaccataactccactgttttgtgttcttctactgctctcacgttccacggtgtgatatcggacaccatcaacaatacatcctgaaaatatacgaactctaagaagtggtagacttgccaatgcatataggtcttcatcgatttgttctccattcacaaacctccgagtagcaagatgtttcctaaaccatcctggaaattccttagcaaggttcccctcaacatcatgactgccagcagtttgtaaatccttcatgtaaatccttgagcaagcagtcaagcactcatttgcgacatatgcctctgcaatggagccctcaggccttgccatgttccttacaaagcgtttcaaggtcagcaacctacgctctacagggtacatccatccatattgaacaggacctcttaggattgcatcatcaattaaatgaatgcataagtgcaccatcacatcaaaaaaggcaggcgggaaaatcttctcaagcttgcacaatattattgggatttcacctctcatcttgttcaaagcatctaacttcaatttcttagcacaaatttgctggaaaaagttacctaattcagcaattgtttcatatatttccttatgcatgattcctcggagaccggctggtaatatcctttgcagaaggatatgacagtcgtgagttttcaatgcctgtactttgcattcatcaacactaacacaccttgctaagttggaggcatatccatctgggaatttgacattttttatgaaagcacagaaagcttttctctgggctttagtcatcacatatggagcatgtggagcagtgcatgttgaattcccatcatccttcaagtgtaaatttttccttatgcccatatcttctaaatcgagcctcgcagtaacagagtcctttgacttgcctgcgatgtcgagaaatgtaccaagaagggcctcacatatatttttctcgatatgcataacatcaagattgtgtcgtagctttaaattagaccaatatggcaaatcccacagagtcgacctgcgcttccagcattgaccttcttctaccctctttctctttttgttattaggatggttcccaggtcttacatgttccaccctcgccaattgctgcatcaactcatcctgagtaaattcttccggttgcgcacgttcttcagtctgaccattaaaatctttctttctcctccaaatatggtccactggaagaaaacggcgatggccaatgtagcaaatcttgttcctaagtcttttgtagcaaggatttttatcacaacaaacgcaagcatagtagcctctagttactctacctgaaagtgtgctcaatgctggataatcatgaatgcaccatatgattgcagcgtgaagatcaaattctttgccggtcaatgcatccaaagtagggacaccactccaaagatttaacaattcttcaaccagtggctgcaggaagagatccatatcctttccagggcatgtcggaccaagaataagtaggcacatcatgaagttggattgctccatacattgccacggaggaaagttgtaagggataagaaatactggccacatgctatatgaggagctcatcttcccaaatggattaaacccatcagtagcgaggccaagtcggacattccgtgcatcatttgcaaaccattcatactttctatcaaaatctttccatgcctcaccatcagcaggatggctaagctcattgtccactggtttcctcttcaacttgtgccattgtgcctcagctgaaagttctttcgatccaaacatcctcttcaaccttggaatcaaaggaaaatgccttagaaccttttctggaatcttccttcggctatctgcatccttccatcttgaagcaccacatattgggcatgcatcctttttagccaactcctttcggaaaagaacacagttattcggacacacatgtattgactcatatccaagtcctaatgcacgaataaaattcttcgcttcagcataggatgcagggagagaacaatttggaaatgctgaacttaaaaggtcaaaaaaagcactgaatgcaacattgctgattctgtaaaatgacttgatgtggagcaacttcaccacaaaagaaaacctagtatagggaccaccggggtgtagcacctgtttcatctcttctaatatggtggcaaactttgactttgttcttggtccatgattttgatctgggtacagatcctgtaccatacggtacatttgatcatcttctgggtcatccggaggctcattcgtctcaaattcaacattgcagctaacatcttcattcaaatgctcaacatttccagtgacaatgaccaatggttctccatgatgtatccaccgagtgtatgtgttagacatcccgtacataagtaagtcatcctccacacgtcgacatgggcataatatcttctgactgccactcaaatttttacaaacaaagtccatgaactcagtgaccccctcccgatgctccttgctaaacaacttacaattcatccaagttctttccatccgccgtcggcagtgatcccaggctagagctcttgggggcttcctagcggttgagcccgtgaagcccagcggccaggatctgcagccagccggcccagccgtcgagatcctagaggcgggggcgggctactgtcgtcggcgtcgggctcttgggggcgttcccagcagttgtgcccatgaagcccggcgtcctggagctgcagcaagctggcatcgagctcctggggacggggtggggcttgggatccagccggcggtgccgggctccagcagccgcgttgggcgaagggcgacagcgtcgagctccaacagccgggcgctacgttggggacagggtggggctacagcctgcgtcgtcgggctccagcaggagcaatgggaaagggcggcggcgtcgggtccatctggcgcgatggggaaagggcggtggcggcggcgtcgggtccagcagccgcgatggggaaagggcagcggcgtcggtccttgccagatgtgcgttgggattcttatgtctcccagcaatagtgtacaagatgaaaagaatcaaagattacatagcatcggaagagtag

SEQ ID NO: 42260 - DNA, 3741 bp, Oryza sativa
  Clone ID: PAT_MRT4530_4552C.1
atggaggaggaggagcagcccggggccggcgcgccggcgccggagcccttgccgtcgcagctagaatgcactggacttagagtattcttttacataccagatattttgaagaacaccattcagtcattacgtgatagcaacagacacgactttgatgcttgggtgtcattaattaaagctgctgaagaaacttcaatgaatgacatcgaggttattgacttggtgtaccacagcttcttattggaatttcctttgtgctatggctactggatcaagtatgcagcccacaaagcacgactatgcacaaacaaacaggtggaggaggtgtatgaacaagcagtccaagcagtgcctcactctattgatctttgggtcagttattgtggatttgctatgtgcacatatgaagagcctgctcatattagaagattattcgaaagggctttatctcttgttgggaaggattatttgtgctatcacctatgggacaagtacatagaatttgaaaaatctcaaaagcagttaattcagcttgctacaatttatattgacaccctaaaatttcctacaaagaagttgcgtcggtactatgagagcttcagaaagttggtaactttgatggaacatgaggctgctggtgctgaaaggtcatcagaaaacttgcgtactttggaagtgataaaggctgaggattctgaagtggatgcttcaattaagatttctgccttacttgatgaacatagtgggcaccttagggctgatgcagtcaagcagtacttactttctggggaaagtctctaccaaaggtccagtaaaatcgataaagaaatctcttgcttcgaggcatccataaagagaccattttttcatgtcaagccacttgatgatgaccagcttgaaaactggcaccggtatcttgactttgttgagaagaagggcgattttgactgggctgtaaaactttatgagaggtgtttgattccttgtgctaattattctgaattttggatccgctatgcggaatttgtggatgctaagggtggccgagagattgcaagctatgctcttggtcgagcgtcatcatattttgtgaagggagtcccgacattccacatgtattatgcgatgtttaaagagcaaattggtgatgcacaaggtgctcgttctctttttattgaaggaagcaataatctcacttcgaatttctgtgcgaacattaataggctggcaaacatggagaaacgcatgggaaatactaaagcagcttctgaaatatatgagactgcaattcaggatgccatgcagaagaacgttaaaattcttccagacttgtacacaaattttgcacaattcaaatatgcgattacctatgtagggtatactcttgtgcaatattcttcactaactactttctgcatcttccattattcatcttcctgcttttcagctgatatgctctatattctacagggattcatgcagttcatgagtacacatggaggacccacagaaattcctatacttgattctgttatttctaatgctgtagttcctggatctgatatatcaacagttttaagtcgtgaagaccgtgaagatatttcattgctatttttggagtttgttgacctttacggggatgttagagatctcagaaaggcatgggctcggcacagtaaactattccctcacaacacaaggcacatgttgcagcagtattgtaacagtgagaatagcctgcaagagaataacaagaggagaagaactgaaaattatattgtttctcaagatgattctccaaaagacgcaataacattgaaacagttgtccaaaagtgatacttctctgctagttgataaagtggttgggttgcaagtggacaagagcactgtggattcaggaataggacatacagtagaagagcagaacatattagggaatgttgatgtgcatcatgaggttggtgatacagctcaggaatgcattgacatgactgatagtcaacataacttggacaaatctggaatgcaaaaccaagtgagtgcacacggtactcatgagtcatgcgaacaaaatgatcagacaacagaatctcatccatctgtatgtgagaatgctccacatgcagaatcatttacttgtgattctccttccaaatctaattctttctccaagataagtgctctagacaaagctaacaccattgatgtatctgctagtgttgatcaaggagcaatatgcccaagatctgattctccatctgtggcaagcttacccaaggaagaaacttctcctgatccagttcgaatatctcctgagttggaggaaaagaagcatgataaaatccagggacaactggaaacaaaggatgatatgtctctcagtaacgcaaatatagagaagtctagtgatagtccagatgcaactcaacatgatagggaagtatctgcactcagtcaagagcatgttcaatctgcacagccacaacagctgccagactgtgcaagaccatccagctcagaaatggcaactacaccagctaccacatcttcccaattttcacctagcaccgcagtgacatctcaagctcaacttcagcaccagattgttagttctcaaatgcaccaatccgacaagctttctttggctgaacaaaatacgcagcagcaagggcttgcttatgaaattcctcagaatgtccaggcatcctcgcagagtcaagctcaaatctttgcacagcctaaccagggagaccagcaaagcctccaaacgatgcaggggtatgcatctcagatgtggcaatactaccagcaacagatgtactacctgcaggcccagcacaatcagcagttgcagagcctgcaacagcagcagcttccaactgagcatctccagcaaaattttatgcagcaggtacaacagctgaaccaacagatggtactttggcagcaacaagtacagcagcagcagcagcagcagcagcagcagcagcaacaacagcaacaactacagctacaacagcatgcactgccagttcagcaacagcctgaccaaaaatacagtcagttaccttcctcgggggatactagacatgaacaaaataaaccgcagaaacttgaatctcaaatggatcatcaaagcgaacttgtgcagcagcagcaagtttatttccagcaacagcagcaaatgtatcttatgcagcagcagcagatgtatcaacagcagcaacagctgcagcagcagctacttcaacagcaattattgcagcaacaacagtatctctcgcagatgccacagcagcaacaaaacatgacacagcaacagcagctatttcaacagcaacagcagcaactatttcagcagcaacagcagcaaatggtagttttgcagcagcagcagcagcaacagtttatccaacagcagatgcagcaataccttcaacagcaaacaaaccaacaaggggccaattctcagagttgtgaattaaatcctcaggtactaatctcattctacccgacctaaggtcaacaatccgaagcatcacagagtgatggctctaagttacggagtggcgaacaatctgaattatcctatccgtccaccccacaatctcagcactcaaatcgctaattcatgtgtattgcccatgtgcattgttagcaaaggatccgtgaaattccacttaatggtctcggtgccattggatgcatttatccatcaaaatatctcaggaaagggatg

SEQ ID NO: 42261 - DNA, 432 bp, Oryza sativa
  Clone ID: PAT_MRT4530_45530C.1
gcacgaggtattcgtttacctcacaggtcaaggtcccccaatattcttctgtcaaatcctatttatttctaataatcaatctttgtgtgtgaaaaaaaaaacatgaagtttcactctctgctttggctttggccaatgccgtctacggcaacccgctggataggtagtactacgaccagtaccacatacacgcctaccccccaacaagaccctcacggcgggcatacacacatagtacatacactgcctattgcccagtcagactagtacctacaactacgtcgggcaagtatagagcccttcaagcccatactactagagatatcgcggcatagttcaacaatggaacaaaggtctgcataggctataggtggataggggagacaatgtcggcttacagcaaggccgccctcaccgacgagagccgcaagg

SEQ ID NO: 42262 - DNA, 1446 bp, Oryza sativa
  Clone ID: PAT_MRT4530_45531C.1
atggcggcgagcggcggcaccgagaggctggccttcctggtcgaccggcattggcccgccgtgtcccgggcctgcgtgagctccggccgcctcgcgctcgccgcgctgcggcaatggcgcggctgcgcggcgcgcgggatcctggagatggctagcctgggccctgcgtccgtgttcgtcatcctctggagcttcttcgtgtgcatcacctcgccggcgtgcgccctctacgcgctcctgggcatgggagctgctggggcagtcattcattacatgggctatacgcctggtcttttcattgtaggattatttggaatattgattatgtggatgtatggctatttctggattacaggaatgcttctgattgctggaggctgtatgtgctctttgaaacatgcacgatttgtgatacctgtgttggctatgtatgctgtttattgtgtggctgttcgtgttggatcgcttggtgtcttcttgacattgaatctttctttcctgacaaatgatcttctgaataagttgctgcaaggatacgagggaagcacagaagaaagacagtttgaagagccaaaacattctgatcctgtcatggatgagttctatcgcagttgtgaatttccctctgctcctgatagtgaacctgagactgtttcttctgcaaagcccttttgctcaacacccgtccaggatgtgttgcatgtacagaaagaggcatctcctagcaaagtagtgaaatcggattctgtttcattggatgagatgaagaggatcatggatggtttgacccattatgaagttttgggtattcctcggaatagaagtattgatcaaaagattctgaaaaaggagtaccacagaatggtcctgcttgtacatcctgataaaaatatgggaaatccactggcctgtgaatcattcaaaaagcttcagtcagcttatgaggtactctcagatttcacaaagaaaaacacttacgacgaccaactgaggaaagaagaatcacgtaaaatgactcagagatcacgtgttgtctctcaacaggattgctctgattttcatccagctaaggatggagatggatgggtggaaaataaattttcgtcatccttcaaggaaatacctcgagcttttgtttgtgcggagagtaaggtatttgatgtgtctgaatgggctacttgccagggcatggagtgcaaacctaacactcacggcccatcttttatggtaaacatggttggcgcagataggatgtctcagagatcctacagttctcgctatccctttagtttgaatgctgagatgatccctgaagatgaatttgagctatggcttcaacaagcattggcatcaggtgtcttctctgacagcccgaaacgcaggaaaagctggagccccttcaaactacctcaaaaagggataaaaagttggcggcgatcctcataa

SEQ ID NO: 42263 - DNA, 728 bp, Oryza sativa
  Clone ID: PAT_MRT4530_45532C.1
gttgtcaccttgcaatggcgatggcgtcgagcagtggagactggagagccatgttctagctcggccacgcccacgcccacacccacggcagcaaccatggatgccaaactgacggtggcaactagctagcttagctgtggtgattgccagcaactattgagcaatcaagactctaattcttcgatggtggcgtcgggcaacaacacggcagcaccgctggcgaatacgctcccggcggtcattaatcccctactgctagcaacggcctgcactggctctcccaagggactggatcttcttctcaacagcaaggttgcagcaggtgatcaacgagtgctaccattcgcacttggaagccagagatttcgtgacctgatatcagcatatacctccagcgacagatcctccttagcgacgccgacgcagcgaatccctcctcatgacgacccagaagcacttttggcagagatgctgatgctggaaggggtcgcagttgatggggacaccgtgcttcacgcggtggccacctatggcgagaatgatgactttcagaagtgtgctcaaactatgtgcagcaaggcgaggcagctcctcttcaagcaaaacaagaacggtgacacgcccctgcactgcgctgcacgggcaggtaaaatccaaatggtctcttgcctcattgatctggccagaggcggtggcggcgacggcaacagcagcagcagcagcagcaa

SEQ ID NO: 42264 - DNA, 294 bp, Oryza sativa
  Clone ID: PAT_MRT4530_45533C.1
atagagatccaatatgagcttaattcggataaggatccgaataggagtcctacgggtcttggaggcccgagtgatggatcctatatattcgtgaggggtgtgaccggcggaggtattgcatcaccgtgggagtacggcgaggagaacacacgaggaggagaaggtcgagccggtgcgatctactacttcctctacatcgacgcgcgctacttcgcgagagttccttcgacttctcagcgtcttcttccactgcacagcgcgtcgagtggtaactgttgtacaaaaaaaataaac

SEQ ID NO: 42265 - DNA, 1230 bp, Oryza sativa
  Clone ID: PAT_MRT4530_45534C.1
caatgctaacaagaaaaagaaagtaattcattaaaacggtgcaagcgatcaatcaactttttcttcaggtccttcctctctaaacaccatcagtgccaacaagctacattcataactttattattaaggcagatgatcgtacgaagcctaaacatcgtaacaaaaaaaaccgtgtttgttatgataaaagatctgatagtagtatttggaaagggatctagcagccaacctatagccagtgaagatggccacacggtgatgttgaagaagaagtctatttttttgggagttaccctattcggaagtcttagacatccgccaagcaattgacgtgatgcatctaactaaggagaaaggaagccattacttgagtcaaaccagctacactctgagcaaggcagagaaggaaagtatgttgaatgctcgaacaacatcaaggtaccgtctagatactctttgaatatgaagggaataataagcatgaaggaaaagaagatcacaaacctaaagtctcatgactgtcacatgtcgatgacaaagctgcttcctgtgatatctcggggtatctttcctgataatgtccggacaataataacaaagcaatgtgcattcctgaatgcaacttcgcagaacattatcgatccagacagattgacaacccttcaaaatgacgtggtgcaatgtctcgttagctttaagatgatcttttcaccatccttcttcaatataatggcgcatcttctatgtcatcttgtcaaagagatcggtattttcggtcctgtatacctacacaaaatgttcactttcgagagaagcaaccatcgccaagggtatgtaacaaaggaggtcattgagttatgcgtataatttattgaagaccttcgtctaattggggtccccgaatcaagccatgaggggagactacggggaaaggggactcttggaaggaaaacattaatgattgtacaacgatttattctgtaaatcacattttatggttttgcaacaattttcgttggtggctccttacatcgaggagcacttggcagttcttcactccaaaaacataggtatgtccgatgtccagattacacgccatcacattgatatttttcccgcttgattgcgacaacatctcatgagtaacgagacgattgaccaacaactacccttttggcgagggtaccatcttcctcgatctcgacattttaaggatatgagatcgataaa

SEQ ID NO: 42266 - DNA, 224 bp, Oryza sativa
  Clone ID: PAT_MRT4530_45535C.1
gggagaggttatggaagaagagttagagtactactacttggaaagcgaggagttgggagcaaacacgatagaggctgatccctgtacgagacggcgaaatcggccccgccactattaatcgagtttgattgccatatataggtgtaggaacgggaccgggaaagagttcgatcgttataggatcattgatcgatcaattcatagttttgcgaagggtgaagcaa

SEQ ID NO: 42267 - DNA, 1231 bp, Oryza sativa
  Clone ID: PAT_MRT4530_45536C.1
atgtcgacggcggcggcggccgcggcgtccacctcgctccggccggcctcccagtccgcgctccgtctcgcgggttcgccgcggcggtggtgctggggagccccggcgctctcccctgcgaggagagcattccacgcggacacgcggaggcggaagactttgttatatgcaactgataaaggcccagaagaatccttgaagaagacaattgaagttgacaggttgatcgagatgctgagggatgcaaatcctagagagaaagactatgaagaattggctgaaaatgtcatgaacatagttgaccgtcttgtccataagactgatgaaaagattgaacagtcaactgatgtgctgaaggcaattattagtcctgtgatgcacgaaggtgaaaacgccacgtggccaccgagagatccggaggctctcaaattgatggagaaagaaatttcaaatagagaaaaagaaggacagctagacgaaggatttctgtcagaggttaatgctcagttgaggcaggctaaacaagatggagataaaccaggacttcaagctatgctgcagaaggtgttgcagctgtatgcgtccaattttctccaaaagcgtagttacgcttacaaagggggagaagtaatagtgcctgaaagttttcttgaatctgtaataaaggctccggaaaacgagtggaacaagctgttgcttgatgggttaacagtggggaaaggaaatgtttcaccagaagaattttatgctgttataaagaagagaattgagagagtcttaattcgcacagaaggaggttcttatcagcagcgcatactcgttgaatatctaaaagagatacaggctagagcggaggaagttgtgaaggtgcttcaaggaccaaccatatgatgatgtctggtggtcgattttaaacagtgcaggttatccagttcgatcatggttttgacgcatcacctagcaaaagcttagaaggcgacaacagacaacctaactagttgtctgattcaggaacccgagataagcatagcgagaagagaaacagatccaaatgtcctaaaggagtgcgtgattttcattccccactttggtcttcatctcgaatggccgattttgctgttggaatgtttgatttctgttctgtctgattgacacttgacacgagtgagcttgactaagctgtagtaatatgtgaatcggtttttgttgtgtaagggagaaggttcaatgc

SEQ ID NO: 42268 - DNA, 1136 bp, Oryza sativa
  Clone ID: PAT_MRT4530_45537C.1
ctaaggaccctcgctgatgtgtctgaggagagccttgccagtccttgttaaaactccaagaaacaatggagctccttgatcggcgctgattactaaagcttcttctcggcccattctcatacggtgatggaaagcttccccgccgcctcgcatccgcatatgttcgacatccagagcactaacacaagtcgactgttcaaatccacggcaacacgaggaaggaaccgaagggacatggcagtggctccgtttccgcttcagcttttgcatccgattcatctttagattctgccataatagctgtcgggcaaagtaactccatcggagaaggtgaatgtctgagtgccgcgcggaagcaatagtgggcatgggcaggaagcagagcggaggtggcatgctatggtagtatggcatatgggcgactggcttctcaccatatgggcgattctcttcggtcttgctccaactattgcagtcttgcagcctcggtgagctttccaggctttcaaagaagatctgaagtccaatatatttcttccattcttcgtgagtattcttctcccattcattttgttcatcttctatcgccgccgcatccccttttgccgtcgggctatcgacgccacctcccctcccgccagatctggcagaggggagggcaccaccgccacctcccggtctgtcggaccactgccgcctcccctcctgccaccgagccgctgccgccgccgcatcccctcccaccgccgcacactgtagcggccactgcctccgggtcattgccgagagagagagagagagagagagagagggggaatggataagatgtggggaggagaggaggggataagatgtggagcagtggaggtcagttcggctcggctcggctcaaatttagggggtgtcagtttttaattaatcgacacattgaacatattaaatgtttgtcggttattatttagaaccggcacctataattgtttaaaggtgtcgttttttgcgatttcaacccgtggaggtggggaaaacgcctataggttccggttttagcacttccggcacctatagtgccgacatctatttgatgttttgtagtagtgattgtacaccacatagaacaagttgatcttctatct

SEQ ID NO: 42269 - DNA, 210 bp, Oryza sativa
  Clone ID: PAT_MRT4530_45538C.1
tgactgtgcatgcacgcgctacgtaagcttggatcctctagagcggccgcccacctccggggatcctcatctccggcgcggagcttcctcatccggcccggcgcccgcccaattgcccggcgcgcctccgccgtgctgcaagggaatcgcccggcgccgccgtatcccaccccgaaatcgtcgataccgttaggctggattgcgatgctg

SEQ ID NO: 42270 - DNA, 402 bp, Oryza sativa
  Clone ID: PAT_MRT4530_45539C.1
attgcaacatatgatagctgtattctattttattttatagtattttctcgttgcctgttcaagctcatgagcgactgagcgcatgagggcttcatttctattatttatttctcgctaaccgttcaggatcaatgagccatggagcatatgagggatttatttttattattgatttcctactagcagttcaagctcatgagcgatggagcatgactaacttttttttttgatgcttacaggctaggctcatgaagcattggagcgtatggcggattttgatttttttgcgcttgcagtataagctgtaaagagcattgcagcatatagtggcgccaattttttctattcatctctcgctaacagtctaagctcatgagcagtatgcccatatgaagttctttt

SEQ ID NO: 42271 - DNA, 116 bp, Oryza sativa
  Clone ID: PAT_MRT4530_4553C.1
tcgttgacgcgtgggggccatcctagtaacttcagtccatatggttgggaagtggcgcatctagctgactgctagatgactagacgaaaatattactgcattggaccacgcgtaga

SEQ ID NO: 42272 - DNA, 222 bp, Oryza sativa
  Clone ID: PAT_MRT4530_45540C.1
atggaggccaagcacgccgccgtcccgaggctgtggaagcttggtgggcatgccgttgtgcaccgcaacgacaatgacgggaggggtggatccggcctccacgcgcgcggtccgccgacggtggcgacgggaggggctgatccggcctccacgcgtcccctccccctcctgcccggatcccgccgcctctccgccgatggcggcgacgggaagggcggatga

SEQ ID NO: 42273 - DNA, 3858 bp, Oryza sativa
  Clone ID: PAT_MRT4530_45541C.1
cccacactctctacccccaaacttgccctccaatctatctccgccgccgccgccgcctccgccgcgagagggcgtcgccgagctgcgcgggaggctcgcctcccgcagcatctggccggattcgtcgtagtcgaggcagctgtaagcgagagagagggagatggccgcggccgccgggaaggcggcgatggagcggcaccagtcgatcgacgcgcagctgcggctgctcgcgccggggaaggtatccgaggacgacaagctcgtcgagtacgacgccctcctcgtcgaccgcttcctcgacatcctccaggacctgcacggccctcacctccgcgaattcgtgcaggagtgctacgagctgtcggcggagtacgagaacgacagggacgaggcgcggctcgacgagctggggaggaagctcaccagcctgccgccgggggactccatcgtcgtctccagctccttctcgcacatgctcaacctcgccaacctcgccgaggaggtgcagatcgcgcaccgccgccggatcaagctcaagcgcggggacttcgccgacgaggcctccgcgcccaccgagtccgacatcgaggagacgctcaagcgcctcgtcacccagctcggcaagtcgagggaggaggtgttcgatgcgctcaagaaccagaccgttgacctcgtgttcaccgcgcatccaacgcagtccgtcaggaggtccctgctccagaagcacgggaggatccggaattgcctgaggcagttatatgcgaaagacatcactgctgatgacaagcaggagcttgatgaggccctgcagagggagattcaagcagctttcagaactgatgaaatccgcaggactcctcccactcctcaggatgaaatgcgcgccgggatgagttattttcatgaaactatatggaagggtgtaccaaagttcttgcgccgcattgatactgctctgaaaaatattgggattaatgagcgtcttccttacaatgctcctctcatccagttctcatcctggatgggtggtgaccgtgatggaaacccaagagttacaccagaggttacaagagatgtatgcttgttggcaagaatgatggctgctaacctgtacttctctcagatagaagatctgatgtttgagctctctatgtggcgctgcagtgatgaacttcgaattcgtgcagatgatttgcattgctcctccagaaaagctgcaaagcactatatagaattctggaagcaaattcctccaaatgagccttatcgtgtcatacttggtggtgtcagggataaattgtactatacgcgtgaacgtactcgccatctattgacaactggagtttctgaaattccagaggaggcaacgtttactaatgttgaagagtttctggagccgcttgagctgtgctacagatcattatgtgcttgtggtgacaaacctatagctgatggaagccttcttgatttcttgcgtcaagtatcaacttttgggctggctcttgtaaaacttgacataaggcaggagtctgatcgacacactgatgtccttgatgccataactacatatcttgggattggatcttacgctgaatggtctgaggagaaacgccaggattggcttttgtccgaactaaggggcaaacgtcctttgtttggtcctgatcttcctcagactgaagaaattgctgatgttttaggaacatttcacgtccttgctgagctcccggcagattgttttggtgcttacatcatctcaatggcaactgcaccatctgatgtgcttgctgtggagcttctacagcgggagtgccatataaaacagcctctgcgagttgttcccctatttgagaaacttgcagatcttgaagcagctccagcagcggtggcacgactattttcaatagactggtacatgaataggattaatggcaagcaggaggtcatgattggatactcagactctggcaaggatgctggtcgtctttctgcagcatggcaaatgtacaaagcacaagaggagcttgtcaaggtggcaaagcattatggtgtaaagttgacaatgttccatggaagaggtggaacagttggcagaggaggtggtcccagtcatcttgccatattatctcaaccaccagacacgatacatggatcacttcgtgtaacagtacagggcgaggttattgaacactcgtttggagaggaacacttgtgctttagaactctgcagcgctttactgcagctactcttgagcatggaatgcatcctccaatttcccccaaaccagaatggcgtgctctaatggatgagatggctgttgtggcaacaaaggaatatcgatcaatcgtcttcaaggagccacggtttgttgaatacttccgatcggcaacacctgagacagaatatggcaggatgaacattggtagccgaccatcaaagagaaagcctagtggtggcattgaatcgctccgtgcaattccttggatttttgcttggacacaaactaggtttcatcttcctgtatggcttggatttggtggagcgttcaaacatataatgcagaaggatatcaggaacatccatacactgaaagaaatgtacaatgagtggccattcttcagggtcaccttggacttgcttgagatggttttcgccaagggagatccaggaattgctgctttatatgacaaattgcttgtggcaggtgatctgcaatcctttggagagcagctgagaaacaactttgaagagacaaaacagctactccttcaggttgccggtcacaaggatattctggaaggggatccttacctgaagcagcgtctgcggctgcgtgagtcgtacatcactaccttgaacgtttgccaagcctacaccctgaagcggataagggaccctagcttcgaggtgatgtcgcagccggccttgtcgaaggagttcgtcgacagcaaccagcctgccgagctggtccaactgaacgctgcgagcgagtacgcacctggcctggaggacaccctcatcctgacgatgaagggcattgctgccggcatgcagaacacaggctagattgtccacaagaatgcttccagcaggtgcaatcaatcaatcatcaataactccttccatgatgagatggtgaatatgtttaactagtacgttcgccgatgctagtgaattctggagacttttttttgctcgcacgttttcttttggttgtgtacttgatgtaaatgtcaaggggggacttatttggcttttgcagcccgatccaaaataaaatatggaccaatcattctacgaaaaaaaaatctgaacaaatcggtagttgccgaaagatatgtttcggtccttcctattttttctctttttttgttgggcgtttgggttggttgagtcagcgttataagcggatagtatctcttcctggttaggtgtcgattctctcctgcttcttgtccttgttttagttggtgattgtgcttggtgcgtttggtttttgtgtttatgttgtttgcttgtgggcgttgtgcagtggtgcgtttggtgcgggtgggctgtgtaggtgggcggcgttatgtggggtcgtattatgtctcatcttatttgtaaaattattatttccgcttttatattttctctatatttctccttatgtatcttccacccgctttttttcctttctaaatttctattctacttttctcctctcttattattttttttcttatcatttttaatttatactcattcgccatatttatttctcagcctcctaatcattcctatatttctttcattacgttctattcaccaatgttggatcaatataataaaacacactctcttttcttatcccc

SEQ ID NO: 42274 - DNA, 2973 bp, Oryza sativa
  Clone ID: PAT_MRT4530_45542C.1
atggccgcggccgccgggaaggcggcgatggagcggcaccagtcgatcgacgcgcagctgcggctgctcgcgccggggaaggtatccgaggacgacaagctcgtcgagtacgacgccctcctcgtcgaccgcttcctcgacatcctccaggacctgcacggccctcacctccgcgaattcgtaacttacttgcttcccagatcctgttgctcgtgcccgccacctgttcgatcgattgcccacacggtgcaggagtgctacgagctgtcggcggagtacgagaacgacagggacgaggcgcggctcgacgagctggggaggaagctcaccagcctgccgccgggggactccatcgtcgtctccagctccttctcgcacatgctcaacctcgccaacctcgccgaggaggtgcagatcgcgcaccgccgccggatcaagctcaagcgcggggacttcgccgacgaggcctccgcgcccaccgagtccgacatcgaggagacgctcaagcgcctcgtcacccagctcggcaagtcgagggaggaggtgttcgatgcgctcaagaaccagaccgttgacctcgtgttcaccgcgcatccaacgcagtccgtcaggaggtccctgctccagaagcacgggaggatccggaattgcctgaggcagttatatgcgaaagacatcactgctgatgacaagcaggagcttgatgaggccctgcagagggagattcaagcagctttcagaactgatgaaatccgcaggactcctcccactcctcaggatgaaatgcgcgccgggatgagttattttcatgaaactatatggaagggtgtaccaaagttcttgcgccgcattgatactgctctgaaaaatattgggattaatgagcgtcttccttacaatgctcctctcatccagttctcatcctggatgggtggtgaccgtgatggaaacccaagagttacaccagaggttacaagagatgtatgcttgttggcaagaatgatggctgctaacctgtacttctctcagatagaagatctgatgtttgagctctctatgtggcgctgcagtgatgaacttcgaattcgtgcagatgatttgcattgctcctccagaaaagctgcaaagcactatatagaattctggaagcaaattcctccaaatgagccttatcgtgtcatacttggtggtgtcagggataaattgtactatacgcgtgaacgtactcgccatctattgacaactggagtttctgaaattccagaggaggcaacgtttactaatgttgaagagtttctggagccgcttgagctgtgctacagatcattatgtgcttgtggtgacaaacctatagctgatggaagccttcttgatttcttgcgtcaagtatcaacttttgggctggctcttgtaaaacttgacataaggcaggagtctgatcgacacactgatgtccttgatgccataactacatatcttgggattggatcttacgctgaatggtctgaggagaaacgccaggattggcttttgtccgaactaaggggcaaacgtcctttgtttggtcctgatcttcctcagactgaagaaattgctgatgttttaggaacatttcacgtccttgctgagctcccggcagattgttttggtgcttacatcatctcaatggcaactgcaccatctgatgtgcttgctgtggagcttctacagcgggagtgccatataaaacagcctctgcgagttgttcccctatttgagaaacttgcagatcttgaagcagctccagcagcggtggcacgactattttcaatagactggtacatgaataggattaatggcaagcaggaggtcatgattggatactcagactctggcaaggatgctggtcgtctttctgcagcatggcaaatgtacaaagcacaagaggagcttgtcaaggtggcaaagcattatggtgtaaagttgacaatgttccatggaagaggtggaacagttggcagaggaggtggtcccagtcatcttgccatattatctcaaccaccagacacgatacatggatcacttcgtgtaacagtacagggcgaggttattgaacactcgtttggagaggaacacttgtgctttagaactctgcagcgctttactgcagctactcttgagcatggaatgcatcctccaatttcccccaaaccagaatggcgtgctctaatggatgagatggctgttgtggcaacaaaggaatatcgatcaatcgtcttcaaggagccacggtttgttgaatacttccgatcggcaacacctgagacagaatatggcaggatgaacattggtagccgaccatcaaagagaaagcctagtggtggcattgaatcgctccgtgcaattccttggatttttgcttggacacaaactaggtttcatcttcctgtatggcttggatttggtggagcgttcaaacatataatgcagaaggatatcaggaacatccatacactgaaagaaatgtacaatgagtggccattcttcagggtcaccttggacttgcttgagatggttttcgccaagggagatccaggaattgctgctttatatgacaaattgcttgtggcaggtgatctgcaatcctttggagagcagctgagaaacaactttgaagagacaaaacagctactccttcaggttgccggtcacaaggatattctggaaggggatccttacctgaagcagcgtctgcggctgcgtgagtcgtacatcactaccttgaacgtttgccaagcctacaccctgaagcggataagggaccctagcttcgaggtgatgtcgcagccggccttgtcgaaggagttcgtcgacagcaaccagcctgccgagctggtccaactgaacgctgcgagcgagtacgcacctggcctggaggacaccctcatcctgacgatgaagggcattgctgccggcatgcagaacacaggctag

SEQ ID NO: 42275 - DNA, 3102 bp, Oryza sativa
  Clone ID: PAT_MRT4530_45543C.1
atggcggaggagcacgagacgaggccgccgtccgccggaaggccgccgtcgtccggccgcggcagggccgacgacgctgacgagagggaggagggggagatcgccgacgacgactccggccacgcgccgccgcaggccaaccccgccgcgccgcacccgctcgagcacgcctggaccttctggttcgacaacccgcagggaaagtccaagcaggcaacctggggaagctccatccgccccatccacaccttctccaccgtcgaggacttctggagcctttataacaatatccatcacccaagcaagttggttgtgggagctgacttccattgctttaagaataaaatcgagccaaaatgggaagatcctatctgtgctaatggaggtaaatggaccttcagctgtggcagaggaaagtccgacacaatgtggttgcatactttattggcaatgattggcgaacaattcgattatggggatgaaatttgtggagcagttgttagtgtgcgtggcaagcaggaaagaatagctatctggactaaaaatgctgccaatgaagctgctcagataagcattgggaagcagtggaaagaatttctggattacaaggactcgattgggttcattgttcattgggatatactttccaaatatgaagacatgagcgagttatatgctgagagtttggacagagtgaaattgctaaccagcttgtggggtaactactccattccaaaagacaacccatacactgatgacagtgacttagaactagaagtttgggcattgggtcttagaaacccgtggagatgcagctttgattccgcgaggccttcctacttctaccgtgccgatgttggtcagtttcaggcattcagcacatggtatatttcagaatatgtatatagctatgttaaaatttcagaatatcttctactggtagtcgccgtgcaatctcgcgagttcccggctttctcccaccctccggaatcttccagaaccgttgagatcgcgcgactcttgagaaccgtgacctttatatactttctccccctcgacgcccccgtccaaacacgcaccaagccaccaaccgattccgatccaacgatctcgatcgcccgctccgcttcgcttcccgatcgatcagccccgccgccgcgcgcgatggccgacgaggcgaaggccaagggcaacgccgcgttctccgccggccgcttcgaggaggcggcggcgcacttcaccgacgccatcgcgctcgcgcccgacaaccacgtcctctactccaaccgatcggcggcctacgcctcgctccaccgctacccggaggcgctcgccgacgccgagaggaccgtcgcgctcaggcccgactgggccaagggttgctcccgcctcggcgccgcgcgcctcggcctcggcgacgccgcgggcgccgtggcggcctacgagaaggggctcgccctcgagccgtcgaacggggcactcaaggacggcctcgcccatgcccgccaggcgcgccgcccggcgccggcgtccggcgccggcgccatcggcaaggtgttccagggccccgagctctggagcaggatggccgccgaccccaccacgcgcccctacctcgaccagccggatttcatgcggatgctgcgcgacgtgcagcggaatcccagcagcctcaacaactacctctccgatccccggatggtccaggtgctcagcctcatgcttaacctcaggctaccgaacaatgacgcgcctccgcggccgccggcgcagtcgactccgccgcctccgccgcagcagcagcagcaccagccggagacgaaggcgagggaacctgaacccgagcccgagccgatggaggtgacagaggaggagaaggagcggaaggaaaggaaggccgcagcgcaggaggagaaagaagcgggcaacgccgcttacaagaaggattttgagacggcgatccaacactacacaaaagccatggagctcgacgatgaggacgtctcctacctcaccaaccgagccgccgtttaccttgagatgggaaagtatgatgagtgcatcaacgactgtgataaggctgttgagaggggaagggaacttcatgctgatttcaagatcatctctagggcactgaccagaaagggaactgctcttgctaagattgctaagtgcttcaaagattatgatgttgccattgagacttaccaaaaggctctgactgagcacagaaacccagataccctgaagaaactgaatgatgctgaaatagcaaagaaggagctagagcagcaagagtactatgatccaaaaatagctgatgaggagcgagagaaaggtggtgatgaggatgaaactttgattttggtccactcatgtgcaggtaatgaattcttcaagcagcagaaatacccagaagcagtgaagcattacagtgaagctctcaggagaaaccccaaggatccaagggtatacagcaacagggccgcctgttataccaagcttggagcaatgcctgaaggtctcaaagatgctgaaaaatgcattgaactagatcctacattctccaagggatacacaaggaaaggtgcaatccaatttttcatgaaagaatatgacaaagcactggaaacctatcaggccggcctaaagcatgacccgaacaaccaggagttgcttgatggtgttaggagatgtgtccagcggatcaacaaggctagcagaggggaactgagccaggaggaattgcaagaaagacagaacaaggctatgcaggacccagaaatccagaacattctgaaggatcctatcatgcagcaggtgttgaccgacttccaggagaatccgaaggctgctcaggcgcatctcaagaaccccggagtgatgcagaagatccagaagctaaaaaatgcctaaatagtccaaatgaagtagacatgctgaaagggccagggatagagtaatctgatcggtgtgcctggaaacttctgaatgcaaaattcgtcgtcgaatttttgtacagtacaatcgtgtttatgccaactccgattggtcatggcaaaaaaaaaaaaaaaaacgcgagactagttctctccctcgtgc

SEQ ID NO: 42276 - DNA, 558 bp, Oryza sativa
  Clone ID: PAT_MRT4530_45544C.1
atggtggaagcgaggaggtcggcgcttcagatccggtggcaccgtggtgaagctgcattcgatgacagcgtagtgaagcgtgcgacggcatggatcgggcggcgggggcaaatgagctcggtggaggggccttggtggtggagccctatggcgagattgggcaatctcgctgctcgttcaaggaggcattggctcgacagtggcctcgggggatgggccggccctaggcctatgcagacgaggcaatcaccagggggccatgatgaagaagaaacgcgcgaaagacgagaggagttgcaacgtcgtcggcaactcggcagacggcatcgcatcacacagggtatagccgcacaggcgcacaacatcgtcgactcgtctgcaacacagcaactcggcatcgcatcgcacagcacaagtcaacacttagccgcctgcctgcatggcgtcagcccgccggctgccaatcggcagcagcctcccgcctggagccctggacgcaatcacgcaagacagcaactcggcaagagtgcaagactagccgtccaggcatccagctga

SEQ ID NO: 42277 - DNA, 488 bp, Oryza sativa
  Clone ID: PAT_MRT4530_45545C.1
tccccgggctgcaggtttttttttttttcgcgaacgcacaaaagaattgcacgtcaatatattagagaatattgctttaattattgatctcgttacaacttaatatctgaagagatcatctcaaatctctatttacagtatatatcaattgcttgatttaggtagttagtcacttgtgcttctggatcatttccctaacctcatccatcacaagccatgctttatggcctcctatcacttccgctgcccattctccatccttccataactggatagtgggcattttagttatattccctcttttcaccacagtctgtggaactttgttgacatcgacaaagtagaacctgactcctggaaattctcctgctatcttctccagtctgggcttcagatatatgcatttccgacaccaactagccatccagtcgatgatgatgggctgcttgttctcgccaaacacgtggaaagacagaaattgagaatga

SEQ ID NO: 42278 - DNA, 243 bp, Oryza sativa
  Clone ID: PAT_MRT4530_45546C.1
atggccgttggtcacagacaagggaagggcggtctggaggctggacggatcgaaggagatggtgaagttcttcaactatggatagatttgctagaccttgctccgacatatgccatctgcttggtgaccatcgagttagtcaacgacactccactactcttatgtgtcagccgtaactcaaaaagtttccagtttcccttgcgaaaatgttgcaccggctatcagcatttttccagcaactag

SEQ ID NO: 42279 - DNA, 1324 bp, Oryza sativa
  Clone ID: PAT_MRT4530_45547C.1
gacatggcggccgaggagatcttggagctctccaatggccgcatcaccgccaagatcgccgcctggggcgccaccatcacctccctcatcgtccccgacgcccacgggaatctcgcggatgtggttcttggattcgacactctggagccttacatgcagtctgacggcagcagcaatggcggccgaggagatcttggacctctccaatggcgcgcatcaccgccaagatcgccgcctggggcgccaccatcacctccctcatcgtccacgacgcccgcgggaatctcgcggttgtggttcttggattcgacactctggagccttacatgaaaggcatatcaccttattttggatgcattgttggccttgttgcaaataggatcaaggagggaaagtttactctgaatggagttgagtattcactagctatcaataatggacccaacagtcttcatggtgggttgaaggggtttgacaaagtggtgtgggatgtagtagagcgcaaaagtgaatgcccatcaatcaccttccaatatcacagcaaggatggggaagagggctaccctggcgatgtgactgttcgagcaacatactctcttcctgattctaccaccttaagacttgacatggaagcagtagcagagaacaaagcgacgcccagggcacacctttcgacttcacaacagagcacaagattggagcccgcatcaacgatgtgcctggaggatatgaccataactatgtgctggactctggcgaagagaagaatggcctgaagcatgctgccaagctgaaagattcatcgaactcacggaccctggacctctggactgatgcacctggaatgcagttctacactgctaactatgtggatggcgtaactggcaaaggtggtgccgtttatgggaagcattccggagtatgcttggaaacccaggggtttcctaatgccatcaaccaacccaatttcccctccgtggtggtgcagcctggtgagaagtataagcacactatgctgtttgagttctcagcctaattagtgatgctgtgaacagctcaaatggctgcaactgcagctcattgtagaatcaaataagagaaaatctagcagaaatctaagatgtagagcaaagaataaatattagttaccagacctggatggttgtatcttgtcttacaaccagaataatataatacgaataaatatcagttaccagacctggatagttgtatcttgtcttacaaccagaataatataatacgaatgttcagaggtagatttatgaagtggttgcacgctcgtgggggggcccggaaaaaaaaa

SEQ ID NO: 42280 - DNA, 177 bp, Oryza sativa
  Clone ID: PAT_MRT4530_45548C.1
atggcccgactggggtcgtgcctatgttggcctggcccgatagccgggccgtgcctaggctactccctcggcacagcatccaacgggcattctgagggcggtggatccggcaacgccgccatcgggagagccggatctgccgcccgctgcagctgctcccgaggacaggggcgctag

SEQ ID NO: 42281 - DNA, 249 bp, Oryza sativa
  Clone ID: PAT_MRT4530_45549C.1
atggaggcaccgcaactggagacacgatggaagcgcaacagccggcaacgcggggccgagatgacggcacagcagccggcatgggcggcggcacggtggaagcgcagtagctggcaacgcgcggccgagacaacggcgcagccgccgacatgggcggcggtgcaaggagctgacgaggcgaagtggccgcgcagtgtcgctatcgcgtgcaacgacagcggcagcgctgatgcagtagctacacattga

SEQ ID NO: 42282 - DNA, 383 bp, Oryza sativa
  Clone ID: PAT_MRT4530_4554C.1
aatgaagaaatgggggcttatttttaacttccgaaccagtttggggggaaaacccattacaagacacccccaagggggggaaggggacggggggccccaaaatacccaggggggaaaccatatttaaaggggacgtaaaaagccaaaaaaagttgggcttgggccaaattcccctcaaaggagaaaacaccaaactgggggggttggagctgctgccctttggcctgaacaaaggtaagggcctgaaagggaaaaaggggcccccccagcgggagggggtgccaaacttggttgttttttagttgaaacacaccttattggaaaaaggggcttggccctatgccaaaatgggggcttaacaaattattatttgggctaaaaac

SEQ ID NO: 42283 - DNA, 951 bp, Oryza sativa
  Clone ID: PAT_MRT4530_45550C.1
tcgagtcgagtcgtgcacctcgtctcgtgctgctccatggcgtcctcgcctttcgccgccgccgtccagggcggcctcgcgctccggcccgtcgcgccgcggcggttgtcgtcgacgtcgagcgacgtggcgcggagcggcggcgtggcggcgtggcgtgctccgcggcggcggagggtggcgccggtgggtgacctgcgcccggccatcgacgagtacccggaggggatcctctccggcgagtggccggagaacttctccctcctcagctacgccgacctccgcgcctacctcgagtcgcagatcgtcaccaccgaccagatgagcccgacggcgaagctcggggaggtcatgtcgcggctcgtgcaggtggccatggcggaccagaggctggcggacatcgacgccttcttcgccgcgcagtccggcctgccggtgctcgacgaggaggggaggtgcatcggcgtcatctccaagaaggacaaggccaaggcatccaatgggttggactcaactgttggagaagtcatgtcatctcctgctataactctgacacccgagaagactgtattggaagctgctgctcttatgctcaaggagaaggttcacaggataccagtcgtgaatgaacaacagcaagtgatcgggatcgtcactcgcacggacgtattcaaggctttggaggccagcaaggtgtagtaagatcccagttaataataatcagtaaataaacatgctccttgtgtagatatcgatgccttcgtaggctgtcggggcgttgctcttgtacattaattctagctgtaaaatctggaagtgctcaagcctttctatgtactactcatgtgtcatgtttctgaacaagtaccttagggtgctggggtttgtgatcttcgttagttggttgctgaaatgcgtttaaaaaaaaaaaaaaaaaaaaaaaaaaaaaaa

SEQ ID NO: 42284 - DNA, 486 bp, Oryza sativa
  Clone ID: PAT_MRT4530_45551C.1
atggacaagttttttattagaaatccatcaactatgaacaccactagaggaagttctagtgcaaatgcatctagaccaataccgagagaaaattttgcagtgcctcaaccaattgatttggacaagcttccttgggatcctagtaaaaggaagagatggcagattattatcccaatcaacatgaagatataaggagaaagtatttagtttggggaccatatcagccacatgatgattttcaatatctgtataggttgattgggaataagaagaggcagttcaatccgtctaattggctagagtatagtgaaaaagatgacaaagcctactgtttatgttgctatttgtttagggacagcataaaagataatcactatgggtatgatgcatttgtcatagaaggtttctattcttggaacaagacaaagagattggtgactcatgttggtgaccgtaatagttttcacaacaaggcactaaagagtt

SEQ ID NO: 42285 - DNA, 427 bp, Oryza sativa
  Clone ID: PAT_MRT4530_45552C.1
cgtgcacgccgcgtacgctgcatgctctctagcggcggcctcctttttttttttttttttttttttttttttttttgagatacaaaatcccaatctgtttaatatcatatgaacattgattcatacaactcgtggcattcacattggcccatgtttgaatgatcttatctatgtatgcaccatgacatattggggggcatcaaatttttgttcttctgctggtgctgctggatgacaagagctggagcctgaacatgctacagttacaccagtctttggctcctttcacagattcagcaacaaacaaggatctttacatccctggggactgaaagatctgttacgaaatggcagcagcttaaacatggaggccgacaagggaggccttagctccatccttgaggccgagcaaggcatcttgctcccc

SEQ ID NO: 42286 - DNA, 771 bp, Oryza sativa
  Clone ID: PAT_MRT4530_45553C.1
atgctcgggttcatcgccggcaggttgaggcggccctcgaccctgctcaccgtcctccgtccaggccctgcagctgccgccaccaagaggagcatccaccaccaactcgtcgaccggcagaccaagaacgctccctcggccgcggcaggctgcatctgggccaccaccgtcgccggtagctgcagcaaggccggacctgcagcgcccaagctgccgctgttgcccggcaacacccccaccctgcgctctccatcggccgcggcaggctgcggctggggcctcatgagcgccgccgccgcaaccggcccaaagtcgaccgccctcgccgccgtctgcagcaggggcctcgcaaccgccgcctccgccaccgccgcaaagtggaccgccctcgctgccgtttgcagcaggggcctcgccaccgccaccggcaagtcgaccgtcctcgccgccgtgcgcgccaagatcgtcggggtggccgtggcgcttcgacgcgtcatggtgggatcccaaagggcccacatcgctttggctcgcctggcaaggatctaccggggcgatggttccaccatgccgcgggtggccacccccgccgacatgtccgtcgtggaggcgccttcatcttcttcttcgccctcgcgtgctcactgtgaaggccagcaaggctgtgaaggatggagctggagacctgggtgtgtacgcagacaacgatatcatcaaggcaatgaaagtcctcttcattcagcaggagtaagaactaaaccaggcctataa

SEQ ID NO: 42287 - DNA, 288 bp, Oryza sativa
  Clone ID: PAT_MRT4530_45554C.1
atggcccatggccaatcccttgcccagttgcccccgtgcctcgccgtcccgctcgcccgcgtccgggaagccatcgtcggagggggggtaactcaatgcgacataggtagatctgcaggcgccgtgctgggactacgaggagacggccgcggcggcggccacctttgccccgcctcgacggggaacctgctctacgtcttctccagattggctcatcctgctgcaacagttgcattcaccatgaagccacaatacctcctacgccgtgaatcctcctactatgcctag

SEQ ID NO: 42288 - DNA, 535 bp, Oryza sativa
  Clone ID: PAT_MRT4530_45555C.1
gcgcgtgcgcgtgaccgcccgcgccgagccgagccctcctttccgctccctggttgccgctccccgcgcgtcgttcgcgcgcgcgcccgcgtggtcgtcgcccgcgtcgcgcctgcaccgtttgcgccgcccggccccgcggccctgccgcgcatgcagccgctcggcaccgcagccagcgcgcgtgcccgagccgcgccgcccgttgttttccgcgcgcgcgtgccgtggtggccgaccgcctggtcgccgccgccgtcagcctctgccgcgcctgccgcccgtgtcgtcgcgccgctccaaaccgccccgccgtcatcgcctcggccccgccactcccgcgctagcctccaagggacggaggcagagctcctcctccctctgccgcgtcgcttcccctccctcctccttttcccgaagaggcaagggggcaagcccccttttctctccctcttttccttttcccctccccgccggcgtcatccgcctccgtcaccgttttggccgcgagcgccggcgccagctcgcgccttga

SEQ ID NO: 42289 - DNA, 946 bp, Oryza sativa
  unsure (1)..(946): unsure at all n locations
  Clone ID: PAT_MRT4530_45556C.1
cgctgatctcgagccgctgctggagacctgcgccgcgctccgggagctcgacctgtcggagttctactgctggaccgaggacgtcgtgagggcgctcaccacgcacccttccgccaccgcggcgctcacccacctcgacctcggcctcgccgccgccaccgacggcttcaaatcctccgagcttgggccaatcgcggcctcctgccccaacctccgcaagctcgtggtgccatgcttgttcaacccacggttcagcgattgcgtcggcgacgacgcgctgctctcgctggccaccagctgcccgcggctgaccgtcttgcggctcagcgagccgttcgaggctgcggccaacaaccacccggaggagatctccgacaccaacgccttcatcgccgcccgcctcgcgggctgcttcccggcggtgacctcgctcgccgtctactgccgcgaccccaccacgctcgccaacctcaccccgcactggcaggcctccctccgccgcgtcaagctcgtgcgctggcaccagcgcccgcccaccctccccgacggcgcggatctcgagccgctgctggagacctgcgccgcgctccgggagctcgacctgtcggagttctactgctggaccgaggacgtcgtgagggcgctcaccacgcacccttccgccaccgcggcgctcacccaccgacggcttcaaatcctccgagcttgggccaatcgcggcctcctgccccaacctccgcaagctcgtggcgccatgcttgttcaacccacggttcagcgattgcgtcggcgacgacgcgctgctctcgctggccaccagctgcccgcggctgaccgtcttgcggctcagcgagccgttcgaggctgcggccaacatccagagggaggaggcggccatcaccgttgcggngctagtcgccttcttcgcggcgctccccgcgctgga

SEQ ID NO: 42290 - DNA, 315 bp, Oryza sativa
  Clone ID: PAT_MRT4530_45557C.1
agggcggcctgtccttttttttttttttttttttttttttttttttttttttttttcaacgggtttattttcaacatattttacatggaagcaatttagctttttcatcggtgtttggaagataaaaatacattttaaccacctaaataacaccattgggttttgtttccaatagaaacagcccccaccccataagagtttgctagaaaaaaaaacgccaacagtttctttccctgattcaggaaaaacctttccccttaaaaggggggctagttaggaacccttgcggtctctacgggggacccccgggtccca

SEQ ID NO: 42291 - DNA, 1283 bp, Oryza sativa
  Clone ID: PAT_MRT4530_45558C.1
cggatttgtcttcgatgatgaggccctggtttgtgttctctatcttctcaagtaaaatacttatgttgctaagtaaatgcattactgctaagatctgtaaatctgtaatgatttacctttttttataaaaaatctgttatgactctctgtcacatgaatgatgttattcttttcacatcatagcttatgtggattaaggtgtatttctgggtcttcatatctataatttcatgagtgtccttgattctatatttgtgttattgcacggctgagggacggagtcttcgcccgacgggcgggtcccggccttgtcaggtaaaaacagtattaaacagcaaattggagtggacaccctcagcaactgcacaactcttgtggccgaacgtggagttcttggttacgaggtccgtcaaaaagcccaagaaaaaaagtgaggcagatcaaataacgcttgagtgctctattcgatagcagaaaaaaaacaaaaagctcgaagaaggtcagaacataagctgagggagcatgatgtccactctctcattatcttccccactcttcctggcagctcctcccaaagttcaaggtgtgatttcgtgtcgagcggctttagctagtgcatcatggaactctgttatgcttggaagaaagtcgaagaccagagagactatcgtccctgaccctgactatcgattgccaattgttatacttgggatagctggtgcatttgcatatgcagacaatcttcttgctgctgcacctgtaggcctactggggtgtcttcttttgttccagactactagagtacgatttgtcttcgatgatgaggccctggaagtgaaagtgggcgatcagttagaggagtcaggtgaaaatgtatttgtcggtggcaagaatcgttggaggtactcaacatttgtgaattgggaactgtggtggccacaatttcctatcttggtttatttcaaggagacccaaacaaaacccgaagggcaaattcatttcttccctgtgatttttaacggccgacagctttatgatgctatggtggagcgtgctggaccttcggaaactagcggtcctaaatagtgagtgcttccctcagggaggccatgagttgggccccatggatcctgtagatttagtttataccttttaaagggccaagcccccctcctattatgtcccatattagaacatgcaattacccttttaagaattatgtcccccgtaaatataccctgtacttctgtatgcctatgtataaaaaaggctgattttatccc

SEQ ID NO: 42292 - DNA, 216 bp, Oryza sativa
  Clone ID: PAT_MRT4530_45559C.1
atggatcagtacacctcaaccccaatcgcgtcaatccaattcggggatcagagcagcgccgccggagccatagccaacactggcatgtccgtggcccaaggaataactcgcagcatcggaccatccaaagctatgtggatctgcacagcaccgcccaccggctccgtcgtcgacatcgccgcccgcgtctgcctcgacgtccgcgctgttgactga

SEQ ID NO: 42293 - DNA, 2661 bp, Oryza sativa
  Clone ID: PAT_MRT4530_4555C.1
atggccaaggacaaggaggtcggcccgcctcctcccccctgcgtcgactccgaccacgaggacctcccgctcgccgagcgacggcggcggctgctccgcccgccggcggagtcaaagcctcccgctccggagaggcgggaggctagcgccgcggcggcggcggcggaggattccggcggagcggcgcagcagggttggccaggtcttcccagaggtgtagagtttaatcctaccgatagcgatctactctggcatctggctgcagaagttggaaatggtcaggctcgtcgtcatccttttatcaacgagtttattaaatctgttgatgaaaccataggatttggttatactcaccctcaagatataccaggtattaggcaggatggatgtgcatcatatttctttcacaaaaacttcaaggagtgcgccaatgagaacagtaaatgtatcagatggcaaaaaagtggaaatcctatatcaataactttggatgggaatcttcaaggttgcaaggaagtatttgtattgtatgcctacgagacagatggtaacaatcctcagatcactgactggagattacatcaatatcatatcgaaagcacagagaaagatgagggagaattggtggtgtcaaagatattctacgagttagaaaaaaatcaatttaaatgggctgagaaatctcacgctcagtcagcacagggtgcttctgcaatcgatgatgattccaaagaggaattacagttggacaatcattcttttaatatgattactgaaaatagttctgttcaaggcaatgaaaacaagcaaaagcagacgcaaacagggacatgtcctaatctggacaaactaagttatttcaatgtggtaagcaacatgcatattgggaaccaaattaatgatcatgatgaaatcgaggagcttgatcatatgtctctgcaagagcgctacagaattcttatggcagaaaatcattcttcctctgctgtagtatcttctgaacaatgtgcaattgatggtttggagaattcatgcaagcctggaactaatgggatgattcctaaaagaattcatgaagggactgccttcagggatggtatgtatagcatgttgcaggaaatttcttctgcaccggccattataggtagtatcgacaatgataacaacaggaggttgctaactgaaggtctttcaaacaaccagcaaagtcatgaggctggatgtgaatcaggtttcttgagtacatcatcttctgctgctccaccacaatgtcaagttgtgtgctctcatgatctattggtaaacggcaagactcttatttatagtcgcgacccttcttcaagttcaacaccaacttttggggataaaaacattcagttggaagggacagatgataggacccttttggttgacataaaattggaacctgcattggaaggggatttcacagagaaaattacatcttctgtacagagaacagatccaaatcatggcactgagggctctaatctagttgggtctataaactctgtttcttcagcgatctccaaaagaatatcagaagcagcaagatctaacccagagaattctcatgttgaaggcctactgccatcatcacgaataaaaagcgaagttaccgggagtgagttacctctagttgtgtgtggtctcacttctatcagtatcgcagagctcactgccaaaaaaaccaatactctaaaccatgacggggtccttgcttactgttctcgaaaaaggaaaaggaggaagactctgagggatccaagtgaaaagacgcttgaagaagattccctcagaaatgatgagggtactgcttacttttctcgtcaaaggcgaaggagaaaaacagcaacggattcaattgaaacggcacttgaagaagatgccccaggactactgcagattcttctggacaaaggaatactggttaaagagattaaactctacggtgttgaagaagaagatgatatggtcccagactgcacagaaagtgactttcaagatcttgaaaatgttattacaaaattgtttccgcaaagaacatccctgttgaaatctgcacttaggcatgagaagggggaaaaggctatatactgcttgacctgtttaatttctctcatcgagcagtcccgctatcttcagtttcgtgattgtcctgttgaatggggatggtgtagagacctgcaatcatttatttttatttttaaaagccataacaggattgttcttgagcgaccggaatatgggtatgcgacatacttctttgagattgtgaaatcactgccaatacaatggcagatccaaaggatggttactgcaatgaagcttagtggttgtggcaggacagctctgattgaaaataggccattattgattggtgaagatttgacggaaggagaggcgcgggttttggaagaatatggttgggtaccaaattctgggcttggcacaatgctcaattaccgtgaccgggtagttcatgacaggtggaacgagagatctggcacagattggaagacaaagataggaaagctcctgatgaatgggtattccgaggggcatttggtcctatctcactttccaactaaagttgggaaaatagaagatgacaccgaaatcaaacaggaggatcctctctga

SEQ ID NO: 42294 - DNA, 552 bp, Oryza sativa
  Clone ID: PAT_MRT4530_45560C.1
atggatagcatccacgaggagcagcggccgcggcggcggcagcagcagcagcaagaaggaggaggagaagaaacggtcgtggaggtgccggagatggacggcgagctgctcgtcgagctcctggaagcgtccctcgctgcggaggaggatgaggaggctgtagcgcagaggaagcagcagctgggcttcttcacggccgacgtcggcgacggctgggacgggcaggagctgatgaactccatccacccgcaccaggaagaagaaggctgcgaggactgcggcctcgacgacatcctctccgacttcgacggcggcgggtacccgccggcgtcgtcgccaccgtacctctccgagttctggatggaggagatggaccacgccaccgcgggcccgttcgctgtcgccggcgagtgcccgggggaggagtggtacatggacggcatggccatggagtgggaggacgggaggagctactactcgttccactacccgtcctacggcgccgacgcctcctgcacggatcaactgtacagtagcccgttgtgggagtga

SEQ ID NO: 42295 - DNA, 147 bp, Oryza sativa
  Clone ID: PAT_MRT4530_45561C.1
atgatgagcgaggatgctaagccgcgatgtgcaaggagcgccaaggaccaaggtgcacacatggtcgccagcgctgaacgtatggatgctgttacaacgatgaggctattgccgcagtcgttgaggaagatgacgctgaagagctaa

SEQ ID NO: 42296 - DNA, 134 bp, Oryza sativa
  Clone ID: PAT_MRT4530_45562C.1
atggtggcgttgggggttctgagcggggcgggcgcgggcccgatgtgggtgtttgtcggttgcctacccggcatcgcttgtctagtgtttttcggggtgcccaggtggcacttggcgcggtctctgggcgtcgg

SEQ ID NO: 42297 - DNA, 182 bp, Oryza sativa
  Clone ID: PAT_MRT4530_45563C.1
tcaagtaccaaagcgtggagggggaaaacagccccaaggggaaagagatcccgggggatcggtctcatcgtcggcatgcgagctcgaggttccagcagggtcctttggtgcgatgcaggctgggaccacagggtcataaggtggcggacacgccgggaaagccaaatgttggtggagccaca

SEQ ID NO: 42298 - DNA, 265 bp, Oryza sativa
  unsure (1)..(265): unsure at all n locations
  Clone ID: PAT_MRT4530_45564C.1
agccggcaacggccgaagcggcgagacatcgggtagttgcggtcgcggcggcgttgcgcggggagcgcaacgccatggagagcagcagcctgtggggcgtgcttgggcaggcgtcgaacgtggcgcagctggtcggcgtcgacgcgctcgggctggtcttcatggtggtgcaagcggcgcttgcggcgcgcccgccaccgggnacgcgttccggcggctggggcagcacgtggagctngtcggcggcctgctgtgggagcttgga

SEQ ID NO: 42299 - DNA, 244 bp, Oryza sativa
  unsure (1)..(244): unsure at all n locations
  Clone ID: PAT_MRT4530_45565C.1
acctatcaccgatcgccgtcgtgtccgatgaggaagagcgcgggcttgcgcgccgcgcgcgccctccggggctggactccggctacctctcccttcgccggaggccgggtcgcgcgcaagggtctggacgacagctcacctcaaaggcaggcgtgtcctgagcggcntctgggtcccgtcngggccggagtcgctgccgccggcgccgtcgtcgtcgatcgcgccgctccaaatggaagtcgcc

SEQ ID NO: 42300 - DNA, 1436 bp, Oryza sativa
  Clone ID: PAT_MRT4530_45566C.1
gcacgaggcccgcgccgccggcgcaacaaaaggaaagcagggaaactgggccgtcctgtgggtccatccgtggcctagcacgcgccgcgcagcctacgagcgggagccacacctcgaggtcttcatctgttgcactcatgatttagcaccagctgaagtgacctctgagactgcgcggtgacgtagcctgttgctaggataaaaatctcagtagttaagcatggcggattctatggtgtcaagtttctgggggcctgttacttcaacaactgagctctgcgaggaaaattatgcacactcgtcatatattgcagaattctacaatactgtttctaatgttccatgtgttcttctggcacttgttggacttgtgaatgctcttcgccaaggttttgagaaacgattcagtgtcctgcacatatccaatatgatacttgctatcggcagtatgatcttccatgccaccttacagcacgttttacagcagagcgatgagactccaatggtgtgggagattctcctatatctttatgtactttattcaccagactggcattaccggagcactatgcctactttccttttcctatacggtgctgcttttgcagtagtccatttcctggtgcgattccaagtggtattcaagttgcattacgttggcctctgtctcctatgcatcccacggatgtacaagtactacatacaaactaaagacatggctgccaagcgtctagcaaagctgtgggttcttacgttgagcttggcgactctttgctggctatttgatcgaatgttctgtaagaagctttcacattggtacgtcaacccacaagggcacgcatggtggcatattctcatgggatttaactcatactttgcaaacacattcttaatgttttgccgagctcaacagcgtgggtgggagcccaaaattacccaccttttcgggttcttgccttatgtcaagattcagaaaccccaaaagagggaatgagttctctatttgtcagtgctgttctccaggaccttaaagccaacgccctcatgtgcttagacaagaagcagaggcattttttttgtatatgggcttccaagtgattacggactacagtgttatgatgcctcactagattttgttaacttttaactaacgcctgttttgtaccatacttaattgttgctcagagattagttggagtgttgtctcatagttttggtcattattttttgtttctctacatttgattttccgttctaataggactgaattttatttgttttttgtttgtcttgaatgttgtcgaacagttttagtcaagttactgcttcatatggccataaattgatctaaaaaaaaaaaaaaaaaaaaaaaaaaaaaaaaaaaaaaaaaaaaaataaaaaaaaaaaaaaaaaaaaaaaaaaaaaaaaaaaaaaaa

SEQ ID NO: 42301 - DNA, 315 bp, Oryza sativa
  Clone ID: PAT_MRT4530_45567C.1
atgaggcagcagcaggcagaggcgacagacgggcggctagcgggcggtggcgtcccctctgccagatccaacgggaggggaggccgggtggcagcccggcggaagtggccgtggcggcactcaaggccgcagaaggtggaggcggtggaagcggccgcagcagccgggcggcggcccggtggaaccagcagcggtggtggcccggaggcggcgggatgggaggccaggaggcgatttagggatgattttgtggatgatttggtgaatgatttgtggggatttgggggtgacgacattggtgctcgaaatcaatag

SEQ ID NO: 42302 - DNA, 868 bp, Oryza sativa
  unsure (1)..(868): unsure at all n locations
  Clone ID: PAT_MRT4530_45568C.1
ggcggtacggggagtacgaggagtgaagccgccgcgactggacggcgagaatggaagagtgaagccgtctataccgtcggcgaggaggatgcgtaggttgaactccttgacaccgccggcgaatatgtaaatgtatgcgcggaatccgttgctgaaggtcaatgctcccgctccgtcttttgttggtggggtggctttctgttttcttgtctgccgcttttctgctttttgctttttcttgttttttttttttttcttttttttttttcttttttttttttttttttttttttttttcttggggttttttttttgtgttttttttttttttttttgcttttttccgtttttttttttttttttttttttttttttnttttgttttgttttttttttttttttttttttttttttttttttttttttttttcttttttttgttttttttttttttttttttttttttttctttttgtttttttttttttttttttttttttttttttttttttttttctctttttttttttttttttttttttgtcttttttttttttttttttttttttttttttttttttttttttttttcttttttttttttttttcttttttctcttttttttttttttttttttctctgttctttttctcttttttgttttttggnggttttccttggtggctctttttcctgtttctctttttttttttttttttttttttgttcccgtcctcttntcttcttttctcctttttcttcttttttcttttttctttttttttttttttttttnttttttnttttttttctttttcttttctttttttttttattttntttttttcttctttctttttatttttt

SEQ ID NO: 42303 - DNA, 1817 bp, Oryza sativa
  Clone ID: PAT_MRT4530_45569C.1
aaggattgcaatgattcatatttgtcaccgtgggtaccagcactatgtcctgggactggtactgagatcgcggtttcgtaggaagcggttcacgccgtttttcctacgacacgctcctgtcaggtgccattgtacggcggtgccggattggggtgtgacagaagggttcctcacactagaggaaactatcctttattaatgaatgataacaaagtgctcatacaaagagcattttaactaagaccataactaaattgataactgaacacctaagcaacaaatgaaacttgggacacggactctaggatgctcgcctagatggacagaactttgtagcaactccacgacgccagtctttgtcaacttggaacttcttaattgtttgggacacttgaagatgaagcaccaccagtgccacccatgcgtgcccacattgctttcattctttcctcaagtttctgggccaacaaacactccatgtgaccactttgttcctctacggttcttttctgagaattcaactcttcacgctgagactgcaactcgccctttaattgcaagttttctactgtcaatttttgaacttcttctagcaaagcagcagcttgttgatgtgcttcattggcttgctgttgtgcagcttctgcttgtgcattaactctgtacctctcttgagctccctcattgattgcactaataccaactccatgcgagtggtttggctttctgccaaggactaatgcaaagtgttcaaccattgggatttgagcagctgcaatcctttcctggtttgtttcagctactgtctgcagattgttcagaatttcttcgccattaggaacggaccatgttccattcttcaaataagttgccttccaaacatctatagcactaggccattcacctgtcactaggtttctcagttcatgtgctatttgcactatagactttgttccaacatgtgatttcatctcttgctttgatctgttaatggaattatgtttgctccgtttctggaattgctcatcactccataagttatcaatcaaccactgccagtcctctggcgcaacatgactaggacaattgtactttcgctcaacttgtgtcattacacattggtagtctgccattgagatctcagggaattttgccttcaataaattccaaattgatgacatggttccaggaaaagctttttcaatgactttccacttcttcaccttaagggggacctcttgtcgcacacagacagtgacctcacttttaaagacacttgcgtgcctaccatagacttttccaaactgtgcagcaaattgaatgtctagtggcacaccccttgctctcagttttgcaagtgttccattaatggtgagacccctacctttcctacgtttgagacctgtgtttccggttggtcccatccgtccctcattcctagtattggttatgacttgtcgagcagcatcatccgaagtctccatctggttcacggatggacgaacttgggaaaccattttgaccttgttaaatctggatgggaagaaaaaggacaatattaaatcccggtttgatttggaactcatgaaaatacgacctgaacttcatgcacctccaactggtgatgggaagatcttatttcgtcctgcatgcttccattttctattcgtggagttctgcctgctgatgtttgtgaggctataattgagctatgtagcttttttagagaaatttgttccaagaaattagatactgaaattctcaagaagcttgcatcatcaattgctgttaccctctgtaagttagagatgattttc

SEQ ID NO: 42304 - DNA, 153 bp, Oryza sativa
  Clone ID: PAT_MRT4530_4556C.1
attagcaatgataagactcgcattctaaatcagtcgatggacaataatcgcactcagagcataatttttaaccggacagaaatatacgagtattaaacgactgacatagagcacattgcctgctgatattaacggcccatgatacgagagcca

SEQ ID NO: 42305 - DNA, 1254 bp, Oryza sativa
  Clone ID: PAT_MRT4530_45570C.1
ttaattgtttggggcacttgaagataaagcaccaccagtgccacccatgtgtgcccacattgctttcattctttcctcaagtttctggtccaacaaacgctccatgtgaccactttgttcctctacggttcttttctgagaattcaactcttcacgctgagactgcaactcgccctttaattgcaagttttctactgtcaatttttgaacttcttcgagcaaagcagcagcttgttgatgtgcttcattggcttgctgttgtgaagcttctgcttgtgcatgaactctgtacctctcttgagctccctcattgattgcactaataccaactccacgcgagtggtttggctttctgccaaggactaatgcaaagtgttcaaccattgggatttgagcagctgcaatcctttcctggtttgtttcagctgttgtctgcagattgttcagaatttcttcgccattaggaacagaccatgttccattcttcaaataagttgccttccaaacatctatagcactaggccattcacctgtcactgggtttctcagttcatgtgctatttgcactatagactttgttccaacatgtgatttcatctcttgctttgatctgttaatggaattctgtttgctccgtttctggaactgctcatcactccataagttatcaatcaaccactgccagtcctctggcgcaacatgactaggacactgttttgttgtgcaataggtcttgtacagtttgtggcgtcttacattgtactgtcgctcaacttgtgtcattacacattggtagtctgccattgagatcttagggaattttgccttcaataaattccaaattgatgacatggttccaggaaaagctttttcaatgactttccacttcttcaccttaagggggacctcttgtcgcacacagacagtgacctcacttttaaagacacttgtgtgcctaccacagacttttccaaactgtgcagcaaattgaatgtctagcggcacaccccttgctctcagttttgcaagtgttccattaatggtgagacccctacctttcctacgtttgagacctgtgtttccggttggtcccatccgtccctcattcctagtattgggtatgacttgtcgagtagcatcatccgaagtctccatctggttcacggacggacgaacttgggaaaccattttgaccttagagcaggttgtgttcgagaggtggagttcggaaccacctccaggatcaccgcccat

SEQ ID NO: 42306 - DNA, 2101 bp, Oryza sativa
  unsure (1)..(2101): unsure at all n locations
  Clone ID: PAT_MRT4530_45571C.1
atggcgaccgccgagcccggcccgggcccgggcccacgcaagcccgcctgctgcgccgtcaccttcggccgctccaccctcctcggccgccacctcgccgccgcgctcgccgcctccggccgctggtccaccgtcgccgtcctcgacccctctccgcccaccacaaccaccaccacctccccgccgccgggctccccgctcgcccaccaccacctcgccgtcgacctctgcgaccccgcctccctcgcccgcgcgctcgccggggtcgaggccgtcttccacgtggaccccaccggcgacgggtcctccttcctgcaactgcaccgcctcgccgtggagggcacgaggcggctcctcgccgcctgctgccggagcggcgtcaggacggtggtgtacaccggctcggccgacgtggtggtcgccggcgcgcgggatgtggtcgacgcggacgaggacgccttgccttaccctgacaagttaggaaatgcagcgatcgagctgagggcgcaggtggagatgatggtgctgagtgcggatgggaagaacggaatgcggacgtgcgtgttgcggccgagcaatatgtttgggccgggcgattcgagcctcgtgcggttcgtcgctggatatgcgaggtcttcccttggcaagtttgtagtaggtagtggtgctaatatgtgtgacttcacttatgtggaaaatgtggcccatgccaacatctgtgctgagcaagctttatgttcaaacgcaagttctgttgctggaaagcccttttttgttaccaatgatgaacctattgaaacatgggagtttatgtcttgtttgatggaagccatgggttgtcagaggcccaagtttaatctccccgccaagatcttgtcatctgcagccttattctccaacatgatgtatcacaagttgggtttacaaatattatcttccccacttctccatcctgacatggtatacttcttgtcatgcacaagaactctcagcatttcaagagctagaaagctacttgggtaccacccaatcgtatcattggaggatggcatcatgagaactgttggatcattatcagaactaccagataagttggatctgtccaggaaaagaggctcttttggatcatcaaaagcagagaagctgctaggcagtggaataactgctgatattctcctttggagggatgaaaagaaaacattttcatatgtcacagtattgtttctgctgttctactggtttctgctttccgacagaacttttgtctcgtcagctgccaaaattcttctggtgatctcgctggcacttttcatccatggcgtgctgcctccacaagtgttcggtttcacagttgagaaggttacttctgattattttgaagtatcacaagaaacattgaagaatacacttgtgtggatggcttctatatggaatggaggcatttataaattgagggttttagcagaaggcgatgactggactacgtttctaaaggcatttgcattcttgtactgtgtgaaagtaatgttgaacttacaattcagaatgctgatgggtcttgtactggcatttatgttcgttgttttcattgtctatgagcaatgcgaggaggaaatagacagtttagtagcttttgcttccgtcaaagtcaaatccctagtgggaaaagtgattggaaatttgccggatgcgttgaaggcatacatatcttagaggcaccgctgaccatgactacgtgacgctttgcgcaattctcgaagattattgctctaagcaagttttgaattgggaagccttgccgggtgctgaccgcttgagggactagggttcatgatccagactccagaatccagagcattcttctctctgcttctgtatcaaaaatatcattccaagatcgcttaagatgcacctttgcttcagctccttacttctgtagttctgtatagagcgtgttcagatgatcgtttgtgttgcatttgtctttttgaagtagtgcatattgtgtcaaattgagttggtatttctgtgtggtgcggtccggtgggtcttgcaattcacttgcgcatcacatgcctttcnaaaaaaaaaaaaaaaaaaa

SEQ ID NO: 42307 - DNA, 219 bp, Oryza sativa
  Clone ID: PAT_MRT4530_45572C.1
atggcggaacccgtgggcgaacgagcaatgccccccaaccccggcgtcacagcaagatttctaggagccagcactgactggaagcaggtctccagtggcacaggcctctacaaggtctccgatggcttgttgagcaatccgaccccaatatcctggagctttctggctgttagcttcccttccatctcagtttaccatgggaagaccttaccttcctag

SEQ ID NO: 42308 - DNA, 344 bp, Oryza sativa
  Clone ID: PAT_MRT4530_45573C.1
aaagccccagccactcaaagcctcaacagaagggatgaactgatgcaaggaatcaagttcagggacgtactccctctcctcaagagagagatgggatctttccttgaccagctgcgcgattccctccttgcccgcatccaccgcacacaccggtccggcagggtccatgggtgtacctcctcattacagccccgaccttggatatcgatctcatgccattcatagccatcctcccggtgcagcggcgccggccgcctccgcctccaccgctggcagtgccaggatggcgacctggtggggagcaaagacggtggcctccatggtggctcgtctcaatggaggag

SEQ ID NO: 42309 - DNA, 363 bp, Oryza sativa
  Clone ID: PAT_MRT4530_45574C.1
atggccgcaatcatcgccgtcttagccgctgtcgtcgctcgccatcacctccgtcggcttcgccgtcgagtaccgcacctcggccacctcctcgccctcgtcatccaccgctggagtcctcttctccccgtcgagctcgcggccgtgcctgtccgccccttcccaagcgccacccaccgtcgtgcacttggcgaggactcccacctccttctcctcttcaccggccgcgctgcgctgccgctgcccacgtcatcgccgccggtggccgcgccgccgcgtgccgtcgctcggctgggctgtcctgagctgtgcccatgccatgccgtgcttgcccgtggccgcccgatcggccgccctcactaa

SEQ ID NO: 42310 - DNA, 234 bp, Oryza sativa
  Clone ID: PAT_MRT4530_45575C.1
atggctgacactgaaagtgggccccacatgcatgcaggaatgcacatgttcaacacccacctgtcagtgactaatggcacaaggcacaatgtacgaaagctccagaaaattgatatgaaggcttccctactaaaccagtacaggatcactactcatgactccttggtcttcatagtcctcgagaacacgatcaacaatgtctcccatacatttgattggtacgcagtaatttga

SEQ ID NO: 42311 - DNA, 794 bp, Oryza sativa
  Clone ID: PAT_MRT4530_45576C.1
cctggcccggaggagagagaggaaattggagaggagagagagagagagaagctggagaggatgaggggcggcggcggcggcggtggcggcgacgggatgatggacgacgggcccaagtacgcgcagataccgacgagcttcggccacgagctccgcgcgtgcctccgctgccgcctcgtcaagacctacgatcagttcatggagcaaggctgcgagaactgccccttcctcgacatggaaagggatcacgacaacgtcgtcaactgcaccacccccaacttcacaggaataatctccgtgatggatcctggtaggagttgggctgctcgttggttgagaattgggaagttcatccctgggtgctatacgctggctgtcgcggaggagcttccggaggagtaccaaagcgtttgccaagacaacaatgtgcaatacttccctccgaagcgtgtctgaacaagccatatatagtcccttcaagagaacagcgtgcctgaacaacctatattcccttcggagcgtcacgatcctgaagcaaatactatgcacgtgtttttatctagatacattccttgccaagggaactgctgttacctgttgtgtccatgcttagagcagctaatcagcaattgaccgtgcaccttctgtacttgaacaactcaagagcagtgtttcaatctactctaacgcaatgtgcgcttcttagctaggaatacgtgcgcttctatgcgcattcatattacctgccattttcgttcaaaaaaaaaaaaaaaaaaaaaaaaaaaaaaaaaaaa

SEQ ID NO: 42312 - DNA, 684 bp, Oryza sativa
  Clone ID: PAT_MRT4530_45577C.1
gtcgctggcactggctgtttgggcggctgtcccagggcggttgcggggcaaacgcacggtgtctgaggcgctacacgacaggagatagattcgtgatatctcctcggcgttagggatgcaagcgatccttgaatacttcaagctctgggagctcctccgatcggtgcagctgtctaacgagccggacaagctttcttggtacacaagccaatctggaagtctttcgcccctcctcgatgccgttacttcctctggctggtcgctctcaaccgatgctggacggcggaccgccttcgaagccgaggtctgtcgcacccggatcgttgcccccctctgcgatcaacgcgacgaaacgattgatcatctcctggtcgcatgcccggactcccggcagctttggtggattgctcttactgctatcggtcattccgaatgtctacctctcaacgagcagtcctttcatgcctggctgtgtgacagtcgcaaaaggatgattaaggaccatcgccgagggttcgacacaattgcggcactggtagcgtggacaatctggaaggaaaggaacaaccgggtcttcaaccagaagagcagaccttggatggagatagctagggctatgagggggaagcggacctctggcggatggctagatcagccataccgaccatgacagtcccttcgctt

SEQ ID NO: 42313 - DNA, 256 bp, Oryza sativa
  Clone ID: PAT_MRT4530_45578C.1
gcacgaggctttttcatactatccacatagtgttttgctgagtactgcgcataaccgcattccgaaccgcataggtagtctttctgtacgtcaaactagacgatcggatgaaaacaatttcatgagttcgctctctcggttttgaggttgagacaagtgcctcccgccccccctacaacaatgcctctggctcacatcttgaacctgacaccgaggctgaaataacgccgaagtaagaaaagacttttatggtaag

SEQ ID NO: 42314 - DNA, 1189 bp, Oryza sativa
  Clone ID: PAT_MRT4530_45579C.1
atggtgaacgatgttttgagctcaatcccagtttatttgctaatggcaatcaatgcaccgaaatgggtaatcaaggggatcgacaagattcgtcgcggttttctatgggccgggaaagcttcagcaagcggtggcgcatgctgggttgcttggcctcgggtatgctccccaaaggaatacggtgggctgggcttccccgatctcgagaggatgggacttgctctaaggtcgagatggttatggcagcagcgaacctcgccggaaaagccttggcagggtcttagcatcccggtctcgcagaaggagcgcaaccttgtctcgctctccttggtttgctcagtgggagatgggaactcggtgttgttctgggaagattgttggctgcagggtgcttcaattcggttgctggcaccggctgtttgggcggctgtcccagggcggttgcggggcaaacgcacggtgtctgaggcgctgcacgacaggagatggattcgcgatatctccttggcgttggggatgcaagcgatccttgaatacttcaagctctgggagctccttcgatctgtgcagctgtctgacgagccggacaagctttcttggcgttgggagaactcggggcagtactcctcccgctcggcttatcgggttctcttcttggggagaactcaattccagcacaagccaatctggaagtctttcgcccctcctcaatgccgctacttcctctggctggtcgctctcaagcgatgctggacggcggaccgccttcgaagccgaggcctgtcacacccggatcgttgccccctctgcgatcaatgcgacgaaatgattgatcatctcctggtcgcatgcccgaagtcccggcagctttggtggattgctcttagtgctatcggtcattccgaatgtctacctctcaacgagcagtcttttcatgcctggctgtgtgacagtcccaaaaggatgattaaggatcatcgccgagggtttgacacaattgcgacactggtagcgtggacaatctggaaggaaagaaacaatcgggtcttcaaccagaagagcagaccttggatggagatagctagggctatgatggggaagtggacctctggcggatggctagatcagccataccaaccatgacagtccattctgtgtgtctcgtgtattcccaaaaaaatatttcctg

SEQ ID NO: 42315 - DNA, 269 bp, Oryza sativa
  unsure (1)..(269): unsure at all n locations
  Clone ID: PAT_MRT4530_4557C.1
ctagttctagatcgcgagcggccgccctttttttttnttttaancgtcgntcgnctacgnacgtacctnagagctagngatcagttttngnaccatgcatatgcatataaacttctgcangtacatgcagtactactnntactacgngcgattacgttgtggnttatacatgatanagacagcttctgttggtataaaaaaaaganaaatactaaanggtataaaaaaaaaaaaaaaaaaaaaaaaaaaaaaaaaaaaaaaaaaaaaaa

SEQ ID NO: 42316 - DNA, 504 bp, Oryza sativa
  Clone ID: PAT_MRT4530_45580C.1
cgggctgcaggaattcggcacgaggaagcagccggaacaatctttccccgagaatttcttggcagaggcggcggcggcgaactcgccggggagaagcgcaagcgggaggagaaggaggccactggagatgcacccacttcatcggataccgccaaaagcggcggcttttcccagcactcgatgtggaagacgagcctatgctcctcctgcttccatctgatttcccaccactggagagtggaatgaggcctggatagcagcttgttgtaggagcactgagccaattgacaatgttggcgctaccaagaaaccttgatcatgaaatcagcacaagtcatgctaaaatgatgttaaaatggtggatagcttacctgtttgacattgtcataaacagttgaaggttcactgaaatcaaccaccactccagttgctctcgactgaaagaacataagtttccattagcaaactgtgcaccgtacaagtgagcataagcattttatcgga

SEQ ID NO: 42317 - DNA, 630 bp, Oryza sativa
  Clone ID: PAT_MRT4530_45581C.1
atgatgctcctcgtcttcatgcacgcattggccggcctcctgccaccgttggcgttagccgagacggtagcggcagcaagaagggatggatccaggaccgtcgatgagggtgatcgacctttgcagctgctcagggccccccaattaatttcaatcatgcatctatgtggctgcgtcgagcatcgtcgatcccaattcgtgccgtacggcgtcgctgcgactgcaaaccaacgcgccgggctaggtgacgagcgggaacaggtggcgaggccaagcagcaccacattggttgtagcctgcagtggcaagcggcaatccacagtcaccgagggcggaggcatcctcgcatccacgttagatccgctcctggtggtggggactactgctgcactctctagtgacgaggcaccgagcgcccagccacagtcccaggctaccatccaccgtcgaggcatcgatgtttcaagttgcgaccggctgaccgctgtggcgctgcaactgcagacactcggcccatttgtgtctgagggacgtagagcttcgctggttcatttatctctatcggacaaagccgagagaccagaccgcgctggccaaacgggcttcgcatcagcaaaaccagctcactga

SEQ ID NO: 42318 - DNA, 332 bp, Oryza sativa
  Clone ID: PAT_MRT4530_45582C.1
aaaatataatttttttttttaaatttttttattattttttttgttattaaaatattaaatttttaattttttgtttttattattatttatttttttttaaaataaaaatggggtggcccgaaaaccaaaaaaagtaatttagctttttttaaaacgggtttgtggttaaaaaaaattatttgttgggggttaaggtggaaaaaagattggggggtgaaccaaaaaaataatggggggggtcactcttaattgggaaaaccgctgttacttattttggtggccgggggaaaaatttttcgattttggggataaacacccttaatttaggggga

SEQ ID NO: 42319 - DNA, 1144 bp, Oryza sativa
  Clone ID: PAT_MRT4530_45583C.1
agcaaaaggattgtttgcccaacgttttcaaaataaaggactagaaaggaggatacaaaattggacagaatttgtagttttatgttacagaacaatgctacaagtcacagctcaacaaacaaacaaatgtagcttgttatcaacaactaataacatgtatagtaaatcacatctttaaaaggaacagctgatgctgcgacggtaagtaaatctggaaggtcatatagttcaacttaaatacccgtttgatcatttcctattctatttccttatctcaaatggtacattgcaacccaagacaagcatggtgtgaaagcattccagcaaaatgcaagcatgctgttactttcattcactgcacaaagcatgcccgaaagctgtgagaaatctactatagctcatccttgacaatgtcaccagcggctactgtttcgacatccgcaatttgcagcttctccttgacgaattttgccatgtccttcagatttgatttctttgaaagttttatcgggttgcttttgtcttgggcaggatatagcaacagtgtagggtagttgtttatctgcaatttgggatgttcattcacagaagcatctatgcgtgcaaatttaagattagtctggcccaaatcattgaaatgtttggccaacttctccacgtttttacttatggcctcacagtcaacacaccaaggtgcatgaacctcaaggaacacattttgaggactttctagaacctgaagaatcaaatgtacggccaacaaccttttcaataggtcccttttcttctggtactggttctgatcggaagtatggcggaagtgtaccctccagaaggcttaagcagaagtcctgtaggttcttcgcgttaatttctgcctccatcagatatttggtacctttgctggtatcaaatgagtaggtttttctggttcgagtccatagagagtcaggaatggtttagcaagcttttcttcagcagtatccacatatataagcattatctttgttttgaatcctctggcaacctcttggatcatagattcaagatcttcgaaatcataagcctctgcaaaggtgaagacctgtagcttaatagggctcccataaactttaccagagttgagatcagtcggacgcgtggg

SEQ ID NO: 42320 - DNA, 151 bp, Oryza sativa
  Clone ID: PAT_MRT4530_45584C.1
tcgcgatcgcgccaccgcgatgctcaccgctacacaaggattaccgcagccttctgcaagtgagattcgtgctgattctgtatcagactactcccaagctctctacgtgtgacggtcagcactgtatgggtaatctaatatctggattttg

SEQ ID NO: 42321 - DNA, 444 bp, Oryza sativa
  Clone ID: PAT_MRT4530_45585C.1
cctgcctgcacgcgccgggacggactggccgggccgacccaggccgtgtcggttccgtccgcgctctcttacgcggttggctaagggtagacaccctagcgcgtccgtgcgggcgccgttgcgacccgctgtagaggccctcgacgctgccgaacccctcgggctgaaacctgaccgacgagcgatagggcggccgccgtgaaaaccgagcggagacgaacctaccgctagatgtgggagggggagcactgagcgggatgctgacgatacgcctccatgaggaacgcaaggcaaatccggtcacacggcaagggcattccgccgcctctgcagctgatctggagtgcccgaggtcctgtcgggagctggccagtccagtggcagtacaactcagacagccacgcgtctgctgtgaaaggaggctgacgtcatcgccaagcacgt

SEQ ID NO: 42322 - DNA, 288 bp, Oryza sativa
  Clone ID: PAT_MRT4530_45586C.1
atggccgacggcgcgaaacgtgatcgtttcggcctcgggatgaggaagaggaagaagacgagcgcccggagtccacgtcacgcgtccacgaacgcgccggctcctccggcacgctcaacaacggatggcgacgacgaaacagggcaagagagcggcaatggcgagggtgaaaacgggggagattggtttggggaggggctcgggtttataggcggcaatggcgcggcgcaggcgcagcgtggcagggcgcagggccggacggcgcaggcacgggcagcaggcggctga

SEQ ID NO: 42323 - DNA, 132 bp, Oryza sativa
  Clone ID: PAT_MRT4530_45587C.1
atggacgcgggacatgtcggggacccgcgcaacatgagtggccgagatagtatagtagctacgcacgggctagaaaggtctcaggacggcgttgattaccgagcgatggttccgatgcttcgaaagcgttag

SEQ ID NO: 42324 - DNA, 144 bp, Oryza sativa
  Clone ID: PAT_MRT4530_45588C.1
cagaagaacggaggagctcatcattcatacaccatatgattatatgctttctgacaacagaacgcactacgcattgaccagccccacagagtcatacacacagctagctctagtatgcctagtgaccagttatcagggtcctag

SEQ ID NO: 42325 - DNA, 309 bp, Oryza sativa
  Clone ID: PAT_MRT4530_45589C.1
atggcgtggttgggcttgggatggctggggattggggatggcaggtggggcccatgggtcccacctgtcggcctgaggagagcagagaccggaggccaagctagaggaggcccgtgtggaggaggtttgatccgcttgcggttcgggcagcttgggacggcggtggcgatcttgcagctcgccgccccctatgacgatgccattgttgctcgggtcgtcctctgctgtgacgatgtcattgttgaccccaccgctgatatgcccaaagctcaacctccaccacccatctcctcacgattcggtggttga

SEQ ID NO: 42326 - DNA, 566 bp, Oryza sativa
  unsure (1)..(566): unsure at all n locations
  Clone ID: PAT_MRT4530_4558C.1
tggttggtggctgttttcatgatggaggctgatcggttcagcgttttcattactagctcctgaatgagaaaggaagaaattaagacgggaacagagcaacacagcaagtgtagtcaggattccgaaagaaatttgctgtagctgtactgcttagtagacttgctgtggtagtagccagggcgactcatgagcgtagtcacaaaagcccagcccaaacacggtgtttccagcggaaaacggcccaaaatcaatttgtctccggttgcacgagcgaccaacacgtagaagaatccaccaattcccgccgattccgagcagaatcactcgcatcacatgcatgttttccatgatcattttaggagggtcttctccccttcctccaggccggccatggtgtcgtaacatgggcttgttcttcggtttccggcaggcagaacacgaggaacccgcngacgaggcctgacacgcngaacagcgcgaanggaacncgttccccgngcaccaccaccagaggcggtangtngggcccnattctgcgacgccntgngacgtgcaccccagcgcgt

SEQ ID NO: 42327 - DNA, 375 bp, Oryza sativa
  Clone ID: PAT_MRT4530_45590C.1
atgtcatcctctctctttcttcttcctcctctctttctttctctcttctctccccttcggctagccgcagggagcacgggctggggcggtagtgggcggggacaagagaggcggagggagctgaagcggcgccggcggcggcacacgctctccagcctcagcggcaagcgtggtgcgccatctgccgctgccgccgccgtcggcggcagcgacgacgaggactccgacgacggatcccgcaagaagctccgcctctccaaggaccaagccgccgtcctcgaggacaccttcaacaagcacaacaccctcaaccccaagcagaaggcggcgctggcgaggcagctgaatctgaagccgcggcaggtggaggtgtag

SEQ ID NO: 42328 - DNA, 150 bp, Oryza sativa
  Clone ID: PAT_MRT4530_45591C.1
atgcacgtgattggttcagcgattcaatcggcgggataccggcggcaacgcatcggtcagaccggtgggacagcggcagttagactagcagcaggatcaggcgactgcggcatcttcaggtggttagaccgaacgatctactccggttag

SEQ ID NO: 42329 - DNA, 231 bp, Oryza sativa
  Clone ID: PAT_MRT4530_45592C.1
atgacagaggccaacaaggcgacgaacaaaagaaccacaaatcacgagcagaaaccagaaaggcagcaaaagcacaatccaacaccaaattgtaacgagcaccgcatgcagaaacctctcacctgtactgtcctccctgcgaaaacagcagcaccgctcggagacgacgatcagacgaacgccaccacaccggggatgggaacgagaggaggcggcaggcgggtcaattaa

SEQ ID NO: 42330 - DNA, 2513 bp, Oryza sativa
  Clone ID: PAT_MRT4530_45593C.1
gctagctagtacagtacatatccatctatccgtctgttagagtaaaaattccccatttaattaggatcgatcgattggattgaagctggcgatggcgagcggcgtgtgccctcctgcggagctggggttcggggcggagtactactcggtggtgaacggggtgtgcagccgcgccggcagctacttcggcggaaggccggtgctcacgcaggccgtcgggtacgccgtcgtgctcggcttcggcgccttcttcgcgctcttcacctccttcctggtgtggcttgagaagcgttacgtcgggtcgcagcacacgtcggagtggttcaacacggcggggcgcagcgtgaagacgggtctgatcgccagcgtgatcgtgtcgcagtggacctgggccgccaccatcctgcagagctcgaacgtggcatggcagtacggggtgagcgggccattctggtacgccagcggcgccaccatccaggtgctcctcttcggcgtgatggccatcgagatcaagcgcaaggcccccaacgcccacaccgtctgcgagatcgtccgcgcccgatggggcacccccgcccacctcgtcttcctcaccttctgcctcctcaccaacgtcatcgtcaccgccatgctcctccttggcggctccgccgtcgtcaacgccctcaccggagtcaacgtctacgccgccagcttcctcatcccgctcggcgtcgtcgtctacacactcgccggcggcctcaaggccaccttcctcgccagctacatccactccgtcgtcgtgcacgcggtgctcgtcgtcttcgtcttcctcgtctacacctccagctccaaactcgggagcccgcgtgtggtgtatgatcgcctcatggccgtcgccagcgccgcgcgcgactgctccgccgacctctcgcgcaacggccaggcgtgcggccccgtcgccggcaacttcaagggctcctacctcaccatgctcagctcgggggggctcgtcttcggcatcatcaacatcgtcggcaactttggaacggtgttcgtagacaacggctactggatgagcgccatcgccgcccggccatcctccacccacaagggctacctgctgggcggcctcgtgtggttcgccgttcccttctcgctggccacctcgctcggcctcggcgcgctcgccctggacctcccgctcaccgccgccgaggcagccaagggcctggtgcccccggccaccgcaacagcgctcatgggcaagtccggctccgtcctgctactcaccatgctcttcatggccgtcacatccgccggctccgccgagctggtggccgtctcctccctctgcacctacgacatctaccggacgtacctcaacccgggcgcctccggcaagcagatactccgcgtgtcgagggccgtcgtgctcggcttcggctgcttcatgggggtcctcgccgtggtgctcaacgtggcgggggtgtccctggggtggatgtacctggccatgggagtcattgtgggatccgcagtcatccccatcgccctgctgctgctgtggagcaaggccaacgcggtgggcgccatgggcggcgcggtgtccggctgcgcgctgggcgtggccgtgtggctcacggtggccaaggtgcagtacgggcgcgtgaacctggacaccacaggtcggaacgcgccgatgctggcgggcaacctggtgtccatcctggtgggcggggcggtgcacgcggcgtgcagcctgctgcgcccgcagcactacgactgggggaccagccgggagatgatcaccacggtggagagcgtgcatgccgcgctggacgacgagctcaaggaggagcgcctggtgcacgccaagcgttggatcgtcaggtggggcctcgtcttcaccgccgtcatcgtcgtggcgtggcctgcgctgtctctgccggcgaggaggtacagccttggctacttcacgctgtgggccgcggtggcgatcgcgtgggggactgtgggctcggtcgtcatcatccttctgccggtggccgagagctggaccaccatcaccaaggtctgcgccggcatgttcaccaacgacgctgtgtacgaccgcctcgacgacgtcaacctccgcctccgcgccatcatgggcgccatgcccgaggctgagaagcgctaccgccagctacacgagacggagatgcaccctgccggaacccatccggccaacgacgacgacgacgacaataataataatcagatgatgcactcctgattccatccaatcatccatccatccatccatagactaattaagatttctacgtactatatactactcgtacgtacactttttatatacacacatatatgtatggagagcctatataattaaaaaagagtgtgcatcagcagcgtgtgcatgatagtgaacacgttttgtgtatactacaaataaccgatgtttctcaaaaaaaaaaaaaaaaaaagctaataaacaggcagcctacgtcaaaaaaaaaaaaaaaaaa

SEQ ID NO: 42331 - DNA, 773 bp, Oryza sativa
  Clone ID: PAT_MRT4530_45594C.1
tttttttttttttttgctagaacaaatataaaactgtccatatctcaaattagtagacaacaattaaaaactgttacaggagaaatgaagtccaaagaacacaaatacgataggctgcgattacaaactaattaatctagagaatgagaaaatttcatccgaaaaaaaaaacgaggagagaacaagttgtaatcaaatcgcaggacgacgaccatatatatatatccttattaatcgctccagatcatcaatcaaattaacggattgttcacgacgcgaggtcgacgaggccggccggccggccgggctcagttggaggagtcgtcgtcgttgtcgtcggagaggccgtcgatcccctcgccggggccgggcgccgccgccggcccgtcgggcccctccgccggcgcgtcggcggaggacgacgacgacgactcggaggaggactcggaggagggggactcggcggatgactcctccgccgccctcgccaccggcactaccaccatggcgacgaagaggagcgcggcgaggaagagcgctgcagtaattggatatggaatacaaagaagatatggttttggttggtacccatggtggaagttcgtcaaagatccggactcggaggttctatcatataaaacaggaggagggtcgtccggggggcggtcaatcctcctgtcttccaagaagatatctccccatattcggttcccgtccgaagccaacaacataagttgtgatcgaaagttctcaacagccgccgggggatccat

SEQ ID NO: 42332 - DNA, 419 bp, Oryza sativa
  Clone ID: PAT_MRT4530_45595C.1
ttgttgttttttttttttttgtgtttttttttttttttttttttttccaactaaaattgtttttttttacaatgaataaaaagtaaaaaaggccagattgctataccacccaaggcaacaagggtacaaaaggaaaaaatttaaagaaccataaagtctggacaaccttatacccttaaaaaccatgaaaattattccacccataacaccgctgatgcatataccacttgcaaattttctaatttgccaataggcccaaacttatcaatggcttgcccatttagaaaattggaaaaattggaaaattatggggacttggaaacgatgaaaaaaagggcaagcatctctcccgtgggaagtattggaaggcgttcatccctttgctttcttttgtactgaaggcccacatgccccaaccc

SEQ ID NO: 42333 - DNA, 486 bp, Oryza sativa
  Clone ID: PAT_MRT4530_45596C.1
atggcgacgcgacggcgcaacgggatggcgcgcggcgcggcaacggcgatggcgacggcgcgcgatggcagccatcaatgggacagcgtgcgggtgttacatttggtcctccggttccatgattgggagttcgagagtcgcaccgagctccgcttcctctttgatgaagtcgaggacttcattttccagaagggtcttgggagacttgttagggggaactgccgtaacctcctccgcatactcattctatgggagagagtcggtcaagagaggtacgtcttgcacaatcccaaatccttcaatgatattttcattcgagtgcttgaagaatttgtttgttggagttatagctttatcgcccaggtgacaaggaagggatctagtgtcatctctgatctcgacgagtttatattcgaggaggaagactaccctaccgtcgtctacgagttgattatctatgccgccaagtcgatgacagctcgatag

SEQ ID NO: 42334 - DNA, 1307 bp, Oryza sativa
  Clone ID: PAT_MRT4530_45597C.1
acgacggtagggtagtcttcctcctcgaatataaactcgtcgagatcagagatgacactagatcccttccttgtcacctagaagggaacaacgttgatattctatacaatccaactgtcggggttaatctcatctctgagtcatttgcattcgcttacctgggcgataaagctataactccaacaaacaaattcttcaagcactcgaatgaaaatatcattgaaggatttgggattgtgcaagacgtacctctctgctttgaagacagggaggcagtcttggattttcatgtttttgaaatcaaagattttgacatcctaatcggacttccaattgagcagcttctcataaatacgccccgattggacagcctcaagataactttttgagggaacgaattctcagtttcattcttgcgggcaatgttcaccttgaccgactctctcccatagaatgagtatgcggaggaggttacggcagttccccctaacaagtctcccaagacccttctggaaaatgaagtcctcgacttcatcaaagaggaagcggagctcggtgcgactctcgaactcccaatcatggaactgccacctcgaactccgcttgagcttaaacctctacctgaaggcctacactatgctttcttgcacaatgacaaagaagcccatgtcatcataagtgacaagctttatgaagatgagactcaacgtcttctttctgtgttagagaagcattgcgctgttcttggctattccctccaggatctcagagggattaaccccatactttgcactcatcgtatccctattgagcacgagagtactccctccagggaacctcaacgacggcttaataatgtgttgagagaagttgtaaagaaagatgtcctaaaactcctgcatgccgggattatttattctgttccatacagtgagtgggttagcccagtccaagttatgccgaaaaagagaggactgacggacgttgctaatgctcaaaatgaacttatcccgcaacgaaccgtaaccggatggaggatgtgcatagactacaggaagcttcacaaggcaacaaaaaaggatcattttcccctaccctccattgacgaaatgttggaacggctggcaaatcgttcctttttctgtttccttgttgggtattccgggtgtcatcaaattcccattcacccggaggaccaaatgagtacggttggtactcacccttgcaatatacaaacttaatcagaggccggagatgaagctccggaggatccctacgcttactactaggagggtgatggagacgat

SEQ ID NO: 42335 - DNA, 700 bp, Oryza sativa
  Clone ID: PAT_MRT4530_45598C.1
gcagcataaaactgatattgtttgaactggggcaacacattacattccaaactgttagcacacagagtatccaaatactttacaatcaaaaacttgacagcaaactccaaacttttttcaggttatctgtacagagaactaaccaaccacaacacaagctagcggttaactgaaccttggcaagagaaatctcttcacgctaacaacattaccttctcaatcttcatcgaggtagctaggcaaatttacagtgaggttccatgaggtataagcagtaacagcaacccaaaaaaatccagggcaaaggatggttcttagtactgacggctgacaaccacactgaatatggatacagctaaaatctcaagcaaaaactactagaatctggtaagtgcaggcatcatctacataatacacaaataggtggtaggttttgttggcaaaaatatacacctgcagtgcttgccacgacaagcaaaacaagctcaaaagtcggttagtattcgctcttgctcttcgaaaataaccgactgaaacctcggctctgtttctctgtgaactggttagtaaatgaggaagaggaagaagaccttgatctgtgctttggacgcttggagttgtttggagaagcgaagtaagtgtttccatcaagattggaggggcttttgtgtgttctcggacgcgtgggcggacgcgtggg

SEQ ID NO: 42336 - DNA, 3450 bp, Oryza sativa
  Clone ID: PAT_MRT4530_45599C.1
atggtgcctgccgctggtgctcagggcaatggtagcagtgtgcaggaggaagcatctggagggaggggaaaaagacttcgtaaagctaatgtgggaattcgctgtttatcagtgagattccgcaaaagctctcggggctcccttgatctggttggctgggttcggggcggaaccagtgaattcatcctggagcgacctaggtataccaccaaacaagcggctcaaatcatggctcgggatgggaaactcgatttgctgttgaaaatgatggaggatgcggagaagaagagggaggagacggagaggagacgggaggagtcggatgcactgaatctggccgaactccagtcgttgaaggcggcggtagaatcgcgcatacccttggtggagaagaagttcaattcggtgagtccctttactccagaaaattctagctatcaggcctttgagacaggaatggttagtattggtggtaatgttcctcccatgtcctgcccccaatttgatggggagaaccctcaaatgtggagagataattgtgagattttctttaatgtctatggggtgcatccagctaactgggtcaagactagcagtgtggctgaatatgtggagaggaaatcttggaagggagtaagagaactacttataggaagactgagggtactaatttcaacaaagttttttctagaacagctcaggtcaatgtcattcccaagagtcctgcaacctccccctggagaggaaagaaaatttcctgagtctgtcagaaccaatactcgcgatgataaaatttctgctctgaaatcttatagaagatccaaaggattgtgtttcacctgtgggaaacgatggagtaaggaccataagtgtgcccagtctgtccaactgcatgtggtggaagaattattggaggctttccagtctgaggaagaagagaactttgtgattccagttcctgattcttcccccgaggagactacactaatgaccatatcactccatgcttgcaatggaactatatcactccatgcttgcaatagaactgattctaaccattctcttcgagttaagggcttgttatccaaaccagtgaaggtcagagttgttgatggaggactcttacagtgtgacaaacagctccctgactgctcttggtggctccaaggcagatactataaatctaacttcaaattgttacctctgaatgggtatgatgctatactaggaatggattggttggcaggtttaggggttatgaaaattgattggatgcacaaatggttggagtaccaggacaaggggcaactcattagaattcaaggggtgcactctgatgtggctaactgtcggctgatttctggggcacaactcagaggcttgtacaaagttggggcacttatgcacatgtttcagatcaccactgaaactagtcctactgttgttgcgattcctaaaccagtgcaacaagtgttgtctgagttcacatctgtctttgaggaaccacagggattagctcctagaagatcctgtgaccactccattcctttaataccaggtgctaagccagtcaatattcgtccatacagatacaacccaacccaaaagaatgaaattgaacaccaagttcacgaaatgctgaaatctggagttatacagcctagtatcagccccttctcatccccagcattattagtgaagaagaaagatggctcttggcggctttgcattgattataggcagctcaatgcgctcacaatcaaaagagcaccagccaccttccagggagctatgaatgcaaccttgtcttcagttttaagaaagtgtgccctagtcttttttgatgacatactaatctatagccctgatttacccacccatgtgcaagatctcaggaaggaactcaattaccttgggcatactattggggtggcaggagtggccactaatgccagcaagatacaagatattttgaagtgggttgttcctactaacctgaagaaacttagaggttttttgggcatcgcaggatattaccgcaagtttgtcaaaaactttggtgttctcagtaagcctttgacaaatttgttgaggaagggagttgaatttcaatggacccctgaggtacacacttcctttgagagtctcaagcacgccttagccacagcccctgttctggctctgcctgacttcaacaaaacctttgttatagaaactgatgcaagtgactctgggataggagcagtcttatcacaggataagcatcctattgcgtatgttagcaaggctttgggtcctcgaaccaaaggcttccctgtgacctatagaaggatcaagaccctctttgcttggcccgatatgaagaagcagattaagctgaaggtcaaggagtgttccatctgtcagcaagctaagccagacaggttcaggtatcctggcctgctgcagcccttacttgttccatctggtgcatggcaaacggttactatggacttcattgaagggcttccaaagtccaggagatttaattgcataatggtggtggtggacaagttgtccaggtatgctcattttctgcccttagcacatccattctctgctgccgatgtagctcaattgtacatggaaggggtcttcaaattacatgggttacctttggctgttgtctctgatcacgataagatctttacaagcaacttttgggagcaattatttcagagtgttagcactaaacttcacatgagtacagcataccatcctcagacagatggacagacagagagggtgaatcaatgtctggaaacttatttgcgctgtttcacccattcttgcccttctaagtggtctacatggttatatttggccgaatattggtacaatactacttatcattccacccttgaacaaactccttttgaagtgttatatggtcatactccaaaccagctaggtatctctgtgaattcttgtgaactccctgatgtgcaacagtggttgtctgaaaggaggttgatgatgcaattgctccagcagcatttgcatcaggctcagcaatatatgaagactccggctgataagaaacgtagtttcagatcctttgctgttggagactgggtctatctcaagttacagccatatgtccaatcctctgtggctgcaagggctaatcacaagttgagttttaaatactttggcccctatgaggtattgcgcaaggtgggagaagtggcatatcaattagcattatcggaaggaagcgttgtccatcctgttttccatgtctctcaactcaagtctgcccaaggcttcaaaggtgtttcttctcctatgattcctgctcaaatggaaactaagaaagttcctgttgctgtcctcgacacccgagttcgcaaatcaggtacttctgctataccacaagtattaattcagtggtctgacagtgctgtttag

SEQ ID NO: 42337 - DNA, 437 bp, Oryza sativa
  Clone ID: PAT_MRT4530_4559C.1
ctatcaacatacacggacaacatacatggaacaacagaagccacaacatacaaactaacatacgccaagacaagacgccagatatcgacttcagggataagcacggctagtcccctacggtgtctccggatactgtcaggagagacgaaagcgctatctctgatctcgccgggcacggattcgaggaggaagactaccttgttatcgactacgagtcagaccttcagaccaccatgtcgacaacagttagataggctaccccaaatattgtactggtgtgattatgatgtataaacctttttcctccctttgtctcatgcgaccacaaccttgtgtgccgtcacatgttgcgaccatcgtcgtcttgctttcttttacatgttgctgccatctcgctttcttcctaaactccggtgagcttgcttgtcgtgcctctt

SEQ ID NO: 42338 - DNA, 374 bp, Oryza sativa
  Clone ID: PAT_MRT4530_455C.1
cccattttttcgattttgcccgcggagactacacccttctctgtggcgggcacattaaaacactaggtttatttgcaaaaagcctggcgccacgcaccatcaaaagtaagcgttggggggaaacatctccccccccatataccccgggggagacattaggattagcctcctaaggtgtcacatagaagctgtgcgcccagatgtcttactccgtgcatgaggcgtgcccagctaaacaacaaaccagcctggcggactgcgaaacagacgccaagaccaacaagccactggagatcgtatggaactctggcatagccgacccaccttacgagatgagcctccctgatatgagccgaaatatattccttctgtcc

SEQ ID NO: 42339 - DNA, 315 bp, Oryza sativa
  Clone ID: PAT_MRT4530_45600C.1
atggcccgggagggccatggtgctggaggtggatctacttacggccttgtcgcgtgtggattaggaggtggtcactgcggcttcggccaacggtggaggagcaccaccactggaggagggcttcttgctggtgtcgccgtcttggccttgccaaatggaccaggccagctagggcttggcctaagcctgggtccgcgcctggtgctgatgatgcggacggcgtgggtgggcggcagagcagacgagctccggtggcggcggcgggcgtggtcggcgtcgccccccgaccggagcgctgttgacagcgaggcgtag

SEQ ID NO: 42340 - DNA, 736 bp, Oryza sativa
  unsure (1)..(736): unsure at all n locations
  Clone ID: PAT_MRT4530_45601C.1
ccggccgggagccgcctcgtcgaaagcaacaacaaaagcctccctctctctctctctctctcttgcggcttcagcgcggccagccgagagggaagaagaatttggtactctttgccctcgatcgaagctaccacccatcccaccttgcccttccttcgccgccgattccgatctgggccgccggcgacggcgaaacacaggcaaagcaaagataaaggtacaactgttgtttggtgcttgtccagctaggacagccgagtgaagtgccagcatgggtggcatccttggacgccatgacaccatgaagaggagctctcacggctcgaagctcgagacgaagatggtggagtccatgcagcagagagcgtcgcacgggacttcactcaagtcgttcgatagcatcatcatgaagtttccgaaaatcgatgagagcttgaggaaatgcaagatcatcttcgagcaattcgatgaagattccaatggcgaaatagataaacaagaattgaagcattgtttccaaaagttggaaatttcattcacagaggaggagataaatgacctctttgaagcttgtgatataaatgaagacatgggcatgaagttcaatgagtcatcgtctttctgagcctcatttatctgctcaacgaaccagctgtgtcagaaagcaagattaagatgggattaggaaatcttgaggcaacttttgagaccttgggtgatgcatttgntttttttg

SEQ ID NO: 42341 - DNA, 220 bp, Oryza sativa
  Clone ID: PAT_MRT4530_45602C.1
cacatgcaggcgttgcaacaccaagaagttctcagctatcgcggactcgaagactcatgaaaagcactgtggacgctacacgtggctctgctggtgtgcaactaccttctgatgaaaagacatgttatctgggcatgttgctcttctccaagggcacacgcctgctctccctatggatgatgtcaaagttacatgagcatcagagccacctcatggcagc

SEQ ID NO: 42342 - DNA, 348 bp, Oryza sativa
  Clone ID: PAT_MRT4530_45603C.1
cacctgaatcccccgcagtgcccgtgatgattccatcctctcagtctctcccaaactcatttctactagtagaaccaatcgtgtccgtatcattcttgaaacttatgaaagttattgttatgaggattgagggggtgtgaaagttgtacttagagagtggaagatgaaccagccaggaatactcaggaatccgctactcccatcaaaagttctctaatagcttgtggtgtattataggtgtagaagttattaggagaggtgaagtgaatatcggatggtgtgcggataagtgtggtgatgtacagtgttggtggtactgattgtatatgtatatggtggggagatgat

SEQ ID NO: 42343 - DNA, 809 bp, Oryza sativa
  Clone ID: PAT_MRT4530_45604C.1
ccggaattcccgcgtcgacccacgcgtccgacgcttgtgacgctatgcgagcttctgccgaactttggctagccatgcagttggagcatcttctggttcaggcaattctaggaatatggttacaagtccaaccaacagttctccttcaccttcaactaaccaaggtaatcaaggtggagtagcgtctacaacagggagctcacaaatgcaagagtgggtccaaggtgccattgctaagattagtaacaatactgatggtgctgcaaatgctgcaccaaatccaattagcgggaggtcatcattcatgcctattagcataaatacgggaacattccctggcacaccagctgttagacttattggggactgccatttccttcatagattatgtcagctgttgctattttgtttgctttttcggagaaggcaatctccaaggatacctgcaaatgcacaaaaaagttctgattctagcatgcagaaacaacacttgatgaacagtaagacagaggataatactttggcagtcagatctggtctaggtgctgccaaattggaagatggcacaacttcacgtggacagatggttggagcaaagggtgctgaagaaaatccagtgggcaacaaatctgctaggataggttctggcaatgctggccaaggttatacttcagacgagggttggttcgagcaatattattataagggctgcattacatcgatggcaattacactgtgctccctgaggtagtggaagcatctcttggccctatatgcagatatgcctcgtccactggagctgatgctgc

SEQ ID NO: 42344 - DNA, 284 bp, Oryza sativa
  Clone ID: PAT_MRT4530_45605C.1
cccacgcgtccggctaatagttagaggactctttattagatgcgttgtctgctactatgagagtgttagtatgtatgtatatactggtatctgtgtgatcgatcaaggatcgatgtacacacatatgatcagtatgcacagataactagatcgagatctatagcttgatcgatttggggtttattatgagggatttgtaagtattggattacatgttgtactggtgaggatattgctataggttaatatgacttttagggtactattttctgcattaaattaat

SEQ ID NO: 42345 - DNA, 4060 bp, Oryza sativa
  Clone ID: PAT_MRT4530_45606C.1
atggaggtggatgtttgcgctcgaggtggtggtggtgtgcttgtgcatgtgcagttccctgggggtggtggtggtgcggggggaggaggaggtggaggtggaggtgggcagcaggcgtcgccggcgaccgtgttccggatccggctcaagcagccgccctcgagcctccgccacaagatgcgcgtgcccgagctctgcaggaacttcagtgcagttgcttggtgcgggaagctcaatgcaattgcatgcgcatcagagacttgtgcacgcataccaagctctaattcaagcccaccattttggattcccatacacattctaaatccagagagaccaacagaatgttctgttttcaatgtgaaagcagattctccacgcgactttgttcaattcattgaatggtctcctcgatcatgccctcgtgcattactggtggcaaattttcatggaaggattactatatggacacagccaactaagggtcctactaatcttgtacgtgatgccagttcctggcaatgtgaacacgaatggcgtcaagatctttcggtggtgactaagtggttgtcaggaatttctccgtatagatggcttcctgcaaactctagtacttcatcaaacttgaaaacctttgaggaaaagttccttacccagcagcctcaaagttcggttttttcatcgggttctgttcagcttcattggtcacaatggccttctcaaaactcagcacaacctagatggttttctactagcaaagggcttttaggagcagggccaagcggcataatggctgctgatgctattattactgaaactggagcattacatgttgctggtgttccccttgttaatccatctactgtagtggtttgggaggtgatgccaggccttggcaatggtattcaggcaactgcaaagataaatgcaacaagctctcttcctccatcactaaatcccccactctgggctggttttgctccacttgcatcttacctcttctctttgcaagactaccttgtttccgagggcgcacagacaaaaaaacaggcacaggtagataatgagaccactgaggtagcatcgatccattgttgtccagtttccaacttttcagcttacgtcagtcctgaagctgctgcccagtcagccactaccacaacatggggatctggggttacctcagttgcttttgatcccactcgagggggatcagttattacagttgtaatagttgaagggcagtacatgtctccttatgatcctgatgaaggaccttccatcactggatggagagtccagtgctgggaatcttcagtccaacctgttgttcttcatccaatatttggaagccctgcaaactttggtggacagccacctacacagactgtttggtccacaagagttaacaaaagcatcccaccatctgaggaccttaagaaccctcaatcatatgttccaatgccaacaacttcagatgagcggagttcttctgagtgcagtgttgacagggcgaaccgacttagctttgacccttatgatcttccaaatgatgtcagacaattggcccaaatagtttattctgctcatggtggtgaggttgcagttgcattcctgcgtggaggtgtgcacattttttcaggtccaaactttgaacaggttgatagctatcatgtcaatgttggctcagcaattgctccaccagccttctcctccagtggttgttgcttggcatcagtatggcatgacacactcaaagatcgaaccatactaaagataatacgtgtgcttcctcctgcaattcttaatgctcagacaaaggttagctcagctgtttgggaacgagcaatagcagatagattttggtggagtctattggctggtgtggattggtgggatgctgttggctgcacacaaagtgctgctgaagatggtattgtctcactgaacagtgtgatagctttgctggacgcggacttccattgtcttccaactatacaacagaggcaacaacactgtcctaatcttgataggataaagtgtagattgttggaaggaacaaatgctcaagatgtcagagcacttgtgttggacatgcaagcaagattgcttctggatatgcttggcaagggaattgagtctgccctgataaatccatcaactctgctacctgaaccgtggcaagcttccagtgacatgttatctagcattgggcctgacaaaatgactgttgacccagctctacttttaagcatccaggggtacgttgatgctgttctagatttagcgtcacattttatcacacgcttgcgacgctatgcgagcttctgccgaactttggctagccatgcagttggagcatcttctggttcaggcaattctaggaatatggttacaagtccaaccaacagttctccttcaccttcaactaaccaaggtaatcaaggtggagtagcgtctacaacagggagctcacaaatgcaagagtgggtccaaggtgccattgctaagattagtaacaatactgatggtgctgcaaatgctgcaccaaatccaattagcgggaggtcatcattcatgcctattagcataaatacgggaacattccctggcacaccagctgttagacttattggggactgccatttccttcatagattatgtcagctgttgctattttgtttgctttttcggagaaggcaatctccaaggatacctgcaaatgcacaaaaaagttctgattctagcatgcagaaacaacacttgatgaacagtaagacagaggataatactttggcagtcagatctggtctaggtgctgccaaattggaagatggcacaacttcacgtggacagatggttggagcaaagggtgctgaagaaaatccagtgggcaacaaatctgctaggataggttctggcaatgctggccaaggttatacttcagacgaggtgaaagtcctttttctcatattagttgacctatgtaaacggactgcaaccttgcaacatccgttgccttcttctcaggttggttcgagcaatattattataaggctgcattacatcgatggcaattacactgtgctccctgaggtagtggaagcatctcttggccctcatatgcagaatatgcctcgtccacgtggagctgatgctgctggccttctacttcgagaattagaactgcagccccctgctgaagaatggcatagacgcaacatgtttggtgggccatggtcagaaccagatgatcttggtccattggataatacgcgacagctaaaaatcaatggctctaccaatcgccacttatcggacatggaagaggatggcgacagctcctttgggattcaaaatctttggccaagaaagcgccggttgtctgaaagagatgcagcatttggtctgaaaacatccgtggggctgggatcttttctaggtgtgatgggttctcggagagatgttattacagctgtgtggaaaacaggcctcgaaggtgaatggtacaagtgcatacgatgtttgaggcaaacctgtgcatttgctcagcctggtgctctagctccgaacacgtcgaatgagcttgaggcatggtggatcagccgatggacccatgcttgcccaatgtgcggtgggacatgggtgaaagtcgtttgaatttgacgcctccgggcgacaccttcaccgtactaaccactctgccaatagctttctcggccaaatctgtgtaggcgccatcggtttttggacaattttgtatctaactttagattgtttggtctcaggccctccctggtatggtatcatagtttacctgcagcagtcagagcagattgcaccagcagctgtgtaaaacggtaggaaaaaacaggattaggacatgcccaaacactgtcagagtcagcagttgtgttgtgcgatccttttgtacataaatgtagtgtactaatttgcaacattggaaaagaaactccgttagatactgcttgatgtcaataatatttgctggtgattgaaaagaccatgtatgtaatagcatgttcaattgggtgtttctctc

SEQ ID NO: 42346 - DNA, 755 bp, Oryza sativa
  Clone ID: PAT_MRT4530_45607C.1
ggaccaaagaaaaagttctctttttttttcatttttgtgattacaatgaaatcgctggccagcaggtccaggacaacatcagggggctccattaaagcaacctggagattcctcatgagctagggttagaacccaacatggacatggcaatggcatgaaccacttggttacagttacacacttgcaccgacaatagaaaacacgagaactactgtaaactgaagaacatattcagcaccttttgaatacgaacagggcgtcgttaagctgagatatcaaaagaatccccttcagtcgcattcttcaggatcacagaattgggttcaactaacaatattctaacgcccagattcgtcgctgtttccgaacccttgatacaggatatcaaccagattacaactcaaacgtgatcacggatcataaaacaaactcaagatgctgaaaggaagacacgccatcaagatttattgtgagaataccctgacccggcaactgccatcttgtccccatctcgttaactttctaattctccaccctgaacgcttcggacgcgtgggtgctcgacttctggtagcattcgccaacaaaccaattcatttgcggttttgttcacttccccttctctgatgctcaatggatatacaataaaagcaatagtagagtttgtgcttctgttcacttccctttctctgatgcacaacaaatacaataaaagcaaggatatagtttttggcatccaagcacactgatccagg

SEQ ID NO: 42347 - DNA, 1005 bp, Oryza sativa
  Clone ID: PAT_MRT4530_45608C.1
atgccatcagaaggaaaagtaattctagacagcattctagaaaatacttccttcatgacgcaatgcgatgaaccccagctagaggcatccgtgtccaagatagaggaaccttcaacaatcgagtcacaacctgaaccttccacctctaccgactcgattgatgaaaaagttcccgagccatccgttgagactgaagaaattcagactccggatcgtgccgcaatcatgttcagggatggttttgatgaagactatggtaacaccctgaactacttcggtaaaaagaaaccactcgtccccttgccacctcccgatcctatggaacttgggttcctaagagaaactgtccgggagttgaaatctataatgagtgacgaatggctaagggagacagagctttcatctgaagtaattcaggggcataagccaaacgacttctccttctggaccctttttcttcaactgagatcttcgatcggggtatcatcaattgaaaatcagacaagaagatatatcaaagactgcctttgtgacaagatcaagttgcattcttgggacataattaccaagaatggagttgtcgtagatccagagaagattaaagctgtgatggagtggaaggtatcaacatcggtacctgaaataagaagttttctaggacttgctggatattatcggagatttataaaggacttctccactattgcaaaacctattaccaaattacttaggaaggacaagaagtttgaatgtacactagaatgtcagagtagtttccaaagattaaaacataagcttactactacaccagtattactcttgctagacatccaaaaagattttgagatctattgtgatgcttctcgacaaggattaggatgtgtccttatgcaagaaagtaaaatagtggcttatgcatcaagacaattaagacttcttgaagaaaattatccaactcatgacctagagttagctgcagtagtacatgcggttaagatctggtga

SEQ ID NO: 42348 - DNA, 487 bp, Oryza sativa
  Clone ID: PAT_MRT4530_45609C.1
cggattgttgtgatcgtgttgttgcttctctttctgagcttggtttcagctttcaatgggcaggcaaccttctcttcacaattctccatctaactctcctgtggcgccggttggaatgttgtcgtgaaatccgattcaccatagcgcacattcatcccaaacgatggcaatctattaggaaagttctcccacaacgttaccaggttcagtaaccccgacgcgagccatttgtacactctttagccacaatgcgtgtaggcacgagcaacttctcatactggcttggctacctgccaccgtggtgcccgacgacaacacaactctagtcctccgccttcacttcttaccttacgcatcacaatcgggcgacctttccacggcactgttcaacgtctccatcatggggaggtacgtcctgcattcttccttcttgtcgtcgcgcactggcgcggtgagggagttcatcctcgcgtccgatggctctggt

SEQ ID NO: 42349 - DNA, 186 bp, Oryza sativa
  Clone ID: PAT_MRT4530_4560C.1
atgtaagtactcctgtcaggtgtcaacaagctatgctcttctgaatttttttgactgatagatgttcagctacacaagaaatcaagccacaacttttcttccgtataacagtatgaaagagttgctaattcagtacttcagttggctaaagatgggtgcacgcctaatgctttttttcccatgcag

SEQ ID NO: 42350 - DNA, 306 bp, Oryza sativa
  Clone ID: PAT_MRT4530_45610C.1
cttcatgtatgtggttctctcaggaaccagaaaattccagctaatctagtttcgtgtacagaaactcaacattacattactgtaaagcccagggtggaaaaaaaaaggactgggaaaaaaaacagttgtgttggtttgctgatcatttgattctctttcctggaaaattctgctatacgcctaaacagccggagataccatctccagaaaaatcacagatccgacgccctttggatggagggaagtgtgacatctctgtttatagtctatactctataccactgtgttgagctataagacgatttc

SEQ ID NO: 42351 - DNA, 1366 bp, Oryza sativa
  Clone ID: PAT_MRT4530_45611C.1
acgcggacgcgtgggcagaaactcaattatctctctccctcacctatattacctgcaccaacaccactgaccactccctcctcctgttcttgctccttcctcccagtgtctctcaagagcggtgcagggttcacaaggcaggagaaaatggagctaatcacaaacgtctccgagtatgagcagcttgcaaagcagaagctgccgaagatgatctacgactactacgcctctggtgcagaagatcaatggactctcaaggagaacagggaggccttctcaagaattctgtttcgaccgcgaatactgattgatgtatcccgtatcaacatggctacaaatgtcttgggcttcaacatttccatgcccataatgattgctccctcagccatgcagaaaatggcccaccccgaaggagagcttgctactgcaagagcagcttctgctgcaggaacaataatgacattgtcttcatggtccacttctagtgttgaagaggtttacaaggataggaatatagtacggcaacttgtcagaagggctgaattggctggttttaaggcgattgcactcactgtcgacactccaaggcttggtcgcagggaagctgacatcaagaacagattcaacttacctccacatctggtattgaagaattttgaagcgctggatctcggcaagatggacaagacaaatgattctggccttgcttcctatgttgctagccaagttgaccgctctctgtcttggacggacgtgaagtggctacagacaatcacctcgttgccgatcttagtgaaaggagtcatgactgcagaagatactaggcttgctgtcgaaagtggcgcggccggtatcatcgtgtccaaccatggagctcgccagctagattatgttcctgcaactatcagctgcctggaagagattggcaggccggtgctgttctcgctggccgtggacggcgaggccggcgtgaggaaggtgctgcagatgctccgcgacgagctggagctcaccatggcgctcagcggatgcacgtcgctggccgagatcacccgcaaccacgtcatcaccgacagcgacaggatccgccgctccaggctgtagaggctaagctctgcagcggttgcagtgatcgaattgtccatgtatggtatgctagtccatttgagatgctactgctagtagttattgtgatccctcccacatttgatgatgccgggtaataaggagagggaggaggctgggatgtgtgcctccaggtgtatgtgttcggtgttcctccgtgatggaggagtatgtagcagggaatttgtcactgttgctgtcgttggcagggaatttggtgattcagagtagtttgtgttgg

SEQ ID NO: 42352 - DNA, 1437 bp, Oryza sativa
  Clone ID: PAT_MRT4530_45612C.1
gacactcgcacgcagacatcacatccattccaggctcgatcgcttcgatccctttgcctgagaccgaagaaatggagctaatcacaaacgtctccgagtatgagcagcttgcaaagcagaagctgccgaagatgatctacgactactacgcctctggtgcagaagatcaatggactctcaaggagaacagggaggccttctcaagaattctgtttcgaccgcgaatactgattgatgtatcccgtatcaacatggctacaaatgtcttgggcttcaacatttccatgcccataatgattgctccctcagccatgcagaaaatggcccaccccgaaggagagcttgctactgcaagagcagcttctgctgcaggaacaataatgacattgtcttcatggtccacttctagtgttgaagaggttaattcagcagcgccggggatacgtttcttccaactctatgtttacaaggataggaatatagtacggcaacttgtcagaagggctgaattggctggttttaaggcgattgcactcactgtcgacactccaaggcttggtcgcagggaagctgacatcaagaacagattcaacttacctccacatctggtattgaagaattttgaagcgctggatctcggcaagatggacaagacaaatgattctggccttgcttcctatgttgctagccaagttgaccgctctctgtcttggacggacgtgaagtggctacagacaatcacctcgttgccgatcttagtgaaaggagtcatgactgcagaagatactaggcttgctgtcgaaagtggcgcggccggtatcatcgtgtccaaccatggagctcgccagctagattatgttcctgcaactatcagctgcctggaagaggtcgtcagggaggcaaaggggcggctgccggtgttcctcgacggcggcgtccgccgtggcacggacgtgttcaaggccctggcgctgggagcttcaggagtatttattggcaggccggtgctgttctcgctggccgtggacggcgaggccggcgtgaggaaggtgctgcagatgctccgcgacgagctggagctcaccatggcgctcagcggatgcacgtcgctggccgagatcacccgcaaccacgtcatcaccgacagcgacaggatccgccgctccaggctgtagaggctaagctctgcagcggttgcagtgatcgaattgtccatgtatggtatgctagtccatttgagatgctactgctagtagttattgtgatccctcccacatttgatgatgccgggtaataaggagagggaggaggctgggatgtgtgcctccaggtgtatgtgttcggtgttcctccgtgatggaggagtatgtagcagggaatttgtcactgttgctgtcgttggcagggaatttggtgattcagagtagtttgtgttgg

SEQ ID NO: 42353 - DNA, 602 bp, Oryza sativa
  unsure (1)..(602): unsure at all n locations
  Clone ID: PAT_MRT4530_45613C.1
ctccccgctccggcttcggccttcgggttcttgcccagcgttgccggtgagcgttccgacccccgcttgcgtcctcgtctccggcctcctccatgcctcccagtctctcctctccaacctccaacactagaagcttagcttccaactaaccatggatgatcacacttgtgttctttctagtttatactaatttaattttatctaaaaaaactagtatatgtaatntttgatttgattatcgtttcaattacaggaaaagaaatatagattgtcaaattaacatttcgtctacatgaatattcctttgtatatgacaattatgaattactcctaccattgttatctccatacaaaatgtgattctgacaatgcattttgacaagtactatttgtccaggtgtataggtataattattttttgggcgacaaagttaatattgttcaagcacatagctacattcttttgatagcgtaatcttaacttataattctggtcctccaaaaaaacttataattctgagagaagttgagaacttgtcctgtaccccttcaccgaaaatcagagatntaaaccatttctattattaaaaaaaaaaaaaaaa

SEQ ID NO: 42354 - DNA, 1918 bp, Oryza sativa
  Clone ID: PAT_MRT4530_45614C.1
tcacgcctccgcctctgcctccgcctccggcgccggcgtcacctcctccctccgcggcatcgcctccagcgccggcgccgcctcctccctccgcggctccacctcaagtgtcggcgtcgcctcggtcttccccagtcctacgattgagttttgtttttttcacaactgaattttcgatgaagatttgcacattaatacagttaattcacagtagttctattacaggtagttaccaacaattgattacaacaacctacatgcacaagtatttgtacatttgtagagttgtacaactactacactaacgagtcactgcttactagacatcggagacgccggacacaaaaacgacgccggcgagcagcctccggaacctaaaaaaccaacacaaaaagaaaaggatctacacaagaacgaacatataatccatcgcctcgccgccgcgcagaatgcctaaaacctcatctgcgccggccggcaatggcgggctatggaagagaagagctagttattgttgttgagcagcgagtcccagtcgatctcgtacgacgggtacttggtgagcgcgaacccctccgcctcgtcccacggcacctcgctgaagtccagctgctccatctccgccagcggcgacgccgccgcagacgacgacgacgtctccgagccgccgtcgtcgccgccgccggagtggtcggagccggaggacgacgacgccgcggcgaccaggggcgcattgatgggcatggccctgccggcgccgcccctggacctggatgaggcgttcttggacgcggcgatggtgtcgcagatggcctggagcttggcgtccacggcggcgtcgagcgggccccgcgacgcggcgttgtccgggaagttgagccgcgccgcgtcgccgcggaggcggtacgcggcctggtcgtaggtgagcgccgcctcctcggcggtgtcgaaggtgccgagccagagcctggtgcggttgcgcggcagccggatctccgccacccacttgccccagtgccgctgccgcacgccgcggtacagcttctgcgcccgcgccgccgccgccgccggagcagccgccgaagcgggcttcatgggctgggcccgcgggccgagccccgactgggcctgccgctgcatgtggagttgggcctggacgcgctggatctgggccgggctgagctgggccgggcccatgtagtggaacccgtggactccggccgaggagaagttcgccggcgccggcggcaagccgggatgaaacggcggcggcgcgatcttctgcatctgcggcgacggagcctctcccagcgcccgcatcagatttccttctatagcagctgccatcgaatatctttttttttgtggattttttctaacctaaaaatctgaataacaaaccacctgttctttccaaaatccaagaactggcagacgaaaagagaagttctagatctactaatcactttacaaggggggtataagctaagctaactagcacaaggaggtgtggaaaaaattaaccctcttggctaccaaatcagaccaataatcttacaccaagaacagatcagaacaccagaaactaaaaggctctggaactctctgtcctgtacaccaacagaagctcaaaaacaaaggaaaaaaaaagattgatcctcagatgaagtgatctacctgctggaagacccaagaactcgctcagatctacggctcacctacctctctcaaacctcacagagatggagtctgggtgattagggcttttggattggattaggctttctggatgtgtgtgttcttgatggctcggagtagtgggtctcagcctcctgctggcggattccttagcccctgccgtcggggagcggcccgtgcgcgcgaagcttcctcccgggccactgcactgtgggcccat

SEQ ID NO: 42355 - DNA, 252 bp, Oryza sativa
  Clone ID: PAT_MRT4530_45615C.1
atgtcgtgctgcccgcttgtcttcctccgatgcttcactactgctgccgacacatacatcctcccacacgccgctacctctccacttctccccattggtatgaacagagcttgctatgtcggccagatcgagtggtctgatatgctgtttgaccaccccatctactcgccgaagtgctataccgactcgatcttatcgaagtctccaagtgcgctcactttactctccttccccttctctctccaggcctag

SEQ ID NO: 42356 - DNA, 2395 bp, Oryza sativa
  Clone ID: PAT_MRT4530_45616C.1
ctcgaggagtcgagacttctctcccccaaatccccagaaccctagcggagctccacctcgagatggcgacggcgagcgatgcgccggcgagctccacgataacgaccgccacggacgacgccgaggtggagcgcgaccagggcaacggcaatggcgccgtgtcagccgcacccgccgccgtggggaaggaggcggcggctgaggaggaggagatgatcggcccggctcccgtgccgccgcggccgaggaagaagcgcccgctccagttcgagcaggccttcctcgacgccctgccctccgcggccatgtacgagaagagctatatgcatcgggatgtcgtcacccacgtcgccgtctctcctgctgactacttcatcaccgggagcgcagatggacatttgaaattttggaagaagaaaccagctgggatcgaatttgctaaacattttcgatctcatctcagtcccattgaaggcctagctgtgagtgttgatggcctactttgctgcacgatctccagcgattggtctgtcaagatatatgacgttgtgaattatgacatgatgttcatgatgcgtctcccattcgttccgggtgcaattgagtgggtttatcgacaaggagatgttaaaccaaaactcgctgttagtgatcgtaatacaccttttgttcacatatatgatactcattctggttcaaacgatcccatcatctccaaagagattcatgctggcccagtaaaggttatgaaatataaccatgttcacgatgttgtgatatctgctgatgccaaaggactcttggaatactggtctccgtctaccctcaaatttccagaagacgcggtgaactttcgtttaaaaacagacacaaatctatttgaaatcgcaaaatgcaagactagcgtgtctgctattgagatgagcaatgacggcactcaatttgttgttacatcccctgatcgtaggatacgggtattttggttcaaaactgggaaactaagacgtgtatatgatgagtcccttgaggtggcacaagatctgcagaaaagtgatatcccgatgtatcgtcttgatgctattgattttgggcgaagaatggctgttgagaaggaaatagaaaagaccgaaaatgttccacagcctaatgctgtatttgatgagagcagcaattttcttatttatgctacccttttgggcataaagattataaatttgcacacaaataaggtttcaagaatcctggggaaggtagaaaacaatgaacgttttctgaggattgctctataccaaggtgataaagggaataagaaggttagaaaaattccttcagtagctgccaatgtcaatgacagcaaggagcctttatctgacccaacgctgctatgctgtgccttcaagaagcatcgaatatatctctttagtcgtagagaacctgaggagcctgaagacgcaaccaagggtagggatgttttcaatgaaaaacccccaccggaagagcttttggctgtatcagatttagggaagactgctacaacatcactccctgataatttggtgatgcatacttctatgggtgatattcacttgagattatatccagaagagtgtccaaaaactgtggagaatttcactacccattgccggaatggttattatgataatctcatatttcatcgtgtgattaaaggctttatgattcagactggagaccctttgggggatggcactggtgggcaatcaatctggggaagggagttcgaagatgaatttcacaaaagcttgagacatgataggccttttactctttcaatggccaatgctggaccaaataccaatgggtcccaattctttatcacaactgtggcaactccatggctagacaacaaacacacagtgtttggtagagttgtgaaagggatggatgttgttcagcaaatcgagaaggtcaagaccgacaagaatgacaaaccatatcaggatgtgaagatcttgaacgttacagttccaaagacataagctcaaacaattggtttgacattgtacgcatgaggttcttccaccctttgcaagcctgtgaaagacaaatgttctgaactttatgtgctgctgtggtgcatcgagttggtccttcaaacctcaacccagaggcagcaccatattattagaaagcactgcctttgatgaggtatgtgttccgagttttaactagctttcccatccataacccaagggcaatgggactgtaacatttttgctgtacacgggattggtattgcaatttaacaatggaaaaaatgtaacgagccagttagatgaggatacatggacgatttttccatgcatgggtgtaagggcgtaagttttattttgactagccactgaatgctgatacc

SEQ ID NO: 42357 - DNA, 213 bp, Oryza sativa
  Clone ID: PAT_MRT4530_45617C.1
atggccaacgaggtcaaggcacacacaaaggcccaaatgacacgtggacggtgcgaatggcgacgacggtcgagtccactctattcggtcccctacttctccgaggagatccatgacaagtgtagatgcttaggggtccgatctagccctggtgactggtacatcaacaaggctatggtgggtcgtttgcgagatgacggtgtgcagaggtga

SEQ ID NO: 42358 - DNA, 328 bp, Oryza sativa
  Clone ID: PAT_MRT4530_45618C.1
ggggattcttctccaacttttccacgattcttctgcttgctggtgtcggcacgctcatcaccatgtttgtcattggcggcatgctgctctggctcggccagatttggtctcatcaccaagctcacggcctgcgaggcgtacatgtattgggggcgctcatctcggctgtggatcccgtagcgacgctgtcggtcttcaagaagaatggcgtgccgccgttgctgttcaacctcgtctttggcgagagcatgctccatgacggcgtcgcgatcgtcgcattcacgctgttccagcggatcatcaaacaaaagatcgaagaggtcacgct

SEQ ID NO: 42359 - DNA, 362 bp, Oryza sativa
  unsure (1)..(362): unsure at all n locations
  Clone ID: PAT_MRT4530_45619C.1
cgnacangtagangatttncgcntctatnggacatccctgatcgcctatatgggaggncncaggtcgacnantcganctctnanncactcgnctgaanannntcctntcccgncattttgccncctngtncnccngngntnacccgtggncgttggcnccnttaatcgctttcttcatgttctctcttctcttcaancttngnttntttttctaattngggccccttacngaattcccnccccatcnntntctttcnctttntntttgcctaatcctcatatttttcctcccttcttttnccttcgttncaaattnccccttttnaatntatttnttcnatttgcnnccccntncccccncc

SEQ ID NO: 42360 - DNA, 177 bp, Oryza sativa
  Clone ID: PAT_MRT4530_4561C.1
atggcgaaggctatggagcaagaacggcgcaaggcgaagagtcgtacaagcgccaggccagaggcgtctcaggcgaagggtgcaaggcgaagactatctgctgaaggaggacgacttcgccttgacaagttcgcccccgcgagggccgaggaagcctttccggcccatcaaacctag

SEQ ID NO: 42361 - DNA, 803 bp, Oryza sativa
  Clone ID: PAT_MRT4530_45620C.1
tgtattctcttgcggacacacgagccccaggaaggaaagcagcgagacccccggatcgaaacgcacaccggcggcgatggcgatggcggcgctgcgacgggaggggaggcgcgtcctcctctcctccaccccatccccggcggccgccatggccgcgcgctcccccgccgccgcccaccaggagattgccccactaggcgcacgttctgtttcaacacaagttgtgagaacccgcatgaagagtgttaggaacatccagaagattacaaaagcaatgaagatggttgcagcatcaaagcttcgagctgttcaaataagaacagaaaattcacgtggtctatggcagccattcaccgctcttcttggggatgtccctagtgtcgatgtcaagaagaatgttattgtagccattacctctgacaagggtctttgtggtggtatcaactcaacgtcagttaaagtcagcaaagcactccacaagttgacttctggaccagagaaagaaagcaagtatgtcatattaggagaaaagggtaaagttcaactcattcgtgactccaaggataacatcgagatgacagtatctgagttgcagaagaaccctatcaactacacacagattgctgtgctggcagatgatatcttgaaaaatgttgagtatgatgctctaagggttgtttttaacaagttccactcggtcatatcattcaagcccacaatgacaaccatactttccccagaggttatggagaaagaatcggaatctggtaaggttggtgacctggattcatatgaaattgaag

SEQ ID NO: 42362 - DNA, 1409 bp, Oryza sativa
  Clone ID: PAT_MRT4530_45621C.1
atggccgcgcgctcccccgccgccgcccaccatggattcattaccctcggatttgaggcgcatctagggcgaattggagttggtgcttgcggctgcgaaatgtatgtgtggcctcgtatagctggttacttttgttgcaaacaatatgacattatattgttaattgcacatttttatcgtgcattgagaacccgcatgaagagtgttaggaacatccagaagattacaaaagcaatgaagatggttgcagcatcaaagcttcgagctgttcaaataagaacagaaaattcacgtggtctatggcagccattcaccgctcttcttggggatgtccctagtgtcgatgtcaagaagaatgttattgtagccattacctctgacaagggtctttgtggtggtatcaactcaacgtcagttaaagtcagcaaagcactccacaagttgacttctggaccagagaaagaaagcaagtatgtcatattaggagaaaagggtaaagttcaactcattcgtgactccaaggataacatcgagatgacagtatctgagttgcagaagaaccctatcaactacacacaggataaggaatggcactggtggtggcgcaaagttgtgcagttagcagaattagtttcagctgtgttaattacgttgcagcagaagttcacggatgtgattgctgtgctggcagatgatatcttgaaaaatgttgagtatgatgctctaagggttgtttttaacaagttccactcggtcatatcattcaagcccacaatgacaaccatactttccccagaggttatggagaaagaatcggaatctggtaaggttggtgacctggattcatatgaaattgaaggaggtgaaactaaatcagaaattcttcagaatcttaccgagttccagttttcttgtgttatgtataatgctgctctagagaatgcatgcagtgagcttggagcacgtatgtctgccatggacagctccagcagaaacgctggtgaaatgcttgatcgactcaccctcacatacaacaggacacgtcaagcatctatcactacagagctcattgagattatctctggcgcttctgcccttgagggataatgatgaaacttttgcccatctttttttgttttgctgttcgaaaaaagttcacttgtcatatggagcagcctttccctcgagtggatcctcatgctaagttgcaataattagcccagttacgtgacggtgctatgcatatatcagaaatgcttgttccagtcatccttgtttatctgaatggcgacgtattttaaacaatcttttacagctgtgttcattttgcataaatgattgatcactgttctgcgttgaaaaaaaaaaaaaaaggcggccggacgttaaaaaaaaaaaaacacaacccc

SEQ ID NO: 42363 - DNA, 253 bp, Oryza sativa
  Clone ID: PAT_MRT4530_45622C.1
tgttttcctcctctccgaaaactctcccctctctctgctgctgtggccgcatcatctcctcctcatcttcttctccacagcctccagctaggccatggcgttcaccgtctccttctcctcggacaacgtgcagatgcttcagggcaggagctgccaccgtcacgcggcgttcgggggctgcttcgccgtgccaagaaccggtccaaggatgcgttccgtcggccgtttgggccatcactctagcctcgtcgcc

SEQ ID NO: 42364 - DNA, 475 bp, Oryza sativa
  Clone ID: PAT_MRT4530_45623C.1
tttttttttttttgaagtctgctacatccaagcagcgatttttccagcattttccaaaaacagaagttttcaccaacatcgctatagagatgggtgctggcatatatacaaaatggaaactagcaatccatgaaacctgttgcgcaacgatcccatggcagcagttctgttgcctaatttcatatgcaccagggacagtttcaggctggggggccagggccgcccccccttagcaacgatagacaggtcgaacacagcaaagtggtcaacatgcagcagcaggtcaccaaatggttcctccagtgcatcggcgtgcccatccacaataaagcactatgcctccctttttcaatcagctgggtccctacaaggtacaccagtttatcgtccatatctgtggtatcccgtggatccatcaagagaacatcatagtatcaactcggtcagagaatgcaacaccaaggcacagcggtcc

SEQ ID NO: 42365 - DNA, 1557 bp, Oryza sativa
  Clone ID: PAT_MRT4530_45624C.1
atggcggcggcgaagatggcggggctgacgccggggttcaagttcgagccgagcgacgagcagctcgtgcagttcttcctcctgccctacctgcgcgagctgccggtgcccctgggcggcctcgtcatccgggacgacccgaggagcgtgccgccatggaagctcttcgcgcgcaacggccggggcgacgaggaggacgcctacttcctcgcgccagccgacggcgagggccggcaggcgcgcacctgcgacggcggccgcggcaggtggatcacccagcggctggagcgcacgggcaacctgcggctcgccggcggcggcggcagcggcgaggccgtcgtgttcgagaagcacaggctcaactaccacgccggcgaggggcggtgcggcagcacggggtgggtgatgcacgagtacgccgtcgtcaagcccgcggcgctcggcgcccgccacagggcgtgccacatcgccttcaccggccacggccagaagcggaagcgcgtgcccgacggctacgtcgacgtcgaggacgacggcagcaaggccagcaccaacgcggccgccgccgtccctccttcctcgacggcggcgatgtcggcgtgcccatcgaatgtcacctataaccaagggtgccatatctcgccggagcagagcatcgaacagcacttccccgcggagcataataatatccaaatccaacagcaagcttactaccaatcacaagaccacgagcagtgccagtacagcgacgaagaaaaatacctgttgcagcagatcaagcaagaacaatactactacaaccagcaaaactgcttcttgccaggccaaggcaaccaagaactgtactacaacgacgagcagcagcaaatattctcgttgccggagcatcagtgcagccaagaacagtactgccatcacgacgaccagcaagactgcgtcttgccggagcaacacagccaagaactacacgggtacaacaacgaagaccaaggatccctcttgccgccggagccgatcgaccaggaggaacaagccctcttcgtcggcggcgagccgcagcatgaacaacaacccttgacgtcaaccccgcggcaggctcttcttgattatgatgatgggaagctcctgccgccggtcggcgtcaacggcgccatcgcgatcccgccgcaggacgccgccgtggcgtccaacgacgacgacggtgggcaggctacggaagcgccggctgcgaagatgacggcggaggagaagaagtggttcatggaagagttattgaccgagggctgttggtctggacctcttctcttcgaccaaccgtactacgccgccgcgccgaccggccgctaccgcgccaccctccgcgtcgcgctggctgcctccgccacccccgcgccgcgccaggccgctgctgcgcgggctgccgctgccgcccccgcgccgcttcgctactgcctcttcgctaccactgccgtctctgcgaggaaagagtggataagagcaagaaaagaggagaggataagagcgaggagggagataaggagaaagactttgcgatag

SEQ ID NO: 42366 - DNA, 177 bp, Oryza sativa
  Clone ID: PAT_MRT4530_45625C.1
atgggctaccccgccgcctccgcccccggtccgccctcaccgttcccggtgccgcacggactcagccccaccgcgttcctcgggggctcccccggcctcttttccccgacggttagtacaatgatgattgtgttggacccgcctatccagatttgcgtgctgttattgaaactgtga

SEQ ID NO: 42367 - DNA, 504 bp, Oryza sativa
  Clone ID: PAT_MRT4530_45626C.1
atggacatgggagggcacgacatgggcggcatgtccccgccggcggccggggcggcggcgcagggcggcatgggcgccatgaagtcgatgaggtacacgcacatgaccttcttctggggcaagaactcggaggtgctcttcaccatgtggcccggcacgagggggggcatgtacgcgctggcgctcatcttcgtcttcgcgctggccgtcatcgtcgagttcctcggcagccgcagggcggacgcctgcctcgccgcactggcgcggcgcgccccggcggcgggcgggctcgcgcgcgcggccgtgcacacggtgcgcgtcggcgtggcgtacctgctcatgctcgcgctcatgtcgttcaacggcggggtgttcctcgtggccgttgccggccacgccgcggggttcctggcgttccgcgccggcctgtgcggcggccccgcgcaggtggaggaggaccgcaagaacgacccggcctgctgctacacgggctccaagatgtaa

SEQ ID NO: 42368 - DNA, 317 bp, Oryza sativa
  Clone ID: PAT_MRT4530_45627C.1
ggtgttacaaggcggtccaagtcatcatccggaggcagcggtggctgcgcccttccgcggtgggacccacaagtggtgaggctggccatggcgccgtcgccgcgcctctcccctcccctctaccccttcccctcctgtcgcgaggcgctcaaagcggcggagcttggcggccacctggatgtcatacaaactcaacgtaaagttaagggaaggatggtgaacttattccaatttgttgagacggctgagcagctacgcttatggcccagcttcaggccgaaactctaccccaggccagcccaacaggaaggattcat

SEQ ID NO: 42369 - DNA, 365 bp, Oryza sativa
  Clone ID: PAT_MRT4530_45628C.1
ttgtttttttattttttgggttttttttttttttttttttttttaacccaagataaattcatattacttcagggcatacataagattgggagatcgacaagcaaaaacatactggggccgataaacagaagttttaaagaacccagcttgggaacatcgaatgatggaattcagagtctgatctccctaacttgcctggcaaaatgataacagcttctctaaatcaaacacaaagcaaaactcaaggaagaacgaacgagattaggcaaccaattttgattactctggtccaatccaacaggattgagccaccgccgccattgcctccaagttggcagttcttagtttcttcagttggttacatt

SEQ ID NO: 42370 - DNA, 312 bp, Oryza sativa
  unsure (1)..(312): unsure at all n locations
  Clone ID: PAT_MRT4530_45629C.1
atgaccggcgatgaccacgaaggtcccttggaggacgcattggaagcgncggtgctgaagaaagtctgcaagatcactagaaatgncggcgaaggtggagatggcagcaaagncgncgaagagnaagncggtgaaggcgtcatcaaatccatggcggcagcggctagggttcaagccgcaacagcgacgaacttgttcgttcccctcctctttctgatgctccctcgatgtgggttgtggtggcgccgccggacgtggtgggcttgccgcatcagcccacttactcctaagtggttaggcctaagtgggtaa

SEQ ID NO: 42371 - DNA, 410 bp, Oryza sativa
  Clone ID: PAT_MRT4530_4562C.1
gtgttgtggtcggacgagacctgctgccctcgcgtcggtaccgtcacctcctacggcgggcggcactacttaggggacgagcccttgctatagcggccaccaggtgcgaagcctgcagtgccggccatacaagtatatgcgcaccccatgcacgatgcagtcagaatgcagccggactacgccttctccggctaccgtccccagcacgagcagcagcaggctacggatcctctggctacggagctaagcgccagcccgactgtggcgaccgtccccaggccgagagaggagaacacacactgctccggctatggatctggatacggtggtggacgacggaagcaacaggaagaggatgagctacaggtgcagctacggtcgcatgccgcaggtcgaggagagctatggat

SEQ ID NO: 42372 - DNA, 145 bp, Oryza sativa
  Clone ID: PAT_MRT4530_45630C.1
caagcacagaagcatgcaacacagggattaactcatactcactactataaatcttcgaccatgtcgacaggcggactgcgatgtctgcagagcaggcggaaaggccacttggcgatatgagcaaaagcactcagagcgcgcgcag

SEQ ID NO: 42373 - DNA, 304 bp, Oryza sativa
  Clone ID: PAT_MRT4530_45631C.1
gggccccacccccccgggggttttggccccccccccccctttttgttttccacctgctctgaggagttttgcacaccacacccacatagcgctatccccaccgcgattttaaaagtttttcccggaataatttttgaggttcccccgaaagcccgagacttcacgagtaattgtaatttgagaactagtatcggcgtagagtaaaataaaaccacccacccagtatgacaccttggtggtgattctattcgatatcagtactaaataaaggttaccaatttcttaaaaaaaaaaaaaaaaaaaa

SEQ ID NO: 42374 - DNA, 264 bp, Oryza sativa
  Clone ID: PAT_MRT4530_45632C.1
atggatatagatggacagccaggacagggacaagatggatatgggtgtggtcatggccgtgtttccggtttgcattcaacgatcgagcctacaaacgttgccgctgctagccgcggacacggaagtccattgagtctgaatggcatgcctagtggtagaagtatcatcggcaaaaggtttagaaataaagatttgggcacctttttgacaaaaagaagtgctagcacatgttcccctcatccaagtccaagtgcccacggatag

SEQ ID NO: 42375 - DNA, 247 bp, Oryza sativa
  Clone ID: PAT_MRT4530_45633C.1
ggcagcctgcaaacaatatactggtccgatggtgtacaccgaaattgactggacagaaccgtggcgttacacagcttaatcgggttaaaacccaggcgtgccccaaccagatggcgtagcagcaaataggcctttacgcgagcgggcttactaacagaagaggccccctcaatggcgacctgggacaacgccctgtcacgctgcatgagagacgggacgcgccgtggttcggcgcattaagaccggt

SEQ ID NO: 42376 - DNA, 710 bp, Oryza sativa
  Clone ID: PAT_MRT4530_45634C.1
cccaccggccggggcttcctctcctctcttcctccaaaaccctagccttcctcctcctctcccggcggcggcggcggcgatggacaagagcatgctcggcgacctcgacggtctcccggaggaggacaagatgcgcatggcggccatggtcgaccagctccagatccgcgatagtttgagaatgtacaactccctcgtggaacgatgcttcacagactgcgtggacactttccgccggaagaccctcgacaagcaagaggaatcctgcgtccgccgctgcgctgagaagttcctgaagcactccatgagggttggcatgagatttgctgagcttaaccagggtgttgccacacctgactaatcaattgggtttggtttctaacgttggcaattttgtcagcataaaatctgtaatccttaaatatttgagtacttgaggatacgagagacatcatgttttcctcttaaaccgatgggcgactgctgggtatcaagttgaataaatttatattaaattcccatattggtagctattgagaagagccatatttctgaatatttttatggtatatcgtgtaatctaattctgttatgtctaatttcatatcctgaggttacaggaaccttaagtacatttttttaccaacaacagggacaagaacatagcggcccagctattcccttagtgaggtaatttaggtgcatgccgt

SEQ ID NO: 42377 - DNA, 2502 bp, Oryza sativa
  Clone ID: PAT_MRT4530_45635C.1
atgagaaggagaaggaagaggacgttgtgtcgcggcaaagcttacattacaacattatcggggaaaagggtgggaaatgttgtaatggcaacaagcggatcccttgatgaggtgcaagagataaatgtgcacctggaaacagtagaaaatgcactcgtgaaaacagtggttaatgaggatgattttgtcgatgaggaatcaggaagtgatactgatgaacaagccacagaagatgacttggaaatcatggaaccaaaggaagggatggcatttgccagtgtgaatgatgcttttgtgttctatgagagatatgctcagaagaagggattttctataacaaggagaatctcaagcactttccaatccttcaccttcgcttgcagaagacaagacaacgctcaatgctcctcaaacaatgcatggaagcatcatcagaatgaatgtccagctaagataattgtggatcttgatggtcctgacgacaaattcttcttatcttcagttacgcttgagcacaatcacgatctcagtccaagtgaaacaagtcgaatggaattcaagaatcctagctttttctatgctttggactttggcaaggactcctgcctgagaaatgttttctgggcagatgcaagaagtagggcttcatctatgtcaaataagccaccagaagtcataattactgatcagtgcgatgcgattcaggatgctatcgagaaagtttttccacaaacttgtcatatatggcgtttacagtctgtcatgaagaagatgcctgaaaatctcagtggattctcaggatttcaaagcattgaaaatgctttttcaactgtggtacataattcattgacacaaactgtttttgaaaacaattggagtaagataattgacaagtttggccttcatggcagaagcgcatggcttaatatgctgttctgtaataggcataaatgggtgcccacttatgtgaaaaataacttttgtgctggtatgttttgcacacaaaatagtgaaagcattggtagtttatttcatggatacatcaattctaccacaacgttggacgagtttctggaccaatataataaaacaattgtgggcattgattgtaaggaaactgatgctaactggaaatcctcacatgaggttgtaccatgtgtcacccattatggcattgagaagaaattccagaaggtttatacaaataaaatgtttgaagaatttcaagagcagctaaaaggtaagatgtactgttatccaactcttctgaaacaggaaggttcggtttacatattcaaggtgacgcaagatgttaaaattagggagcaacaatgtagcttggatttcacagtgtggtgggacagagatgattgtgatggaagatgtaaatgcacatgccgtcatttcgaattccggggaatattgtgtagccacatcattaccgtacttgctctactgaaggtcaaaaaagtaccctccaaatatgtattgcagcgatggagaaaggatatgattcggagacacggtaccattactaactggtcctataatgagatggtcgactcaccggttgcacgaaggtttgatttgttatgcaaatccttctatgaagtggcagagaaggcagtggtatcaaatgaactgctcatgttggtgctggatagtgttgaagaattaaaacggaagcttgttcttggattagattctcatatatcagcgagaattcttcactttggacttgcaaatccctcagtttgccggctttggaattccaaagggaaagtcacgatgagatccctcttctacgtgactttcctggccattttgtccataaacgtccattcctctgcatgcttgcgcctcctagctgaaactccattgccggtgatcccaaatggccagccaggagcaccggcgccgccccctccggcgaacattccggtgaacttgccggccaacgtgccaccggagatgccagccaacttgccggccaacgtgccaccggagatgctggccagcttgccggcgaaccttccggccaacgtgccaccggagatggtggccagcttgccggccaacgtgccaccggagacgctgtccaagattccggccaacgtgtcaccggacgtgctagccaacttgccgccggacgtgctggccaagctgccggcgaacgtgtcgccggagatgctggccgacatgccgccggaggtgctggtgaacctcccgccggacgtgcagaagcagctcccggccaacgtcccgccggagaagctggtcgccgagctcgcggcggcggggaagaaccagccggcggtcgccgccgccgcgggcatcccgcagatgcccaagatgccggacttctccggcttgaccgacctgtcgttcccgccgatgccgtcggcgaagatgccgtcgatgccgcacaacatcacgctcttcgggttcgacgtgcagatccccgagttcatcaacaagatggtggatgaagaaaccacttaa

SEQ ID NO: 42378 - DNA, 305 bp, Oryza sativa
  unsure (1)..(305): unsure at all n locations
  Clone ID: PAT_MRT4530_45636C.1
tttttccgctttcccttttcccccctcctcgatccgcggcgcaaccgaacacgaaagcgagagagagaggagtgcagccgctgccctgtcccctcaccgcgccgcgccgacatggagctgttctacgagctgctcctcacngcggctgcctccctcctcgtcgccttcctgctggccaggctgctggcctccgccgccaccgccagtgatccccgccgccgcgcgcccgatnacnccgccgtgatngcggaggaggaggcggtggtggtggaggaggagaagatnatcgaggtcgattaggtcga

SEQ ID NO: 42379 - DNA, 284 bp, Oryza sativa
  unsure (1)..(284): unsure at all n locations
  Clone ID: PAT_MRT4530_45637C.1
ttctctnccacccaagaaaccactacaaaaccaaaccaaatctcgnggcgcatggnggcggcggcggtggcggcgaacggcggcggcgacggcgagnaggcgtccaacgcgcccnnccccaccaggctcgnntcggtctacagcnaggtgcagaccagccgcctcaagcacgcgctccccctcccctccgtcctccgatccncnttagccctcgccgacggacccgccagctttcgangccggcaancccggtgagatcgcgaagtgttccccaacctgttcgg

SEQ ID NO: 42380 - DNA, 499 bp, Oryza sativa
  Clone ID: PAT_MRT4530_45638C.1
ctactgctcaacttccgatccctcaacctctctctccaccagccggcggcggacggagattcgccggagatcaggcggaggcactgcgggctgctcctctccccgccccgcgccgccgtttcctcctcgtcgggccaccgtccgtcgccgccatcagatcgtcgatcccgtgccaccaccaggaggccgcgcgcccgagcaggtggattcggggccgcgccctcctctcctccgagctcaccgaggtgcgcctccatcctccgatctcaccgccacgcttctacttctaccccccattttccttgtagagtagagtagtaacttgttggaatcaattggtgtatgatttgctcacagtaaatggtatgcgtagtgtagcgctgtcaatttacaacaattgatttattattctgtcatgcaaattgtacagtgatttcaatttcgttttacctgaaattagtgccaccgcctggttcaaccgttaaaaaaaaaaaaaaaa

SEQ ID NO: 42381 - DNA, 300 bp, Oryza sativa
  Clone ID: PAT_MRT4530_45639C.1
atggtgaactgttgtgaagggagttgtaaaagtggtatttcaggccgtattgcaagagctagtgggacctgtgacaatcaggcagccgcccgagaagacttagcagaagtgcaggatatcatccaacaactggagctctcaagtggtatggatcagcggatctactccccaaatggccactcagagaccttctcctccagctccctatatcaattcctttcctcttccaatctacctaattgtgccaactgggatttcgtctggaacaatgcagctctgccaagagtgcaattcttcgcc

SEQ ID NO: 42382 - DNA, 1998 bp, Oryza sativa
  Clone ID: PAT_MRT4530_4563C.1
atggtccgcgccctgtcacgtgcccgcagcctgctcgacggaattccccaccggcgggggcgtgctgcgagttcgtccgtgtccggccatggcgcggaggaggctgttgcgggatacgtccgcatgctggctggcggggccaggcccgacgcgtacacgttcccgtccttgctcaaggcggcggcggcggcgcggggcgcggccgtggcggcggcatcagttggcggtgccatccacgcgcacgtggttaagttcgggatggagtcgaacgctcacgcggcgagctccctgatcgtcatgtacgcggccaggggagacggcgccgcggcgcgcgcggtgctggaggcggcgtgcctcgccacgggagggggagcgccggtcatgtggaacgcgctcatctctggccataacaggagcgggcggttcgagctgtcctgctgctccttcgtggacatggtcagagccagcgccatggccaccgcggtcacctacgtctcggtgctctcggcttgcgggaaagggaaggacctgctgctggggatgcaggtgcacaagcgcgtcctcgagagcggggtgttgcctgatcagagggtggagaacgctctggttgatatgtacgccgagtgcggcgacatggacgcggcctgggtgttgttcgagggcatgcagatgaggagcatggcgtcctggacgtcggtaatttctggccttgtgaggtcaggccaggttgatcgtgccagggacctgtttgatcatatgcctgaaagagacaccatcgcatggaccgcgatgatcgatggctatgtacaggttggcaggttcagggacgcattggagacattccgttacatgcagatttgcaaggtgagagcagatgagttcaccatggtcagtgtggtcactgcctgtgcccagctaggtgctctggagacaggggaatgggcaaggatttacatgggaagacttgggatcaagatggatgtttttgtcgggaatgcactcatagacatgtactcaaagtgtgggagcattgagcgcgcattggatgtattcaaagatatgcacaacagagataagtttacctggactgccattatacttggtctcgcagtgaatggccgtggggaggaggctattgacatgttctatagaatgctcagggctttacaaactccagatgaggtgaccttcgttggtgttctcactgcctgcactcatgctggcttggttgacaaaggccgagagttcttcctcagcatgacagaggcatataatatttcccctactgtggtgcattacggatgcttaatcgatgtcttaggccgagctgggaaattaaaggaagcattggatacaatagacaaaatgcccatgaagcccaactccactatttggggaaccctgctggcatcctgtagggtttatggtaattcagaaataggtgaattggcagcggagcgtctccttgagttggatccagataacagcacagcgtacatcttgttgtcaaacatgtatgcaaaatctaatagatggaaagatgtccgacggattaggcagataataatggagaaaggaatcaagaaagaacctggttgcagtatgatggggatcctcggcataattcacgaatttgtagccgctgataggtctcatcctatgaataaagaaatctactcaaagttggaaaatgtgctaactgatttgaggaatgctggatatgtgcctgatgtaactgaggtccttgttgaagtcacggaagaggaaaagcagaaggttctttactggcacagtgagaagttggcagtcacttttgctttactcacttcagaatctaatgttatcataagaattgtgaaaaacttgaggatgtgtttggactgccacaacgcaataaaattgatatcgaaattgtatggaagagaggtcattgtgagggataggacacgcttccatcattttagacatggatcctgttcatgcaaagactattggtaa

SEQ ID NO: 42383 - DNA, 795 bp, Oryza sativa
  Clone ID: PAT_MRT4530_45640C.1
tcccccgggctgaggtacatcataccatagagctgtaaaagcaatgctgaatgtgatcaaaagagcccatctcattccattccattccatccccccccggcccgcaggtccaccatagtatattattgctaagcagagaaagcagctgctcatatccaaatcattcataggacacccctctcaagttattcccccatgacaactcttattctttaatttgcttggcagattcttcccgttcgcctagaagttatcctggaacacatccacattgtgcagagagttagaacttagaaggcattggtttttcctgttctttttgttcattctttagtgaagatagatttctttaatacgcttgtaatgccagtatttaaggtgaggtagacctttgaaggaagggatgacttccataccagcatgagatgatagtgagagagatgaagaaattttagctgttcttctcctgtctttgttagcttaggaccatcatttgctgtttcagttggctgttttcctgtcgaagaggttcacctctgctgcttgatctttcctttgtgttgttttctgttgagaggagactaaattgactagcatcaatgctactgtttggaagaaaaagacttctcgctgtgttgggaagttgttgtacgattctttcgcttctcactccaactcagtgtgcttcaagcagccctgatagtttaaatcagagttacaagattgtccagcctttggagctcaacaccaaaatctcccttcaactcaagctccatgccttcctgctctggtctt

SEQ ID NO: 42384 - DNA, 2661 bp, Oryza sativa
  Clone ID: PAT_MRT4530_45641C.1
atggcggccaacggcggcggcggcggcgccggtggctgcagcaatggtggcggtggcggcgccgtgaacggcgcggcggcgaatggcggcggcggcggaggaggcggcagtaagggcgcgacgacgaggagggcgaaggtcagcccgatggacaggtactgggtgcccaccgacgagaaggagatggcggcggcggtcgccgacggcggcgaggacggccggcggccgctgctgttccggacgttcacggtcaggggcatcctcctccacccctacaggttattgacattggtcagattggttgctatcgtcctatttttcatatggcgtatcaggcacccgtacgccgatggcatgtttttctggtggatatctgtgattggagatttttggtttggtgttagttggctgctaaaccaagtggcaaagctgaaaccgatcaggcgtgttcccgatcttaacctcttacaacaacagtttgatcttcctgatggaaactccaacctccctggccttgatgtattcatcaacaccgtcgatcccataaatgagcctatgatatacactatgaacgccattttatccattcttgcagcagactacccagttgacaagcatgcttgctatctttcggatgatggtggatcgatcatccattatgatggtttacttgagactgcaaagtttgctgcgttatgggttcccttttgccgaaaacattccattgagcctagggcccctgagagctattttgcagtgaagtcacgtccatacgctggaagtgcaccagaggattttctcagtgaccacagatacatgcgtagggagtatgatgagttcaaggtacgcttagatgcgctttttactgtcattcccaaacggtcagatgcatacaaccaggcacatgccgaagaaggtgtgaaggcaacctggatggcagatgggacagagtggcctggtacatggattgatccatctgagaaccataagaaaggaaatcacgctggaattgttcaggttatgttgaaccatccgagcaatcaacctcaacttggtctaccagcaagcactgacagccctgtggacttcagcaatgttgatgtgcgccttcctatgcttgtatacatagcccgcgagaagcgcccaggctatgaccaccaaaagaaggcaggtgccatgaacgtgcagctgcgagtatctgccctcctcaccaatgcaccattcatcatcaactttgatggtgaccactatgtcaacaactcgaaggccttccgtgctggtatatgtttcatgctcgatcgacgtgaaggtgacaacactgcctttgtccaattcccccaacgttttgatgacgttgacccaactgataggtattgcaatcacaaccgagtcttctttgatgctactttgctcggcctcaatggtatccagggcccctcttatgttggcaccggttgcatgttccgccgagtcgcactgtatggtgttgacccacctcgttggagacccgatgatggcaatattgtggatagctccaaaaagttcggcaacttggactccttcatcagctcaatacctatagcagcaaaccaagaacgctcaatcatatcaccacctgcccttgaagagtctatcctgcaggagttgagtgatgccatggcatgtgcatatgaggatgggactgactggggcaaggatgttggttgggtttacaatattgcaaccgaggatgtggtgactggtttccgattgcatcggacagggtggcgctcaatgtactgccgcatggagcctgatgcattccgcggcactgcaccaatcaacctcactgagcgcctctaccagattctgcgctggtcaggtggctcccttgagatgttcttctcacataactgcccactccttgctggccgccgactcaactttatgcaacgaattgcttacattaacatgacaggctacccagttacatcagtcttccttttgttctatctcctcttccctgtcatatggatctttcgcggcatattctacatacagaagccatttcctacatatgtattgtaccttgtgatcgtcatatttatgtcagaaatgatcggtatggttgagatcaagtgggcggggctaacactactggactggatccgcaatgaacagttctacattattggagcaacagctgtttacccgcttgcagtcctgcacatagtgctgaagtgttttggtttgaagggtgtctcattcaagctgacagcaaaacaagtagcaagcagcaccagcgagaagtttgcagaactgtatgatgttcaatgggcaccattgttgttcccgacgatagtggtgatagcagtgaatatctgtgccattggcgcggcaataggcaaggctctctttggaggatggtcactgatgcagatgggagatgcgtcgctcgggctggtattcaacgtgtggatcctgctgctgatatatccatttgcactgggtatcatgggaagatggagcaagagaccctatatcctgttcgtcttgattgtgatttcatttgttataatcgcattggccgatattgccatccaggcaatgcgttctggatccgttcggctccactttagacggtcaggtggagccaacttccctacaagctgggggttttag

SEQ ID NO: 42385 - DNA, 1282 bp, Oryza sativa
  Clone ID: PAT_MRT4530_45642C.1
cgaaattttattaagtgcacgagtcgacggtgtccgaaagagacagatctagctagttacaactcttgagcaatctagctagttcatgcacgtaacgttagcaccaccggccggccggatcgatcaggttgtagggattacggcggcgatcgatggacatcgtcggcgcgggcacttcgccggcagcgaggtggaaggcaccggcgtccatggtgttggtgcagctcttcaactcggggatgattctgctatcgaaggtgtccatcaacggtggcatgttcgtgttcgcgctgctctcgtaccgcagcgtattcggtgccatcttcatccttccctttgcactcatcttcgagcgaggcaagtggagggacattgattggagcgcaaccggatggattttttttaatgcgttcatcggatatgccgtaccaatgagcctctactactatggcctcaaggataccacaccatcctactccgtcatctttacaaacataattcccttattcacctttgttctttcacttgtgtttagactagagacattcaaattaagaagcaaggctggcctactgaagatagtgggtgttctggtctctgttggaggcacaatgcttgtcagcctttacaaggggaagtcactgcatctctggaattccatcttgcagcaccaaaaggaacaacaaacgaagtctgcaaccaatcagctaagagggacaattttcttggcaggcagcagcctcacctttgcttgctggtaccttgttcagtcaaaggttctcaaagtgtacccgtataaatattggtcttccatggtgacatgcttggtcggaggatttcagacagcatttgttggaatcatattaaggagagacaagaatgcttggatgctaggatgggatctcaaccttgttactgtagtgtactcgggggcacttgcaacagctggaaaatatagcctaaattcatgggcagttgctaagcgaggcccagcatatcctccaatgtttaacccactatcagtcatcttcactgttgtttttgactctatccttatgggcgatgatcttacagtaggaagtctcataggcacggcaatggtgattgttgggctctacctttttctctcagtgaaagcatgagaaggtccatggatgtaaacatgtagattctacaaaggttctcgaagctatagaatagagttgtatatgcagacagtgaaatgtatgtaattcaataattaaatgtgaaacaatatactcgaggaggtgagcatgcactt

SEQ ID NO: 42386 - DNA, 1488 bp, Oryza sativa
  unsure (1)..(1488): unsure at all n locations
  Clone ID: PAT_MRT4530_45643C.1
aaaaccttataccatcacatagctttatagaagcctagaagagccatttttcaattttnatggcttttagtccacaatccaatctggttatgacacacttttttttttgtgaacagaaactgcttgattttgaaattcacaatatatttggaagatatcagtactggcataatggttctagtttttacagtacaattagcaagcaggctccaagagattttgcacatatcagaacttgctaaagaacccgcaaatatggtcggagacctcatcaggcttctcctggttgatgaaatgggcaacaccctccatgataaccacatcttcgagatttggcacacatgcctttagaccacccttgtggatgtaatcttttacacctggaatgttgtacgtaaggtcctgatctccaacgatgaattttgtcggaacttttattggaactccagtccatggtgcagtcagctcccagttcaagtctatgcatctgtagtagttcaatcctccagtaaatccagtcttctcaaatttctcggcatagtaggaaatgtcttcttctgacagccatgcagggcaagtaccatctgaatcaattgagtcaaataaagtcttgcctgggggtataatcagaggtgctgccttgcgcattccatagaatttcttcaagagacactttatatcacctctaccaaattcagcttcggccactccaggtttccgcgacagcactccctctgaaccttgagcagactggagcagagccgctcgtggaaggccgctgctccagaagggaagcattgggggaaggccgctgcagacagcgatgtagtggtcatccccggaaggccgctggaagaagcagatgtagtggccgtccccgcacacggccctgagggtttgtacggggctcctcgtggggttccgcgggtggtactcgacgctgagggcgacgaacgccgtgacgaggtcggggcggagcaggcacagttgccacgccacggcggcgccccagtcgtgcgccgccacgaacacccggggctggccgacgtcggcgatgagcgcgacgaggtcgcccacgaggtggagcacggtgtaggagtcccggcccggcggggcgtcggagtcgccgtagccgcggaggtcgggcgccacggcgcggaacccccgcgcggcgagggcgcgcatctggtggcgccacgagtaccagagctccgggaagccgtggacgagcagcacggcgggcccgtcctccgggcccgcctccgccacgtgcaggcgcaccccgcttgccacctccaccgtccggtgcctcacctccgccgccgccatgtcgcgcgctcgctaccacggcggtggttgggcacctcacctggccgagtagtagacgactagtaggagagtagagtagtagcggggagctttgcgtctccgaggatttgggcggtgtgggtcgcatgactcgcgctctgtgccgcttgcttggttgct

SEQ ID NO: 42387 - DNA, 1832 bp, Oryza sativa
  Clone ID: PAT_MRT4530_45644C.1
tttttttttttttttttttttttttttttttttttttttttttttacagtgagagaaggcttttctttttttccgtattaagcatcagtaattctcattgttctcaggaaaaacatagagagcaacaatctgtaatgtacccaaacaatacaaataaggcacaaccaactaacgattccatgatgcttgacctgcgcacgtaaacgagacacaacaccctagtgtagtttgatatctagaagccctaataatggcaatcctgaaggactgcacaagcgaatgtacagagagatgttaacagttcaacaatgataacagcagggtagagatatggaactgcagagttatacatttggcattgaagagcaaacaacaacataggccaagtattggagggcgtcttgcaacttgctgacagcactggtctgatcggtatttagatggttggatatgtatttagctttctcctgcaccgaattttggttcgagagatcatccttcttgtcagccagagcattttgtatagctgccatgtaagcttcagccacatcggatattcctgtagcaaaacttgcagacaccttttcaatatccacggagatggactgtgctttccatctgatgattttagcctttgaaataggatcttcaggccattcaattttcacatcattttcatcatcttcattctttggtttagaagaagccgaaataacagattttccaagcagcagaagttgagagactgcaaggcaacacatttctgacaatctgtgaacaccctccgagtgaatagtctctagcctattagtggtccgtttgacaatctcatttggagagagcccgcccaaggcagtggtgaaccctgcagccatttttgcagccttgctaacacttgagtcgcataacttcttcatctctgcatcagaatcagaatcagctgcttcaatcttttttcctttgttagagtctggtccatcttcatcaatcttggtgctaagactaaaaatctgttgtatttctttgagctttccatcataatatgttttctgcccagcaacaagtttacccttcttcctattaaataatagtgcataatggcttgacagtgcctccaactcctctaattgatcaggtcctccataaatatagaagcatctgtcaaatgacacttcttcaaactgctcctcttctgtctgcggatcaccttcaccagtacctttgtcaacatccataccagtctcttcgatgataaactccattgtctcttttcctacacgttcaagtacctccattcctttggcagtaaatgacttccctgtctctagaatggttggtgctattacagatgctttagcaggcagttccccttgttgaatggtttcagcaaggcttgaagcagaagtctccaattcccgagcgcttgccatgtcccagtcgtgatagtctccaccgagctgtcgaacaccttgagccccaccactatccccaaacccatcggaccccatcgccggcattgccgaggagaaaggaacagcaaaggtggtagtacaactagcctgtcccaagagcgagtcctcgctggcgttctccagcttgtccagcgccgccttccgctgctcgtcctcctcccctcctccctcggccgccttctccttctccttctcctccccgtctccggtccccacgtcctgctccggcggctgctgtatgtcggcgatggcgctcttcgcgacctccaccgcctcgaaaccccagtccggttgcttcgcttcgccggaggagggggagatggaggaggaggaagcggcgccggagtgtacggacgccat

SEQ ID NO: 42388 - DNA, 375 bp, Oryza sativa
  Clone ID: PAT_MRT4530_45645C.1
atggaaacgaacatgaaaatccttgcaagtgaaatcgcgaatggaattgacgaagagaccaactctcttgttacaaacatggatggagaaacagttgtctctgaggcagttaacactgaaaccatgaggggtaccacccaagcaggcttgcaaagcaatagccaccgatttgacagtcaagcggaaattgaaacgaacgaaatccacatccaagatgaaaggagaagaaccaaagtagggagagaagtgaacagggcaaccgtagagatccgagatttgagcagcgaaagacttgccgtaatcgaaattccagcctcccggcagggagggagtgaccagagcctccttgatcccaagaaggcagggaggcgctag

SEQ ID NO: 42389 - DNA, 412 bp, Oryza sativa
  Clone ID: PAT_MRT4530_45646C.1
attgggttcctcgaggccggccgggatcttctcttttgtctccaccagtatctgatttcttgatctcgactaccatcatcgaacctgctctcccctcgatctccggcaagttattccccctgttcatatcaaatgccctggatgccaaagagaaaactgtctctcctctaaccactttccatgaaagaaataatgtcatgaggactagtggacatcttcaggtcctccaatatgagtttgtttgatcgtgacttgctctactggaaagcaaattcctgagcttatttcgctccggatgaaacacagcctgcgtccgctgaccgcctttaccgtatgcacgtatgcttgctactaattatgatataccgccaagcagggatcttgatattagtgctgtgcacgtccagcatcg

SEQ ID NO: 42390 - DNA, 2721 bp, Oryza sativa
  Clone ID: PAT_MRT4530_45647C.1
atggcaggattgtgcaaaggaatacgagaacatcggcttcttgaccatcaacaagatatgacaacttctccacgcaatgcatatgaggtacatgactataattttgtgcgagttgaatctaagttaccattctatgatgtagtagacaatgaatttgacaaatatgatttttctaatgctcaaatgattaaggctgctagtagtaataaacctgaaacttgggatgaattcaaaaccatgatgagaaaacgctttgtgacatcttattacaaatgtactattcaggagaaattagaacatccgaaacaaggtgatagaactgttagggagtacattcatgaatttaaggaggctctggtcactccctccctgccgggaggctggaatttcgattacggcaagtctttcgctgctcaaatctcggatctctacggttgccctgttcacttctctccctactttggttcttctcctttcatcttggatgtggatttcgttcgtttcaatttccgcttgactgtcaaatcggtggctattgctttgcaagcctgcttgggtggtacccctcatggtttcagtgttaactgcctcagagacaactgtttctccatccatgtttgtaacaagagagttggtctcttcgtcaattccattcgcgatttcacttgcaaggattttcatgttcgtttccatctatggggaaatgggggcccaaattggaggagggaatttgatctatggcagaaagaggaggataatctctggacagtggttactagcaagaagaatgcgcatcaccccactagttttgtgacaagaaaatctgtttctaatcagaggaattcccgtttgttgggcaagagacaagtagacaagccctcggttttcaaaagattatttctctcgaatggtgatccgtttcctgttcatcagtgttcttcgtcagccccagagcatctgattggtcagctgattcaggaagtggctaacatcattacgcaccaacatcacatccatgtggtcagagttcagaggtacacccttgccctttgcttagttcagctcccctcagttttggagagagatgttcttgttggaagcggacccgttctcctaggaaattggtttcatggcacttttgtcaagcatgaccagctagctaactggagaaattcaccctacaccagggagggctggcttatgatcttgggcatcccacttaacctcaaaactaggggtattattgaacgtattaccaacctttgtggggaatttgtggactggcactatagggatagagtcctcggcagagtgcttgttaaggcaagatataaatcagccaatgatgtgcccagttgcattgtttttggtgatgctatggcttatgggggtaacggtcaaacatggacttttcatgtttatgtgttgaatggagaacccactgacattctccctgctaatgaagatcttttgcccatctggcaaatgctgccacctcccaaccagcaccacaataacaaccagcctcatcagcactttgaagatgagttcaatgacaacatgaatcagaatgaagaacatgatgataaccagatgatcttagatcaaaaccagaatgatcaacctcaggattctatatcagtacatgactttactctcaatgtcatgcagccaagccctgttaaacgtcacagggacagttttattgattcaaaggtggccagggcacttcctttttctgtttccggggttgatgctacagataagatgatccagcctaaggcaaagaaagtgaaaagcaaagtgccaatttcaacagagaacctaaggagaagcctgcgttttgtggggcaggaaaaagtgaatcttgcttatgacacccccagaaagaggtccaaggttcagcccatctccaaagtgctctccttgggccctgctgtcataagttcaaaggaactcccccctcctatcccggtgcagcagctccagaaaattggaactgaaaattccattgtctcaggaaacatgatttctcgcttgccttatgtcattacaattgaattcacctccactgctactttaagtgagaaatggcttctctctaacatttatggcccttgtgctggaattttaagagatgaatttgttcaatggatgaatgatcttgatattgaggcggaccaatgctggatcctaatgggagacttcaactttataagatcagtggaaaatagaaacatcccaggaggagacataaatgatatcctaattttcaatgaaatcatcagcaatgcaggtctagtggaaattccattaataggacgaaactttacttggagcaacatgcaagaacaacctctgctgcagcaattggattgggttttcacctcaacagcatggactctaaaattcccacacacaatggtcactgctacctcaaagtacatctctgatcatgcaccctgtcagatctcaatcgaaacatcagttccaaaatcctccatattcagatttgaaaatttctgggtggaggtcccaggtttctttgacatcattcagcactgttggtcaataccagttaggggcagtaatcaagcaataatcctgaatgctagactcaagaaacttagaagaggccttaaggcatggagcaaacgtttatcaaatctcaacagtctgatctctaatagcaatgaggttttatcactgttgacctcctag

SEQ ID NO: 42391 - DNA, 935 bp, Oryza sativa
  Clone ID: PAT_MRT4530_45648C.1
ctcctacaacgaggcgactccattccacaggcatccttgacggcagcgacgaaaccaacttcttcgagacatcttcaactgagagggacttcaactctggtgtggggaaaagatagcaagactgagtactacccactcggctccaaaaggggggttggcatctgccgggctcggctcggctccaagccggccggccggctacggcgagcggcggcggtgcacggtcgccggcaacagcaaccaacggcagtgaatggcgcggaaggcggtggcggcggccgaaggcaaggacgcgtgtgcggtggatggcagcggacacgggagggagagaaagagggaggagagggaggaacacaatgggagggattagagggagaaaggtggtccacggtgagcggaaaacaaagccgaaggcggcggcaatggtggaagctcaccggaatgcgaggagatgcgggctccggcgacgggtttggccaggcggacagcggacgcggcggctcgccggatggcgaacgcggcggcgtcgatgcggcggcgatgggtgtagcggcgcgggagagagcggcggaaagaggaaaaaggtggaggggagtgcgggggagctttattggggctcgggagtggcggacgtggctagggtgctcctgatttcgctggcgacgtgggagagtggggagagagagttgggggggattcaaaattcaaatccgccccttgtgggcacgcggcgtgggcgggaaggcgagggcggcgtcgcgacgacgtgggcacgggtaaggcggacggcggagtgggcgcgggatgcggagtggaggaggtgaggcgccagtggcgtgggcagttggagctccgactccaacggccggaggaggaagaaggggccgacaggtgggccctacctgttggtgacccggagagaggagggagggaga

SEQ ID NO: 42392 - DNA, 3315 bp, Oryza sativa
  Clone ID: PAT_MRT4530_45649C.1
atgtggcgccgaccaattggcgtgtgtcaatcggccttgaccggcctatggccggtcacaggtggatgggacgggtggcagcgcacccacgtcccgccctatgtcaagcgaagtgggggcaggttgtcattggaccccacattgtatacgtggcaatccagattgttattggaccccacattgtatatgcagcacaggtgtcttaaccacacttcactgcctcagcaagaaatgcatgaccatatacatatttttgggatgtcatcaacatacacccggtggatttatcatggagaattagttgatacagaagatgtcgaatatttggaacaggtacatgaaactaaccataatgaagggacagatgtgggcgggtatgaacccgaggatgacaatggagttccagagttaataggtgaactatacactgcggcaggggaagatggacagccaccaaggtttgctagaattcttgaagatgcgaagcaggtactttgcccaggatctaaccattcaagattttcctttcttgtgaggctgctccatatcaagtcatattatcgaatcagcaatacagctttcactgaattattgaagttgttgtcctcggcattccctcaatgtcaattaccaaaatcttatgatgaggcaaagaaatatcttcgtgaattgggccttggatatgtgtcgatccatgtgtgcaagaataattgtgtgctatttcggaaggaatatgccaatatggatctatgcccaatatgtggtgaatccagatgggaagatggggttggcgacaggaaggttcctcgcaaagttttgaggcattttccacttatcccaaggttaaagaggatatttgcatcaaaacgaacagctgaagacacacagtggcacaaaatcaagcggaagccagtggataatgaaatgagccatgcagcagatggggaggcttggaaggacttcgacagaaagtatcgaactttcgcagaagatgcaaggaatatgaggcttgccatagctacagatggattcaatccatttggcaaggtgagcaattcgtatagcatgtggcctgcccttgttatgcctttgaatctaccaccatgggaatctgtcgatccatcgaactgcattatgtcattactgatcccaggtccaacatctccaggaaaggattttgatttattcttggagcctctgatagaagaattgcttgaattatggataggtgttagtacttatgatgcattcagtgctagaaagttcaatcttcgtgccgccatgctatggtgcatacatgattatccagctctaagcaccttgtcagggcgaactacaaaaggttattatgcatgcattcattgtgacaaaaattcgttgtcacgagcactaagaaataagataggctactttggccaccgttgtttccttccaaggacacacgcttggcgaagaagccatgcttttgatggacaccatgaaaaccaggttgagccaggaaaattcagcacagatgaggtcctcgagcagttagagaaggtgaaagatgttagaccgggtaagcatgatacaagtaagaaaagaaaacgtggagaggatgaagggccactaatttatagccgcaaagtaagtctgtgcaagctcccatattggaaagatttgttgctgccacaaaatcttgatgtgatgcacattgagaaaaacatatgtgacaacattttgggcacattgctcaaaatcgagggcaagacaaaggacacagtcaattcgaggatagatttgcatgatatgaacataagacataacttgcacttacagcaggatggcaactcagttcgcatcccacaagctcgctatgtcttgaagaaggaacaaagaattgagttttgtaacttcctcaaaggtgtcaagtatccacatggatatgcagccaacctagcaagatgcataagttcagatggttccaaggtgcaggggctcaaaactcatgactgccatgtccttctccaaagaattatacctgccggcataagaggatttgtggacaaggatatatacgaagcaattgcagagcttggtaacttcttcagggaattgtgtagtagaaatctaaggatagatgtcctcaaacgactgaaaaaagacatcccgctgatcctatgcaaacttgagaaaatttttcctctagccttctttgacgtgatggtgcacttggccgtacatctacctgatgaggcactacttagaggtcctgtacaatatggatggatggctaggcctgaaggatcaattgctgaggcctatgtagcaagtgacaccttgacattttgttcaaggtacatggaggatgttgacactagatttaatcgggacgcccgtcatggggatgggccattggatggtaacagctctgtttttatgcatgatgttaaactcataggatccactaggatacagtacatggaggatgaaatcatggataagctagtttgcatgcatagagaagagttggagaaagaagatgcacatgatgttgacagaagacttgaaaaaggatttgctaggtggtttaagactcatatcaggaagctgaggaaagaaaatccaggggtggtcagtgaagcactatttgcattgtcatgtggtcctgatctccgagtaaagagttgtgcatcttgcattgtcaacggagtcaggtatagcactgttgaccgtgagaaatacctccaaacgcagaatagtggtgtaatggttgatggtacacatgaaggggataacattgaattttatggtgtccttagggagattcttgagttgcagtataactctgatctagatatctatcgatcggtggttcttttccgttgtgattggttcaatcaagttggcaagacaagaggagttagggatgacgggcatttcaaatccatcaacatccaatcattttggtacaaggatgaccctttcattttagcaactcaatcgaagaagatattttacttgcaggacacctctttgggcaacgaatggcgaattgtgcagaaattcgaacataggaacatgtataatgtgtctgaaaaagatgaccacatttttgatgtacaccaagatgataattgttctgatacagaacatgaagaagatggagaagttactattattgaagctaatttagaagaccttaacaaccaagctaacttgactgaagacagtagggatgatgcagatgaagatgacacaatattgcagtactgtagtgacattggcaatgggaacgctgaagatgacatgccggaagacaccgatgatgattaa

SEQ ID NO: 42393 - DNA, 317 bp, Oryza sativa
  unsure (1)..(317): unsure at all n locations
  Clone ID: PAT_MRT4530_4564C.1
aattcggcacgrgchcvnvcvaatttcggcagmsaaggadacagcgtgccwnaagadcgtgkggkcgkdmagnccgngagaacgtgaaggcgsgcgcaggacgcgctgctcctccgcgccaaggccaactcgctggcgcasstcggacaagtacaccagcgacgsgcgaggccgccgaggccaagggagggacatgttcgtcaagaactacgtctactaatccgvctccaatccaatcaagacagtgaacctkstgstgctkcttctacgtactacagctacttctatactgskagkaccycggggrcactgtagcc

SEQ ID NO: 42394 - DNA, 3891 bp, Oryza sativa
  Clone ID: PAT_MRT4530_45650C.1
atggcgagagaggacgaagagaagacatcattcatcacgccgttcggggtatttttctacgttaagatgccatttggactcataaccgctgggaacactttccagcgcacggtccagggcgcacttagtgaccagctcggcaacaacgtcgaggcatatgtcgacgacattgttgtcaagaccaagaaaagcgactcattgattgacgatctacgggaaacgttcgacaacctccgacgatatcacctcatgctcaatccagagaagtgcacctgcggagtaccgtcgggcaagctactcggcttcctcatctctggcagaggaatagaagcgaatcccgagaagatcaaggcaatcgagaacatgaagtcgcccacaagactcaaggaagtacaaaagctaatcagatgcacggcagcactaagcagattcgtcgctaggatgggagaacgaggacaacccttcttcgctttgctgaagaagcaagataaatttgtatggacacaggaagccgaagaggcatttattgcactcaagcgctacctatcagatccccctgtactcgttgctccccaacctaatgaagaattattcatttatattgccgccacgccatactccgtcaacactgttgtcactggaccccacattgtatacgtggctatccagattgttattggaccccacattgtatatgcagcacagcccaaatttgtgcagtccttggaccccacattgtatatgcagcacaggtgtcttaaccacacttcactgcctcagcaagaaatgcatgaccatatacatatttttgggatgtcatcaacatacacccggtggatttatcatggagaattagttgatacagaagatgtcgaatatttggaacaggtacatgaaactaaccataatgaagggacagatgtgggcgggtatgaacccgaggatgacaatggagttccagagttaataggtgaactatacactgcggcagaggaagatggacagccaccaaggtttgctagaattcttgaagatgcgaagcaggcactttgcccaggatctaaccattcaagattttcctttcttgtgaggctgctccatatcaagtcatattatcgaatcagcaatacagctttcactgaattattgaagttgttgtcctcggcattccctcaatgtcaattaccaaaatcttatgatgaggcaaagaaatatcttcgtgaattgggccttggatatgtgtcgatccatgtgtgcaagaataattgtgtgctatttcggaaggaatatgccaatatggatctatgcccaatatgtggtgaatccagatgggaagatggggttggcgacaggaaggttcctcgcaaagttttgaggcattttccacttatcccaaggttaaagaggatatttgcatcaaaacgaacagctgaagacacacagtggcacaaaatcaagcggaagccagtggataatgaaatgagccatgcagcagatggggaggcttggaaggacttcgacagaaagtatcgaactttcgcagaagatgcaaggaatatgaggcttgccatagctacagatggattcaatccatttggcaaggtgagcaattcgtatagcatgtggcctgtccttgttatgcctttgaatctaccaccatgggaatctgttgatccatcgaactgcattatgtcattactgatcccaggtccaacatctccaggaaaggattttgatttattcttggagcctctgatagaagaattgcttgaattatggataggtgttagtacttatgatgcattcagtgctagaaagttcaatcttcgtgccgccgtgctatggtgcatacatgattatccagctctaagcaccttgtcagggcgaactacaaaaggttattatgcatgcattcattgtgacaaaaatccgttgtcacgagcaccaagaaataagataggctactttggccaccgtcgtttccttccaaggacacacgcttggcgaagaagccatgcttttgatggacaccatgaaaaccaggttgagccaggaaaattcagcacagatgaggtcctcgagcagttagagaaggtgaaagatgttagaccgggtaagcatgatacaagtaagaaaagaaaacgtggagaggatgaagggccactaatttatagccgcaaaaaaaacatatgtgacaacattttgggcacattgctcaaaatcgagggcaagacaaaggacacagtcaattcgaggatagatttgcatgatatgaacataagacataacttgcacttacagcaggatggcaactcagttcgcatcccacaagctcgctatgtcttgaagaaggaacaaagaattgagttttgtaacttcctcaaaggtgtcaagtatccacatggatatgcagccaacctagcaagatgcataagttcagatggttccaaggtgcaggggctcaaaactcatgactgccatgtccttctccaaagaatcatacctgccggcataagaggatttgtggacaaggatatatacgaagcaattgcagagcttggtaacttcttcagggaattgtgtagtagaaatctaaggatagatgtcctcaaacgactgaaaaaagacatcccgctgatcctatgcaaacttgagaaaatttttcctccagccttctttgacgtgatggtgcacttggccgtacatctacctgatgaggcactacttagaggtcctgtacaatatggatggatgtacccaatagaaagacgacttggcacctttaagaattccatgcggaacagggctaggcctgaaggatcaattgctgagacctatgtagcaagtgacaccttgacattttgttcaaggtacatggaggatgttgacactagatttaatcgggacgcccgtcatggggatgggccattggatggtaacagctctgtttttatgcatggtgttaaactcataggatccactaggatacagtacatggaggatgaaatcatggataagctagtttgcatgcatagagaagagttggagaaagaagatgcacatgatgttgacagaagacttgaaaaaggatttgctaggtggtttaagactcatatctggaagctgaggaaagaaaatccaggggtggtcagtgaagcactatttgcattgtcatgtggtcctgatctccgagtaaagagttgtgcatcttgcattgtcaacggagtccggtatagcactgttgaccgtgagaaatacctccaaacgcagaatagtggtgtaatggttgatggtacacatgaaggggataacattgaattttatggtgtccttagggagattcttgagttgcagtataactctgatctagatatctatcgatcggtggttcttttccgttgtgattggttcaatcaagttggcaagacaaaaggagttagggatgacgggcatttcaaatccatcaacatccaatcattttggtacaaggatgaccctttcattttagcaactcaatcgaagaagatattttacttgcaggacacctctttgggcaacgaatggcgaattgtgcagaaattcgaacataggaacatgtataatgtgtctgaaaaagatgaccacatttttgatgtacaccaaaatgataattgttctgatacagaacatgaagtgcatgaaggtaatgctgatgaggatctagaccatttgcaggaagatggagaagttactattattgaagctaatttagaagaccttaacaaccaagctaacttgactgaagacagtagggatgatgcagatgaagatgacacaatattgcagtactgtagtgacagtggcaatgggaacgctgaagatgacatgccggaagacaccgatgatgattaa

SEQ ID NO: 42395 - DNA, 2584 bp, Oryza sativa
  Clone ID: PAT_MRT4530_45651C.1
atggcgggggtggggaggggcagggggaggggtgggttctttaggcctgtggtggcggcggcggcggcgtgcggcggaggtggcggcggtggtggtggggatgaggagcagaagaggcagattctgccgctgccgtcgatggccgcgatgccgccgtcgctgcgggcgatccaggcgaagaggaagctggaggcggtgcggcgcggggtggtgccgcgggcggccgggacgagcgcggttgcggcgctggtcgcggcggtggaggccgtgcagggcgccgcggccgggggcgccgccgaggccgcgcgcggcgccggggacgccatggcgtgggtcatccgcaaggtgcacctcgagtcgcccgacctcgccgtcggcctcctcggcctcgtcgcgtcctgcctcggcacggtcatggaggcggagatggaccggatcaaacgcaagaacgtcgagccgtccgcgtcggtggcggcggcggccagcaacgctgcccccgacaacgacggcggcgacaccgaccagatcgaggacgccgacgccgagatgccggagctggtggagcttgacatggagacggagctctggtcccggatcggcatcatgcacagcgacgacgacacgccggtgttcgtcgacgacgaggacggcctgcaggagatcatcgacatcgcccgtgtccaccggcggaaggcggcgtacgagaggatcatcgccaccgccgccgacgtcaactcgctcatcctctccaactacgcgcagctcctctaccagttcgacaaggacctcgacagggcggaggactacttcaagcaggcggtggcggcggagccggtggacggcgaggcgatgaggaggtacgcgctgttcatgtggcacgcacgcggcgacctcgccggcgcggaggacatgttcacccgcgccatcgacgaggagccgcagagcagccagcaccgcagcagctacgcctggttcctctggatgaccggcggcgtcgagacctgcctcatcgactccggcaacgacacagaatgacaagccatatgcatcagccaggaacacaagacgacgacgacgacatgacatgatcgaacacctttcaccggcaggtgcccggcgacgggccggccatgtagacgacggtgcagctagcacctaggcatcgccatggcctacctacccatggctatatatagtagtcgagtagcatagaagaagaactgatcatcagtgtgcatgcatggcaacaatggcaggagctgagagaggcaacaaaagagttggcaggcaagctagcacacatggtaatgtagagtgttgctatagtgatctcatggaataaatcatgcataaaaccaccagtaatgttattccagaaattgtgagcaatctctatgtatgggagaggcataatgttcttcctttttgtgtaatctggtgtttgcagtttgcacagattgtgagtacatgaatgtcaaaatgtggcttgtagtgcatttgattgcatgccgaatatgtgtgatgtacagaggtttgtaaatactacatatatggaagaaaagttgtgcagaggtttgtagatacatatcgaagaaaaggattcatgtcggctctataaacaggcttgacttaatcatcgaaacactgttaacattgacataaacggttatagaaaggtgggaatttgggtggatcatctgcagcccagctctaatcttgagtctgcgctgatggaagtgttggtgcatagcttctgaaggtcaatgtagccgattatcgtgtcctcaaacacgacgtcctgcattttagcgtcatcgaaggttgatcctgacaagacggtgttcctgaagattgccccttggagatcggccttctcaaaattgacacggtctattactgcatttgtgaaatccgttcctttgaagcttgcccccacagcataagctttggacatcacaacttcagacatgtcggccccatcaaactttgaatcggacatcaaggctgcagctagagattttcctttcagattagttttctcgtttgtgtaatcgcaaaaccggagatcgagtggcttgtcatacaccccatttgcctgaccaattgtgttcccgacaaaagcacgctcgcatctgtttggctctgtggacagtggaggcaacctctggctggcggcaatcacggggctggacgaggacgcgacggcccaggccgcgaggacgccgcacgcaagcccgcccaccgccttgcgctcaccggcaaacagccccgccgcctccggcccgccgccacccccggccgagcacgccaccacccgccccgccctcggcgtcacccgcacccgcagccggggcgccgccgccgccgtggccggcgaggcgaggcaggaggaggtggaggccatgtccgtcctcgtgcacttcttgagtgaattctccagatatgtacaaaaaccatttatatgtgcactcaaatctgaactcacaatttcacatgcactggtatagtaatcagtataagaatttcttgctttacattgcacagaaagcatttgccaaatagcctgcagcccggggatccacta

SEQ ID NO: 42396 - DNA, 2814 bp, Oryza sativa
  Clone ID: PAT_MRT4530_45652C.1
atggttgtcactggaccccacattgtatacgtggctatccagattgttattggaccccacattgtatatgcagcacaggtacatgaaactaaccataatgaagggacagatgtgggcgggtatgaacccgaggatgacaatggagttccagagttaataggtgaactatacactgcggcagaggaagatggacagccaccaaggaaggttcctcgcaaagttttgaggcattttccacttatcccaaggttaaagaggatatttgcatcaaaacgaacagctgaagacacacagtggcacaaaatcaagcggaagccagtggataatgaaatgagccatgcagcagatggggaggcttggaaggacttcgacagaaagtatcgaactttcgcagaagatgcaaggaatatgaggcttgccatagctacagatggattcaatccatttggcaaggtgagcaattcgtatagcatgtggcctgtccttgttatgcctttgaatctaccaccatgggaatctgtcgatccatcgaactgcattatgtcattactgatcccaggtccaacatctccaggaaaggattttgatttattcttggagcctctgatagaagaattgcttgaattatggataggtgttagtacttatgatgcattcagtgctagaaagttcaatcttcgtgccgccgtgctatggtgcatacatgattatccagctctaagcaccttgtcagggcgaactacaaaaggttattatgcatgcattcattgtgacaaaaatccgttgtcacgagcactaagaaataagataggctactttggccaccgtcgtttccttccaaggacacacgcttggcgaagaagccatgcttttgatggacaccatgaaaaccaggttgagccaggaaaattcagcacagatgaggtcctcgagcagttagagaaggtgaaagatgttagaccgggtaagcatgatacaagtaagaaaagaaaacgtggagaggatgaagggccactaatttatagccgcaaagtaagtctgtggaagctcccatattggaaagatttgttgctgccacataatcttgatgtgatgcacattgagaaaaacatatgtgacaacattttgggcacattgctcaaaatcgagggcaagacaaaggacacagtcaattcgaggatagatttgcatgatatgaacataagacataacttgcacttacagcaggatggcaactcagttcgcatcccacaagctcgctatgtcttgaagaaggaacaaagaattgagttttgtaacttcctcaaaggtgtcaagtatccacatggatatgcagccaacctagcaagatgcataagttcagatggttccaaggtgcaggggctcaaaactcatgactgccatgtccttctccaaagaattatacctgccggcataagaggatttgtggacaaggatatatacgaagcaattgcagagcttggtaacttcttcagggaattgtgtagtagaaatctaaggatagatgtcctcaaacgactgaaaaaagacatcccgctgatcctatgcaaacttgagaaaatttttcctccacccttctttgacgtgatggtgcacttggccgtacatctacctgatgaggcactacttagaggtcctgtacaatatggatggatgtacccaatagaaagacgacttggcacctttaagaattccatgcggaacagggctaagcctgaaggatcaattgctgaggcctatgtagcaagtgacaccttgacattttgttcaaggtacatggaggatgttgacactagatttaatcgggacgcccgtcatggggatgggccattggatggtaacagctctgtttttatgcatggtgttaaactcataggatccactaggatacagtacatggaggatgaaatcatggataagctagtttgcatgcatagagaagagttggagaaagaagatgcacatgatgttgacagaagacttgaaaaaggatttgctaggtggtttaagactcatatctggaagctgaggaaagaaaatccaggggtggtcagtgaagcactatttgcattgtcatgtggtcctgatctccgagtaaagagttgtgcatcttgcattgtcaacggagtccggtatagcactgttgaccgtgagaaatacctccaaacgcagaatagtggtgtaatggttgatggtacacatgaaggggataacattgaattttatggtgtccttagggagattcttgagttgcagtataactctgatctagatatctatcgatcggtggttcttttccgttgtgattggttcaatcaagttggcaagacaagaggagttagggatgacgggcatttcaaatccatcaacatccaatcattttggtacaaggatgaccctttcattttagcaactcaatcgaagaagatattttacttgcaggacacctctttgggcaacgaatggcgaattgtgcagaaattcgaacataggaacatgtataatgtgtctgaaaaagatgaccacatttttgatgtacaccaagatgataattgttctgatacagaacatgaagtgcatgaaggtaatgctgatgaggatctagaccatttgcaggaagatggagaagttactattattgaagctaatttagaagaccttaacaaccaagctaacttgactgaagacagtagggatgatgcagatgaagatgacacaatattgcagtactgtagtgacagtggcaatgggaacgctgaagatgacatgccggaagacaccgatgatgattaa

SEQ ID NO: 42397 - DNA, 5856 bp, Oryza sativa
  Clone ID: PAT_MRT4530_45653C.1
atgtcatcctcgtggttgctcacctcgccattcaccatcgtcaccgtggaatgcaagaacctggttccagcctcggtggcgtcgccggaagcgcaggagcccgccgacgcgtgggctggggacctccacgacggcgtgctggagcgcgtcctggcacgcctcccgccggacacattcttccgcctccacgccatctgctgccgatggagcgcggccgccgcgtcaccacacctgcggccgcatcccgtctccgactccgactgcatcgccgcagtagcagctggtccaggtgccgcatctccaaggctgatgctcccagcgctgctggtgaagaggacctggtgctggccatgatcgagtagcaagcttctggtgcttatgctgcttgcttctggattgcccaaaaaacagaagtaaaatattttctcttctcctgaaatttttgacccaacttcatgcacttcatgttctgtatcagaacaattatcatcttggtgtacatcaaaaatgtggtcatctttttcagacacattatacatgttcctatgttcgaatttctgcacaattcgccattcgttgcccaaagaggtgtcctgcaagtaaaatatcttcttcgattgagttgctaaaatgaaagggtcatccttgtaccaaaatgattggatgttgatggatttgaaatgcccgtcatccctaactcctcttgtcttgccaacttgattgaaccaatcacaacggaaaagaaccaccgatcgatagatatctagatcagagttatactgcaaatcaagaatctccctaaggacaccataaaattcaatgttatccccttcatgtgtaccatcaaccattacaccactattctgcgtttggaggtatttctcacggtcaacagtactataccggactccgttgacaatccaactctttactcggagatcaggaccacatgacaatgcaaatagtgcttcactgaccacccctggattttctttcctcagcttccagatatgagtcttaaaccacctagcaaatcctttttcaagtcttctgtcaacatcatgtgcatcttctttctccaactcttctctatgcatgcaaactagcttatccatgatttcatcctccatgtactgtatcctagtggatcctatgagtttaacaccatgcataaaaacagagctgttaccatccaatggcccatccccatgacgggcgtcccgattaaatctagtgtcaacatcctccatgtaccttgaacaaaatgtcaaggtgtcacttgctacataggcctcagtaattgatccttcaggcctagccctgttccgcatggaattcttaaaggtgccaagtcgtctttctattgggtacatccatccaaattgtacaggacctctaagtagtgcctcatcaggtagatgtacggccaagtgcaccatcacgtcaaagaaggctggaggaaaaattttctcaagtttgcataggatcagcgggatgtcttttttcagtcgtttgaggacatctatccttagatttctactacacaattccctgaagaagttaccaagctctgcaattgcttcgtatatatccttgtccacaaatcctcttatgccggcaggtataattcttaggagaaggacatggcagtcatgagttttgagcccctgcaccttggaaccatctgaacttatgcatcttgctaggttggctgcatatccatgtggatacttgacacctttgaggaagttacaaaactcaattctttgttccttcttcaagacatagcgagcttgtgggatgcgaactgagttgccatcctgctgtaagtgcaagttatgtcttatgttcatatcatgcaaatctatcctcgaattgactgtgtcctttgtcttgccctcgattttgagcaatgtgcccaaaatgttgtcacatatgtttttctcaacgtgcatcacatcaagattatgtggcagcaacaaatctttccaatatgggagcttccacagacttactttgcggctataaattagtggcccttcatcctctccacgttttcttttcttacttgtatcatgcttacccggtctaacatctttcaccttctctaactgctcgaggacctcatctgtgctgaattttcctggctcaacctggttttcatggtgtccatcaaaagcatggcttcttcgccaagcgtgtgtccttggaaggaaacgacggtggccaaagtagcctatcttatttcttagtgctcgtgacaacggatttttgtcacaatgaatgcatgcataataaccttttgtagttcgccctgacaaggtgcttagagctggataatcatgtatgcaccatagcacggcggcacgaagattgaactttctagcactgaatgcatcataagtactaacacctatccataattcaagcaattcttctatcagaggctccaagaataaatcaaaatcctttcctggagatgttggacctgggatcagtaatgacataatgcagttcgatggatcgacagattcccatggtggtagattcaaaggcataacaaggacaggccacatgctatacgaattgctcaccttgccaaatggattgaatccatctgtagctatggcaagcctcatattccttgcatcttctgcgaaagttcgatactttctgtcgaagtccttccaagcctccccatctgctgcatggctcatttcattatccactggcttccgcttgattttgtgccactgtgtgtcttcagctgttcgttttgatgcaaatatcctctttaaccttgggataagtggaaactgcctcaaaactttgcgaggaaccttcctgtcgccaaccccatcttcccatctggattcaccacatattgggcatagatccatattggcatattccttccgaaatagcacacaattattcttgcacacatggatcgacacatatccaaggcccaattcacgaagatatttctttgcctcatcataagattttggtaattgacattgagggaatgccgaggacaacaacttcaataattcagtgaaagctgtattgctgattcgataatatgacttgatatggagcagcctcacaagaaaggaaaatcttgaatggttagatcctgggcaaagtgcctgcttcgcatcttcaagaattctagcaaaccttggtggctgtccatcttcctctgccgcagtgtatagttcacctattaactctggaactccattgtcatcctcggattcatacccgcccacatctgtcccttcattatggttagtttcatgtacctgttccaaatattcgacatcttctgtatcaactaattctccatgataaatccactgggtgtatgttgatgacatcccaaaaatatgtatatgatcatgcatttcttgctgaggcagtgaagtgtggttaagacacctacagcatgggcatggtatgtcaacgtgttcatcaaatctttgtccaacaaattccatgaactgtttcactccctccatgtatgcaggtgtgaattgtctcccatgtatccaagttctgtccatctgtgctgcatatacaatgtggggtccaataacaatctggatagccacgtatacaatgtggggtccagtgacaaccttagaaagcggcgtcttcatggcgcggagaaggaccttacagcttgagaagtcgtgattcttcgtcttgtgaataggacaatagacatcacgagttggagaagtacgctggattccacgctctttgcaggcacgaatctcagcttgtacattgagaaaaacccagcaagcttgcaaggtgtgtttcctggtcttgtggataggacaccagggctttgttacctcggaagttgtccttgtcggctcgtggttcttgtcgaaaggacaaggtttggccgcactaggatccttctcgggctcgtatgacgtcgacgttccgttcttcgctacggcgggaggatccttcgacatggagtcgtctggggttatagccacggcgttctcgtttccggtcattgatggaccagccgagattagtaccgtggtgtaaaccgagaagacgatttcgccgacttgagtccacaccagcattgttgaagtagagactccttggatggggccggtgttgacgctgttgtcgacgaagcttgatgtcatagcagtagaaccttgagcaccaaggccccctacctggcgcgccactgtcgacagtgggtacccgtagaccagatatagagggtattggggtacgctggtacgaggatcctgcacggtatagtgacgacccagtcctatacgagtaggaatctttccatcggtggacttcgtgatgaatttccttagcgtatacaaagaacgtccgtacacgtgcaaatataccatattgccgcatagcgtatatccaaaggtagagggtatgccttatccgtaacccatgtgcaaggagggatgatgcggtgctggacgaatgatggccaagggggattgagatcctcatcagttccccatggggctcaggcacaaacttggtaaagtcagatttaggcaatggagacaacaatctgagctcaaagtttctcagcaaatgactccaaatcgctttaatctgcatgtaagcatagccctcaccaacacaaccggttcttccgccgccaaaagaagcgtaagagaatttcccgccaaccttgtcctcctctctccctgcaggaccaaacctgtctggatcatacagatgaccatccttgtagatataaggtacctggttgctgatcactatagggcttgcaatggtgtgccctgcagggacagcatactcatggccttctctcgtccggacggtgaactgcttgtgcgccgtcctgactagcatgggtacaggagggtgcagccgtagggtctccttgatgcagctgtgcagcgtgcgcatctccatcaaagaaccgtagcgatcatccgtgattctgccgccgccgttgatgttgctgtgttctctggcgatcttatcctgctcgtcgacagccgcggtgaggaacctctcgtggctagagtcgatcaggctttggagcacgtccttgtcgacattgtctccctcccgctgcttgcgagatctcactatgtcggagaagatggcgtggagcctcttgcgcgccatgtcgcggcggcggttggaagggatgagtggggtgtaggggaagaagacgctcatcaggttcacgccgccctcgatatcgcggaacaggttgcagacctcgtcaaacatcgtccccatcacctccttgccgaggaggcatctgccagagatcaacaggagtagttgctccagttcacgtcttaggtcaacggtgccatgttgcccccatttcgcaaagtaatcctcaacttcttgaaccatgggatcaacatggatcctcagcctggctggcttcagagcatcaacaaagaagcgagcctgttcattcctggtggcgctgtctactccatgggcgatctctttgccaaacataggcaccgtgaactccaacaggttgccatggctgatctctgattccaaaccttggaagaaatgggctgagacctctggtccgaccaagaaggtcatcttcagtaatccagccaaatttatggtgaacacgctgccaaacttcgtgtacagttcatgcaatatggctggcaaaccactcctgaaaagagtaggcaagagtcgtaggagggcaattgaattcacaacaggtggaggaggtggcattttgcaggtaggatcagtggcacttcttctccttcctcctcttgcaatcttggtgacggctgcagtgatggccagaataatagccat

SEQ ID NO: 42398 - DNA, 219 bp, Oryza sativa
  Clone ID: PAT_MRT4530_45654C.1
atgaaaagaggaagccgagaacctgttggtgcccctcaaggcgtgctccgcaaatcgcagtcagcacttgcgcacaccatagctgataggagcgacggtcttgccgttcaggtgcccctcaaggcgtgctccgcgaatcataagacatggaagccgaacaagggatttgttgtggaggaggtgcaagaggaggagctagccatggcagatgggatctaa

SEQ ID NO: 42399 - DNA, 198 bp, Oryza sativa
  Clone ID: PAT_MRT4530_45655C.1
atggtctctcaacttttcgccgttggtggtggtgacggcgctggtgcggggagggcggctgcggcgaaatcgaacacccaggtcgagaacgccatgccgacgaagagcgcgcttgtccttaagtttggctcggtcgtgtggagcggagcgagatgccaggaggacgtcatcttcttcggatcaaataaacagaaataa

SEQ ID NO: 42400 - DNA, 163 bp, Oryza sativa
  Clone ID: PAT_MRT4530_45656C.1
atggggcagatcgtgcgcgcattaactgcgctcgccaaccgcgaaaaacgccatcatcgtgtccccgggcgaaacaaacctgctcgaatctacacgaccgggatcgaggccgccgggggtgacgacagggtcatggcgaattttttccccattgccctgaaag

SEQ ID NO: 42401 - DNA, 445 bp, Oryza sativa
  Clone ID: PAT_MRT4530_45657C.1
aagaataattaatctcgacgtcacaatttagcccaaagattatacaatgtgatgtaattaacacctctcatattctcaaaccctctacaacaacaactcaaattactcacatgggtaactcccgtacttaatctcatcctccaaaaaaaaagcccaaaaaaagctctcaaccactgtacagaaataggcctaagttcttcggtcactgctgctgtgcagcacctggagacaattaattaatggtgctcaagatgatgatgatgcccttgccccattctgcatctcccagctatagctccccgacttcccgtcctcctcttcctcctcaccgccgtcgcagctatcgccggcggtcactgacacggcgtggctcgacgacacggtgagctggagggggccctgcggcgagccagactgcgatgtgctgtgctgcgaggtggtgtat

SEQ ID NO: 42402 - DNA, 509 bp, Oryza sativa
  Clone ID: PAT_MRT4530_45658C.1
cgaggacatgcgatgggagtccatgttccaagatctcaagcccacataggagacagctagcttagctgtatgcgtcgtgcccatcaatggcgagttccaagcatgcaacaatgactgctcgatctgtgtgcggaggaagaagaaaagaaaggatgataatacatatgcatccatggtattctttgcggatgatcttacgatggcaatggttctcacgaaagattaaacctgacaatcttggcatactatcacatcgaacctttcaatttggccactctagagaatgacagagcatttgcatcgatgatgttcgttatggacaatcttacattggtgatgttgatacatatggcatagaagactctgaaaacttggcaatctcaatatattataacatcatacctttgaatctagccatcctataggagtatagctcagtgcaatgcaagaaaacaaaagcagtacttgctgctcttctcatgcaaatatggtgtaatagcttcctacat

SEQ ID NO: 42403 - DNA, 672 bp, Oryza sativa
  Clone ID: PAT_MRT4530_45659C.1
atggaggaggacaacgacaccgtggtggttgatggtggtggctggcgagcagtggccagcggcggttcaggcgaaggcactgcttcggaaccccctcaccggcggcagtccctcaaccctccaggaaccccctcaccggcggcagtccctcaaccctccaggaaccccctcaccggcggcggcatggtggccctgttcccggacccgtacctccacggcggcactgacgaggtgaacacggcgtgctgggagaacgacccggtggtgcgccggttcctcgccgagggcggcacgcacaaccacctcctggaggtgttcatcaacacgacgcgaccattcgtggcgcaggagctgaaccagctgccatggcattcagtacctcaacctctcggccaaccagtttgccggccgccgtcgcatcgcattgagtccgccgcggcgaccgtcgcatcgagcttccgacgaatcgctgctgcaaccatcgccgagctcccgatgaatggtagctgcaaccatcgccggactcccaccgattcagcgccgacgtcgcatcgagaccaccgcccgccgtcgctgatgaatcgccaccgcaaccatcatcaagctcccgtcgctgatgaatcgccgccgcaaccgtcgctgatctgggccaccatcgggtcgccgatctag

SEQ ID NO: 42404 - DNA, 685 bp, Oryza sativa
  Clone ID: PAT_MRT4530_4565C.1
ttcctgcagccctcgccggcctactgccaccgccgtgtttacccctccgatctgccaccaccgtcgccggccgatgcctccctcgccaccgccgccgcccatggggagaggatgtcgccgggaggtcgcgcgctgggaagggagctcgctggtcggcctcgcacaggtaggggagctcgtcggccggctgcgcgcgggggaggagctcatcggttggccgcgtgttgggagaaagctcgcaaggtggctgagcgctgtggagggagctcaccggggcggcctgctgctgttgctgcttccacaccgccgccgctaccgtctctactccatgaccaccgtaggcgctgtctgctgcttcggccgtccccaccgccactgccgtcccaaccgccgctcccgaccaccgccgccgccgacttctccgctcccgaccgccgacgccaccgccaccgccgccgcccccgaccgtcgtcccaaccgccaccgccgctgccgccgccgctgcttccgaccgtcgtccccaccgccgccgccaccgcttccgaccgccgtccccgccgccatcgccaccgcttccgaccgcctgcgccgctccccactgtcgttcccacgcgcaagagatgagggggagagagataagggggagagagagctacacactgacatgtgggtcccaccacactga

SEQ ID NO: 42405 - DNA, 420 bp, Oryza sativa
  Clone ID: PAT_MRT4530_45660C.1
atgtgccccgttcttccagctctcatgtgccccgtagtcaacggcagcgccctcctgccgctccacgatgccgccgtcgatctccaccccatcgtgctgctgccagggaacggctgtagccagctcgacgcggagctcaccgagcactacgagccatcgccatgggcgccggcgagctgcggcggcgctgcggccgcggggaaggggaagggacgacgacggtggttccggctatggaagaacagcactgcactgggcgaccccgcggtggcgctgtgctacgcggaccagctgcgggtggtgtacgaccgcgccgtcgccgactaccgcaacgtcgcccgcgtctggacccgcgtcgtgtcgttcggcaccacccgcggcttcggctccgacgatgatccctcggatccggaaaggtga

SEQ ID NO: 42406 - DNA, 157 bp, Oryza sativa
  unsure (1)..(157): unsure at all n locations
  Clone ID: PAT_MRT4530_45661C.1
gcacgaagattaagatgntnnnnaatgcatgcgtgggcggcaacacattctgtgcacagagaaaaacttggacaagaacatgccaacagctagcccatcagccggcgatcaccgccggcgaccggccttgccgtaccggacgctcagccaacgatca

SEQ ID NO: 42407 - DNA, 471 bp, Oryza sativa
  unsure (1)..(471): unsure at all n locations
  Clone ID: PAT_MRT4530_45662C.1
tttttgtttttttttttttttttttttttttttttttttttttttttttttttttttttttttttttaaaaaaaatccgggcaacaatcggaaaaactggggggtttttaccccggaggtggccccaagcaattttccatcaaaaacagagggggaaggggtagtccatgaaaacgggtcaaaaaacaaaaacccctggggggattgggtcgatttcccccccaaaaaaggggggggggacaaatgggaaacgaaaaaactcccccccgaaatcccgaatttgaagaacagattttaattggggccccagcaaacgaggggaaccccctttgggattttttccccctccgacctttttgacctgggggccctgccccacccggnggtgggaggggaggacccccccgcgcccccggtttgggacaacagggaccccgggacggggcggccggagacctgtttggggggggg

SEQ ID NO: 42408 - DNA, 486 bp, Oryza sativa
  Clone ID: PAT_MRT4530_45663C.1
atgcatccggcagccaagttaccgctgctcttcctcctcctggtcggggcaaccgccacgacgtccacggcaaaccatgcgccggctccagccgccggcagctgcgtgccgcgggagagggaggccctgctggccttcaagcgaggcatcaccggcgatcccgcaggtcgcctcgcctcgtggaagcgaggtaaccatgactgctgccggtggagaggcgttaggtgcagcgacaacctcatcggtcatgtcttcggccttcaccttcaaaataacttctcgtggtacaacgaagcaacagctttggtggggcacataagtacttctctgctcgctctcgaacagctagagcaccttgacctcagcaacaacaatctcgtgggtccagccggccgattcccagggttcgtcagctatctcaggaacctggtatatcttaacttctccggaatgccattaaaagggaaggtgcctgtcgaaacatga

SEQ ID NO: 42409 - DNA, 536 bp, Oryza sativa
  Clone ID: PAT_MRT4530_45664C.1
gccgagctgagctgagcaaaactgccacccaccaccattgccgtctccaccaccggcggcaacctcgtcctccgcgccgcgccatccaccaccaccacccgccgccgccgcgttgccgcctccgctgtgcggttcgaccggcgctccgcggcgctcctgctcctgtccgcggcggcgggtgcggcgccgacggtggcgtccccctcccgcgccaacgccgctggcatcgggctcttcggcatcaggaagaagctggagcgggcggaggagtgcggcggcggagtgcggtgcgggaggtggaggaggcggcggtggaggccgcggaggtgggtggggaggcggtgaaggcagcggagaaggaggcggcggaggtcgccggggaaggggtgcagctggtggccggcgcggagctcgccggagacgggctcgtgcaggccggggcggtcgccgccaccgaggcgctcggcgtcgtggtgggcctctccgtcgtcaatggcatcctgaggcctgaatcctagagagagagagatcactct

SEQ ID NO: 42410 - DNA, 365 bp, Oryza sativa
  unsure (1)..(365): unsure at all n locations
  Clone ID: PAT_MRT4530_45665C.1
agacataatactactatacctttatagaaaaccgtgcagaaaaatcacatgaatttttgcaggtcgccgtcgtcggcatcttccccgtgcaccggctgctggatgctgccgatggacggcggacggctgatgcctcnnccacgcgctatgtattaggcgcgcgaagcgccaagcggtgcgcgcacgcagcgcggtgctngaagacatgcgacgcggtgcggggacncgatgcccggtccgctgtctcgcgcgcgcgcgccnctcctcggggtgactcgatccgtgcgtgttctttttttcttctttcgttccttggtcgctgtgctctttccggcgtcgtgccttccgggcgtgccctcccctcc

SEQ ID NO: 42411 - DNA, 1917 bp, Oryza sativa
  Clone ID: PAT_MRT4530_45666C.1
ctacgactgctcctccaatgacacgattgacatgccgccggacgcgacgccggattcgtcgccgccgcctttcctggcgaagagcgtcggcttcgcgggggcatggagttcgacggtgtccgtgccgagcatcagcaccaccgacgacatcaccggccggttcgccgggtcaccctgcacgcagaggagcccaatgtggatgcatctcatcacgtcgctctccgagaagaagctgttcatgctcggatcgaccatctccagcaccgtcccggccacccattgctcccagatcatggtcaagagatcttcagattgttgggagttgtagctgtggttgttcttcctacctgtcacgatttcaaggaccatgacgccgaagctgaatacgtctgacttgacagagtagttcccacgtgtcaggtactcaggagccatgtatccatatgtgccgatgacattcttggtgacagcctgggtctgatctcgaccgaaaattctcgcgaggccaaagtctgaaatcttggggttcatattcacgtctagcaagatgttgctcgccttgagatcgcggtggactaccttgagctgagaatcttcgtggaggtattgcagacctctagcgatcccgtttatgatcttgtacctcttctcccagtccagctgctcacttttctcagtatcgaaaaggatcaggtcgaggctccggtttggaacaaactcgtatacgagcagccgctcctgttgctccaagcagacgccgacgaggctgacaaggttcttgtgcttcagcttcgcaaccagagccagctcgttcttcagttcttccaccccttgcgttgagctcttcgacagtctcttcactgctatctcgtagccgtccgggagcacacccttgtacacagcaccaaatccgccctcaccgagcttgttactctctgcaaaatcaccagttgcagatcgcaaaatggagatgtcgatgagcatcgaatctaaattctcaatgtcctctgcttcagtggagtaattggcatctccttcaagcgtcggcgtcgccgccggcggcgtctggttaactgcgggcaccacggccgccggcgacggcgccggcgaggcacctgacgttccttgtaaccttacaagcatcggtccgtcgagaaagggcgtggtactgtactggaagctgcaccagaccgcgcggacgaatcctccgaccctgttctcaaaaaacccaatatatgtccctatgatctgcgcgaggcaactccggcagctcgccggcgtcaggtccggagtgcactgcgcccagctgtacaccttggggaactccgcgttgaagtcggcctccccggacgcgtaccgccgccgcgtggagttgcgcgccgcgtagtcggcggtggcgttcaccagcgctgccacgaggcggttgaaccgtgcctgctccgtcgtggcgttcgcgttgctgtagaacccgtaaatcgggatcttctcggaggagaagtcgccggcggcgatggtggcgttggagtaggcgagcaggcaggagtcgtagaagatggcggcgaccttgtggtaggcgcaggcgttggggaggtcgaggaaggcctgggtgaggcaggcgaggcaggtggaggcgttggcgtcgccgcggcagagcgcgagggcggagacctggtccggcggcgcgccgacgccctcggcggtggcgaacaggtccggcgaggccgaggcgttgccggggagggtggcggcgatgaggttgatactggcaaggtagctgctcctcctcgccgggaattcgccggccgtgtcgttgcacaacccccacgggtacgacaccgcggcgcgggggagcgcgagcagcagcagcgcgacggcggcggcgactggcacggacagggcgacacggctagccgccat

SEQ ID NO: 42412 - DNA, 572 bp, Oryza sativa
  Clone ID: PAT_MRT4530_45667C.1
gggccccccccaaaaggctttttatttaggggggggccaaaaaaaaaaaagggaggggggaaaccttcggggggaaaaaacccaggggaaaaaggggggggggggggaacagggaaaaaaaaaaaagggggggttttttaaggccggggggggactttttaaaaaggggaagggggggggagggaaaattgggggggaccccaaaaaggggggggcccccgaggggggggaaaaaccggagggaacccccccccccccaaaaggggccccaagagttttgggggggccaaaatttgggcccgaaaaaaccctgggggcccaacccaaaaaagggaaaggggggccctagggccgggcccaaagggcccgggaaaaccccccccttggaaaaagggatcccggtcccccccctgaggggcaaaaccacgggttgccaaaaaaagggggcctgaaaccccccctttttccggggggggcccttcccaaaaccggggattttgggggaatggggcgcggacttggcggggttggaggggccccccccggccgggaacgggaaacccccccccggg

SEQ ID NO: 42413 - DNA, 274 bp, Oryza sativa
  unsure (1)..(274): unsure at all n locations
  Clone ID: PAT_MRT4530_45668C.1
acttncagcactacgaagcaaagattcagatggcggattcttgtgggcgagagtatcttccaaaactaggataaagcctcagacaagctaaccttttttataaagagcttacaatatgaaaactcagcgaagagctttacacaaattccatcttgacaatgatgctcagaaatcttcagtcatgtgcagactgtatgactataacgaattgacatgttgcacaaacacgagatcttaagacttcacaataagtataagcctgcatcccaactag

SEQ ID NO: 42414 - DNA, 3333 bp, Oryza sativa
  Clone ID: PAT_MRT4530_45669C.1
gggttcagcctcgtgcctcgatctttactgcctggaacgaccctcgagatgagtgaggacggtgatgcggaaagcttttctttttctccttctattgatcggagtgcagatggcggggatggctgcggcggcggcggcgttggtggcggcgaagaggtgcatgaacgccgcgtgcggggccccggccccgtccccggcgggaggggagtggaggaagggctggccgctgcgatccggtggcttcgccgtgctctgcgacaagtgcgggttggcatatgagcagcttgtgttttgtgatatatttcaccaaaaagaatctggctggagggactgctcattttgtgggaagcgtctccattgtggatgtattgcttcgaagaactcctttgatctacttgatagcggtggagttcaatgtgtcacttgcattaaaaattcagcagttcaatctgttccaagtccagtcgtccccaagcttttttcatcccaaaataaccagagactttttggcaaaagcgatgatttattgtctggtagaccactggagacatcctcccttatggtcgatgccagaaacgatgatcttactattatcgctaagaacaaccttccattcatggtgaaaaacgtagaagctgggcaaagcagtaatattttgaggcaaaaagaactagagaatggtgcgaggcagattaaatgggaactacctacccttagtatcggggacatgggaaggatacctttcctaactagatctcaaagtgcattggagtctcgaagagatgaaaataaagacccaactacagaaagcacgacaagtgaatcactttctgaggcatgcctcaacatgagcttgggaattgctagtaatggaaacaagttggaggctacttcaactgtggaaagacctatgctatcaccaacaacaggatttcctgaaggaagagagcttaccactgcattatctccatttcagcatgcacaaagggctcgtcattttctgaccagaccgccaagggttggtgaaggtgctgtttttgatccaacgaaagatatgcttccgcatcttcgtgttgcaaggccacctgcagaaggtaggggccgcaatcaattacttcctcgatattggcctagaataacagaccaagagctacagcaaatttctggagagtatccttattatatttatcaacttcttggtgatattatgcataattcaaattccaccattgtccccctgtttgagaaggttctaagcgccagtgatgcaggccgcatagggcgccttgttctaccaaaagcctgtgcggaggcatatttccctccaatttctcagccagaaggtcgtcctttgacaattcaagacgcaaaaggcaaagaatggcattttcagttcagattctggccaaataacaacagcagaatgtatgtcttggagggggttacaccatgcatacaatcattacaattacaggctggtgatacagtgacttttagtcggatagaacctggagggaaacttgttatgggcttccggaaggccacaaacactgtcagtttgccagactcacagatttcagctattgccaacggttccattcttggggatacattattttctagtacaaatgagaatttagcaatagtaagtggttattcaggatttcttcagtcaataaagggggctgcagatctccatacaagctctatatacgatcatcatgtgaactcagctgacggggatgttagttggcttaagacagataaattcggcagcaggccagatgaggggtctttgcagtttttaaagagaggccgcaatattggttccaaaagcaggaggctttcaatggatgctgaagaagcctgggaactaaagctttactgggatgaggttcaggagctgttgcgtcctgctccaactgcaaaacctactgtcgtgatgattgaggactacgaaattgaagagtatgatgaaccccctgtgtttgcaaagagatcaatttttaccatccgttctactggggaacaagatcaatggattcaatgtgatgattgctcaaaatggcgccggttaccacttaatgttattgttgcatccaagtggacatgtgctgacaacacaatcgactcaaaaagctgttcctgctctgcacctgaagaattaacccccaaagaattgcacattgttcttcagcaatacgaagatatgaggaggcgaaggaacagctttggttttaagcagaacatccccgaaatggatgcggtcagccttgatgcctttgccactgccgcagtctatggtgatgtcgggaaccaaggttccccttctgttgcgacaaccacaaagcacccccggcatcgccctggctgcacctgcatagtgtgtatccagccacctagcgggaagggcccgaagcacaacccagcttgcacctgcaatgtctgcatgaccgttaggcgtcgcttcaagacactgatgatgaggaagaagcaacggcagtcggagcgagaggaggccgaggcgagcaagaagatcgcttggatgaacagagatgagcctgagggaagcagcctgtcaagatccccacagacggttgacactacccgagacggagatgtgaccatgttcgacaaggttgacatcaacaagggccacatagacctgaacttccaccctactgccgtccgagacgaggagcggcatggcgggcagcctcgggtgagcatggtcagcctcctggaggtggccaaccggccactggagaactacatgaagcagaacggcctgacgagcttggctggggagcaagggagctccagcacatgtacaggtgcagccacggttccgcagccggctctggtggagagcgaagagcggacgtccaacaacgacggcgggcgtgtggcgacggcagagcagccggagagcatggccgtcgacgaggctggagataaccagccggacaaggctgccggtgactctgctgctgctttagcttgagcttgaggctgaccgtgttgagtgtgtggatggcaggatgggtattgaatttgttgtgtgtgcatcttatcggcttccccctttttttacaggaacagcagctggtgagttttgatgttgagaatctcatagggtttcattgtgttcttgtagtccttcacttgctttcttgtgtaaacacacgtgtagaaggctgtatgatactgactgtaccttgtaatttttaaccacgaggctcaccttatttgctcatacctcggtgggcagctagttgttgtatgtatccaaagccaagacatccagtaataactcacctgatttgccgctct

SEQ ID NO: 42415 - DNA, 469 bp, Oryza sativa
  Clone ID: PAT_MRT4530_4566C.1
atggcggcggggacggcggtcggaagcggtggcggcggcggtggggacgacggtcggaagcagcggcggcggcagcggcggtggcggttgggacgacggtcgggggcggcggcggtggcggtggcgtcggcggtcgggagcggagaagtcggcggcggcggtgacagcgcctacggtggtcatggagtagagacggtagcggcggcggtgtggaagcagcaacagcagcaggccgccccggtgagctccctccacagcgctcagccaccttgcgagctttctcccaacacgcggccaaccgatgagctcctcccccgcgcgcagccggccgacgagctcccctacctgtgcgaggccgaccagcgagctcccttcccagcgcgcgacctcccggcgacatcctctccccatgggcggcggcggtggcgagggaggcatcggccggcgacggtggtggcagatcggaggg

SEQ ID NO: 42416 - DNA, 519 bp, Oryza sativa
  Clone ID: PAT_MRT4530_45670C.1
atgacggcgggcgaagagggcggcggatccggcggcacccgccccatcccctccttccccttgcagaaccgggggaggcggcggcggatccggctgtgcgcggcggcgagcgaagggggcggcggcggatccggcggcggcgatgcacagcggcagcggcggcggaggctggcggcggcgacgacgtcgtcgaaaggaagggccttcgacggtgacggcgacggcttcatctccaccaccaagctcgcacgctctatggccgacatcaacaccgaccttttcgacctgtccctctccgcctgcgcgatggcctctccctttcccctgacatggcgctcccgctggccacccttctctctgtcgtccgcggctggtcgccggatgccatcaggggaagaagcaagaaaagacaaaaaaagaaaaaggaaaggaaaaggatccaacaaggccttatcggctctgcgcgtccccaaccgaagtccccttaggttcctcggaggccttgtcaagacggtgtaa

SEQ ID NO: 42417 - DNA, 219 bp, Oryza sativa
  Clone ID: PAT_MRT4530_45671C.1
atgcacgtggttgatggagattccatatggcatacaatgaagttattgtgtacgtataggatgcgtagttgaatttggaaggagttcaaatttggtacgattggttatgtaaagtttctttcttgtactagagggtttcctaaggtgtttaggactcctagtataagtttggttcgtggctttaggctgcctacctcatgtataaatagagggggagcg

SEQ ID NO: 42418 - DNA, 1367 bp, Oryza sativa
  Clone ID: PAT_MRT4530_45672C.1
gagtacatcttcagaagaaaaaagcttccagcattgctgagcaaggggttagggcggcggcggcggattccgcggcggccatggcgacggcggtgcggctcctgcgaaggagcctgcgagggggcgaggcagcacctcggttcttatccgcttctcaaaatttggtacgactagttgcaaacaacaccagatcagttgatgttggccaaccaacaccccgatctcatcctgagttattagctgaaggagagattacaccaggtatcactagcgatgagtacatcttcagaagaaaaaagcttttggaggaaatgacggaagggtcaaatgaggtgaactactgctcatggatgttggctgtgagtatcatggctaccttagcgacctgactcgaacatggccaccctgtggcaggttttcacctgctcaggaagaactatacagcctgatactggagacaaataaggaatgcataaagctttgtaaaccaggcgcaagcattaacgagatacataatcattcggtcaagatgttgataaagggtttccaagaacttggaattttagagaaggggaaatccatccaatacaattatttgaatccaacagcaataggtcactcgttaggaatggatattcatgattccgtcaagcttagcaaggacaaacccttggagccaggagttataataacgatcgagcccggggtttacatcccaccggtgccaatactgaaagagaacgccccagataggtaccggggcatcggaattaggatcgaggacgaggtcctcatcaccgagtctggtcacgaggtcctgacggcgtcggtgccgaaggagatctctcacataaccacccttatgaacatgggtagtaactccatgatggatgcccatgagctgagggctgcctgcagttgagaagttcagacaatgctgtcctgatgcatcatccctcttccctccagcgatcttcgcatccaaattccaattgacattcattcttcgttaaagctgagagatgaatcgggattatgaaggctcaagtggggttatggtttttgagaaacccgaaccaccctgatcgtctcagggctgtacgggtttttcgctggttttcacgagaaaaaccagctgttttcagtgtttgcaattttttttagctttgttaaggactgaaatttgtaacatactacctcagattatgtacaaattcagatggtgacagaaacaaaagcacgaaattagggtcacaagaagcccctgaaagaacatgtgaaaattcagacggcagtaatcaaagtttctgaaatcagttgctttcctttttcttaaaaaaaaaaaaaaaaaaaaaaaaaaacaaaaa

SEQ ID NO: 42419 - DNA, 2675 bp, Oryza sativa
  Clone ID: PAT_MRT4530_45673C.1
gcttagagtttgtgatctcaagagtggtgtggaaatagatgtcacactgcctgttagattctatgataaatctgagaggaaattacgtttccgtcatgatgaagactgataggataggatgggctcagatgacacctcgtagtgccatggcttctgtctgatgtcgacggcgcacgggggaggatctcaccggccgtccacgcgcggggaggagccagccggccgtcccacgagctcgccggccatccgtgcgcaaggggaggagctcgcgggcgtccgcgtgcgggggaggagctcgtcgaccgtccgcctgccgtccgcgcgctggggaggagctcgccggcgttcacgcgcgggtgtggactcgcctgccgtccgcgcgccgggggagaagatcgccggcgtccgcgcgcgggggtggaactcgccggccgtccgcgcgcctggggaggagctcgccgatggtggcggtggggacgaggtggtggggagcagcgacggtcggaagcggtggcggtggcggtggggagcggtggaggcggtcgggagtggcagcggccgtggcggtggggagcagcgcggcgccgttgagacagcttgctgcctcatgtcccgggagctggagctcctgctgtttttgctggccctacgggtggggttctaccatgccaagtgccctgtcgcggaggacgtcgtgctgggcgagatgaggaggatcccacgctcgcgccgtctctgcaccggatgcattaccacgactgcttcgtccagcgaattgttgggcctccgtctcttctccctcgtcctccgtcccctgctcgtcctcttcggcaagccgacaaatctgccgccggcgccgccgcatcctccttcaggccctctcccgcgcgccaagttggcaaggccggtcgtggtgctgccccccgctgatcgaatgtcttctccaagtcgaagaagctctgtgcccctccctcttccagaccccagcagcagcagatcagaaacgagtgccgtgaggagcgaaggagatgccgctgaggagaaatctgaagaacagagaccgggaagaagaagaagaaagaggaagcagcgaggaccgacacgcccgactatcgcgcttcttacggaagaagcgaagcagaggctgctgagggcagaggggcagacttcgcccggaacaactgtctcaccttttgctcctgcaccccgtcgtcctcaatacccgccattcccagaggatggcaatgttgaggatgtgcgcaagtggaacgacgagtgccacgaggtcagtaagatcatcaagaaaattgagaaagaacgtgataaagatatccctatcaagactgagcccaaggacccatacaccaccgaggccatacagagctcaagagacaaggtggtggttttgcaggcggcacgcgccattgtcagcatttcgcacatcatggatgatgggcagaggcgaccacaatgtactggcattattattaaacaatggtctgatgacactgggcatcatcatgctaccatagtgacctattctaggatcgtatgcgaagcgggtagaaaacgtgatcccttacccaagctatctgtttgcttaccgaacaagaagactgtcttggatgcggagcttatctacttcaatgatcattatgacattgccctattacatatcaatctagaagttaccatggagctcccatcttttggacgtggcccagagtatggtcaagaagtttttgtgttggctagggatggagaggcatccttgagggctaggcgaggagatatccaatggttagaagaatcagatattttagggcgtgaccactacatgtttctgagctgtgacatccctgagggtgggaatgaaggaatggtgattgacaatgatggtgtagttagagggatggcaatctattgtagcccctatcctgctgttacttcaatttctactattgtaaaatgcattgacatgtttatgcagttcaatcaggttgctcgccccctttttggtattggtgtcagaacaatagcgctgttggatgtgcagcttcaggaggatatcagtgactttggcatcaagggtggtttccttgtagatagggtgtataatcctgtcgccgaggatcttgggataaagcgtggtaatgtaattacttctataaatgggaagggtgctctaacgttacctgagctggaagattatcttctattacttggctggggttatttggaggacaaactaaattgcattaaagatatcaagcttagagtttgtgatctcaagagtggtgtggaaatagatgtcacactgcctgttagattctatgataaatctgagaggagcagtctggatgttttgcttgtgttctgtcatgctgctgatactagttgcaaggtggggagattgttgtaggatttgtcctttggtctatccatcaagcgatataatttggttacacagtagctttaatgtaaaatggggttctgaattcttttttttttctaaatatttttagcagaccagtatttttatccttggttcctgagtgcgaatgacggcagagttagtcgtttattttctcgtttaattttaccacaagtgcagctcacccttcaaataattcatttgatccgaatttaattctatcccgaatatcacaccactt

SEQ ID NO: 42420 - DNA, 5295 bp, Oryza sativa
  unsure (1)..(5295): unsure at all n locations
  Clone ID: PAT_MRT4530_45674C.1
atgagcgcgggctggaggacgctgctgctgcggatcggcgacaggtgcccggagtacgggggctccgccgaccacaaggagcacatctttctcctccaatgtgcagatcaattgcctcacaagattcctttctttggagtattgataggtttgataaacttggaaaatgaagatttttccaagggtattgtcgatacaacacatgccaatttacaggatgccttgcataatgaaaatcgtgacagaatcaggatattgctgcgatttctctgtggcctgatgtgcagcaaagttgtcctgccaaattctattattgaaacatttgaggcactattatcatctgctgcaacaatattagatgaggaaaccggaaatccttcgtggcaaccacgtgctgatttctatgtttattgtatcttggcttcccttccatggggtggctcagaattgtttgagcaagttccagatgaatttgagagagttctggttggtatacagtcttatataagcattagaaggcattttgatgatattgctttctcagtctttgaaacagatgaaggcaactctcccaacaaaaaggatttcatcgaagatttatgggagcgtattcaagttctttctcgcaatgggtggaaggttaagagtgttccaaaacctcacctgtcgtttgaagctcagctggtagctggagtttctcaccgtttctccccaattagttgccccccacctactatctcgcaatcatcttctgaaatagtaaaaggtcaagaaaagcatgaagctgatctgaagtatcctcaaaggcttcgtaggcttcacatatttccaacaaataaagctgagctgttccatttgtcagacaaaaatagtcacacaggcagacatctcttgtcgtatatgactagtcatgtgaaaatggatttcatcttttcaagtttcaagaacggagacagtcgcaaagaatgtgcattttatctggtcagcttacctgtgcctttccgttatgaatacctgatggctgagaccatattttcacagctactgttattgccgaatccccctttcaggccaatttactataccttggttattatcgacctttgcaagatcatggctgttttgatggtttactcaacttgccaaacttctatgccacaagtgtggcttgccacagtttttgtggtgccaaaaaagctagctacacttgtggcaaattttggcttgcaagcattgccaggtgcatttccttcagttgtggtaggagcagtacatgctctttttgacagaattagcaacatggatatggagtgccgcacccgacttatcctatggttttcacatcacttgtcaaattttcagttcatttggccttggcaggagtgggcttacgtcaaggaccttccaaaatgggctccacagcgtgtttttgtccaagaagtattagaaagggaaattcgcttgtcctactttgacaaaattaagcagagcatagaggatgctgttgaattggaagaactgttacccccaaaagctgggcctaacttcagatatcatagtgatgaaggcaaagaaagcactgatggccacagactctccaaggaacttgttgccatggttagaggaaggaagacacaaggtgatattatttcatgggtagacgaaaaaataattcctgtaaatggtgccaaatttgcacttgatgtagttagccagacacttctggacattggctcaaaaagtttcacccatcttatcactgttttggagagatatggtcaaataatatcaaagctgtgcccgaatgaagaaatgcagttattgttgatggatgaagtcagtgcttattggaagaacagtacccagatgattgccatagctattgataggatgatgggttatcgcctactttccaatctggctatagtcaaatgggttttttctcctgctaatgttgatcaatttcatgtttcagatcgtccatgggagattcttagaaatgctgttagtaaaacatacaatcggatttttgacctccggaaagaaattcagacactcaggaaaggtcttcaagctgctaaagaggccagtgaaaaggccgccagagagttggaggaggctaaatctattattgagattgtagatggccaacctgtgccatctgaaaatccaggaaggctaagacgacttcaagcgcgtgctgacaaagcgaaagaaggagaagtaaccactgaagaatctttagaagcaaaggaggccctccttgctcgagggcttgaagaaagcaaggaattgcttaggttactattcaagagctttgttgaagtgctaactgaacgtttgccacctatttctgctgatggagatgttcctaatttacgtgctggagacccgaatgtaaattcttcagcccgtgaccctgaagcaacaaccatggaaatagacaatgaaaatggaggagataacgatagatctggtcccatattgccatgttggatcaggagattttcgttgggaatattcaccctcttatccggaaagctgctttctccggtttgtgcagacctaccagtgaagggtctcacctttgattttgacccttccagtgagttggagtttacctgtattatacgcgacaaatttttcatcatgcttcactaactggacatgcccaaaagtactctgatgtgtactcaggaactccatcgattctcctgtaatcctggccccgaggaacacccttggtggaaagcactgtaacgactttaggtgattaaattatcagttaggtttatttgaattgtagtggactaattttcttgggtgagtaattgctatggtctagctttcttaattccctctgcctgtgttaggacaacgccgtgtttattgataagctgatctgaagccgtcattactttacaaaaaaaaaaaaaaaaaaaaacccccacctactatctcgcaatgcatcctctgaaatagtaaaaggtcaagaaaagcatgaagctgatctgaagtatcctcaaaggcttcgtaggcttcacatatttccaacaaataaagctgagaacatgcaacctgtagatcgttttgttgttgaagaatgcatattggatgtgctacttttcttcaatggatgtcgcaaagaatgtgcattttatctggtcagcttacctgtgcctttccgttatgaatacctgatggctgagaccatattttcacagctactgttattgccgaatccccctttcaggccaatttactataccttggttattatcgacctttgcaaggcattgccaggtgcatttccttcagttgtggtaggagcagtacatgctctttttgacagaattagcaacatggatatggagtgccgcacccgacttatcctatggttttcacatcacttgtcaaattttcagttcatttggccttggcaggagtgggcttacgtcaaggaccttccaaaatgggctccacagcgtgtttttgtccaagaagtattagaaagggaaattcgcttgtcctactttgacaaaattaagcagagcatagaggatgctgttgaattggaagaactgttacccccaaaagctgggcctaacttcagatatcatagtgatgaaggcaaagaaagcactgatggccacagactctccaaggaacttgttgccatggttagaggaaggaagacacaaggtgatattatttcatgggtagacgaaaaaataattcctgtaaatggtgccaaatttgcacttgatgtagttagccagacacttctggacattggctcaaaaagtttcacccatcttatcactgttttggagagatatggtcaaataatatcaaagctgtgcccgaatgaagaaatgcagttattgttgatggatgaagtcagtgcttattggaagaacagtacccagatgattgccatagctattgataggatgatgggttatcgcctactttccaatctggctatagtcaaatgggttttttctcctgctaatgttgatcaatttcatgtttcagatcgtccatgggagattcttagaaatgctgttagtaaaacatacaatcggatttttgacctccggaaagaaattcagacactcaggaaaggtcttcaagctgctaaagaggccagtgaaaaggccgccagagagttggaggaggctaaatctattattgagattgtagatggccaacctgtgccatctgaaaatccaggaaggctaagacgacttcaagcgcgtgctgacaaagcgaaagaaggagaagtaaccactgaagaatctttagaagcaaaggaggccctccttgctcgagggcttgaagaaagcaaggaattgcttaggttactattcaagagctttgttgaagtgctaactgaacgtttgccacctatttctgctgatggagatctggcagacctgcgttgtggaaacccgtaagcccagtcgaccctgaagcaccctgacgtggaaataatcaatgaaaacggtggagatgacggaggtcaggtgaatggtcaaaacaagaaaatctgtgggggtaggattcggcacgagcaatggtgtctctgcacattgggctatctcaagtcgttttctcgtcaatatgctactgagatctggtcccatattgccatgttggatcaggagattttcgttgggaatattcaccctcttatccggaaagctgctttctccggtttgtgcagacctaccagtgaagggtctcacctttgattttgacccttccagtgagttggagtttacctgtattatacgcgacaaatttttcatcatgcttcactaactggacatgcccaaaagtactctgatgtgtactcaggaactccatcgattctcctgtaatcctggccccgaggaacacccttggtggaaagcactgtaacgactttaggtgattaaattatcagttaggtttatttgaattgtagtggactaattttcttgggtgagtaattgctatggtctagctttcttaattccctctgcctgtgttaggacaacgccgtgtttattgataagctgatctgaagccgtcattactttacaaaaaaaaaaaaaaaaaaaaactccaaggggggggcccggtacccaattccccctataatgaattcctattacaattcactgggccgtccgttttacaaccgtcctgactggggaaaaacctggccgttcccccactttaatcccccttggcaccaaatccccctttccccancttggngttnttancnaaaaaggcccnccccca

SEQ ID NO: 42421 - DNA, 1176 bp, Oryza sativa
  Clone ID: PAT_MRT4530_45675C.1
atggcggcggctcagcagctcggaggtggcggcggcgccctggtggcggcccgatggctcggaggtggcggcggtggctccctccgcctgttcgaactcctcctcctccctttcctcatcctcttcctccgtctatcctcctcctctccgggagcatcgggcggcaacggcagagccctcccttctgtcggatccgatgttaatgagtgtgaaaacaattctatttgtggtgctgggtccacatgcaagaatacagaaggtagctatcgttgtgactgcaatttcggccaaagacgtgacaatagttctgataacatgggtaattgtgaacccatattttccagagctgccatagcagtcatagcaacagtttttatcatcgcacttctagtcgtgttactaatgttcattctattggagcgtaagaaaagaaagctgagagcttatttcaaccgaaatggtggacaattgctgaaaagtatcaagatagatatttacacaaaggagaaacttgaccaaattactaaaaattacagtactattattggaaagggtgggtttggtaaggtgtacatgggaaccatcaatggaaatgtgcgagttgcggtcaaacgctgcataacagtcaatgctcttgcttatatgcattcatatgctagtcaaaaaattcttcatggagatgtgaaatctggtaacattcttttggatgataactttgtgccaaaagtttctgactttgggacatctaggctcatgactattggaaaagaccacaccacttttgttgtcggagatatgagctatatagaccctgtatacatgaaaactggccttctcacagagaaaagtgatgtttatagctttggtattgtccttttggagctcatgacgggaaagaaggcaaggtacaatgggaataatagcctccccatgaactttatggaggcttacatgacagagagtagagcatacgagatgtatgataaggagattataactactgaagaggacataaaatgcactgcaaatgttggtaccatcgctgttaattgccttaaaaatagtgtggatgagaggatgaccgaggttgtgaaggatcttcaaattgtgccaagtgaatggttgcaaatccttgggcatagggagcatgactcaactgaacctatgggtatttaa

SEQ ID NO: 42422 - DNA, 1186 bp, Oryza sativa
  Clone ID: PAT_MRT4530_45676C.1
ccggccagggtcttgcgcacgcccacgcccacgcccacgcggacgcagcgggtggtgggttattcggtgccctccgccgccggctacctcccctcctccgctcctccccatcttcacaaataccatcccaaccagtgatccagatcgagccaaccaccacccccaatcggatccctcacccgattggcccggccagatcgccgccgatccgaccccgcgcaaccctctcccgcggccgcgagcgagaaccgaatccaatatggctgccttgccattagccacagccgaattatgtgatgcaaatgcacatttgatcatgaatggcgagcttcgtgctctccagcccgtcttccaagtctacggaaggcggcaggttttcgccggccctatcgtgacgctgaaggtctacgaggacaatgttcttgttcgcgagttcctggaggagaagggccaaggcagggttctcgtggtcgatggtggtgggagcctgcggtgcgccattttgggtggcaaccctgtgcagcaggcgcagaacaatgggtgggctggcatcgtcgtcaatggttgcatcagggacgtggatgagatcaatggctgcgacattggtgtccgagctctgaactcgcaccctatgaaagcaaacaagaagggcatcggggagaagcatgtgcctgtgaccattgcagggaccaggatttgcgacggggagtggctctacgccgatactgatgccggcggcgggcacggcgagggcgcggcgggctggtccgacgtcacctgcgtcgacggcggcggtggcagggttgagcaccgccgtggcagggtcgagctcggcggggagaaggcagcctctcgcgcgccgcgcgttgtctcggcgaggaggagcggcggcggctcggcgagaggagcggcggcggcagcgacggcggggcgcgggacgggggacgccgccgctttgcctgaaagccgaggggagcggccggccggcgcggctcgcaatcatcggctgccacagctcgagagaaaggagagagagatccatggcttcccagtccaccccttccccggtggcggcggcggcggaggaggaggaggaggaagaaggaggggcgcggcggcaatggcggcggaggaggaggaggaagaaggaggggcacggtggctgacggtcgcgccgaacggctag

SEQ ID NO: 42423 - DNA, 219 bp, Oryza sativa
  Clone ID: PAT_MRT4530_45677C.1
atgtcacggaaccaatgggcaagaagccccagccgtctcatcgatcataacgtaaaaagaaacagaatagcagttcgatgtgcgcagacgacagaacctccgctgctggcagcctcggagtcgcagaacacacaacagtacaacatcactgttgctgtttggcacaatggtagagcaatgacaaaggaggcagtccctcttgatcctaagtgtttttga

SEQ ID NO: 42424 - DNA, 1122 bp, Oryza sativa
  Clone ID: PAT_MRT4530_45678C.1
atggcggggcctcgccggcgcaggatgctgctcctaatggcgaactacgcggcgctgctggtggggtcggtggcgtcgagcctgctgtcgaggttctacttcacgcacggcgggcggaaccggtgggtggtgacgctggtgcagtcggcggggttcccgctgctggtcgccggcgcgctcgccggcggccggccggcgtcggcgccgcggccgttcacgtggctgtcgcggcggttcctcgccgtctgcctcgtcatcggcgccctgatgggggccaacaacctgctcttcgcgtacagcacgtcgctcctccccgtgtcgacgtcgtcgctgctgctgtcgacgcagctcgcgttcacgctggtgctcgccgtcgtcatcgtccgccacccggtcaccttcgtgaacctcaatgccgtcgtgctgctgacgctcagctcggtgctcctcgcgctccggtcgggggactccggtgagacggcggagggcggcgtcggcggcggcggcaggaagagctacctcgtcgggttcgtcgtcacgctgggcgccgcggggctcttctcggcgtacctgccggtgatggagctggtgtaccgcgaggccgtctccggggggttcgtcctggccgtggaggtgcaggcggtgatgcaggcgatggcgtcgctcatcgcggcggtggggctggcggcgtcgggcggcgtggcggacgacgtgtccggctgggtggacggcgggtcctcgccggcggtgtactgggcggtggtggcgacgctggtgctgacgtggcaggcgtgcttcatgggcaccgccggcgtgatctacctcacctcgtcgctccacagcggcgtctgcatggccgccgtgctcaccctcaacgtactcggcggcgtcgccgtgttcggcgacccgttcggcgcggagaaggccctcgccaccgcgctctgcgcctggggcttctcctcctacctctacggcgagtacgccaaggccaagaaggtcgccgcggcggcggcggttgcggcggcggaggaggaggagagcgcttccgacggcgagggcagcgtccacaagagcctgacaggtggcggcgcggccggaggacacgtcgagacggcagtttga

SEQ ID NO: 42425 - DNA, 1582 bp, Oryza sativa
  Clone ID: PAT_MRT4530_45679C.1
cccgctgcgggctccccccccccccccgccgccgcctccgccccctcctctccggctctcctctcctcttcccgtcgcttccgccccctacaaatactcgcccacctcctcctcccctccccttcgcttcctcctcacctcgcctctcctcgcctcgccgccgcctcctccctcgtcgtcgtcgtcgccggggggtgtttggggggattcggttgggcggcgacatgggggtgtacctgagcacgcccaagacggagaagtactccggcgagggcgggaacgaccgcctccgctacggcctcgcatccatgcagggatggcggacgaccatggaggacgcgcacactgccctgccacgcctggacgaatgcacatccttttttggtgtctatgatggccatggagggaaggcagtatctaagttttgtgcgaaacatctacacttgcaagtactgaaaaatgaggcttattcatctggtgatttggctacttctgtcttaaagtcatttttcagaatggatgagatgatgaaagggcaaagggggtggagggaactggctgaattgggggacaagggacaaaagtttactggcatgttagaaggcataatatggtccccgaaacctggagagtcagataaacctgaggacacttggactgaggagggtcctcattctcattttcctgggccaacatctggaagcactgcttgtgtggctatcataagaaatgatgaactcattgttgcaaatgctggtgattcccggtgtgtgctctcaaggaagggtcgagcttatgacctgtcaaaagatcacaagccagatcttgatgcagaaaaggagaggatactgaatgctggtggtttcattgttgctgggcgggtcaatggaagtttgaacttggcaagggcaataggggatatggaattgaagcagaatgaatttctcccagccgagagacagattgtcactgctgaacctgaattaaacacagttaaactttctgaggatgatgagttcatcgttttagcatgtgatggcatatgggattgcatgtcaagtcaagaagtggtggactttgttcacaaagaaatgaacactgaggatagcctatctgctgtctgcgagaagttgcttgaccattgcttggcacctgtatccggtggtgatggctgtgataatatgacagtgatcatagtcaagttcaagaagccaagcaagtcagctgctacttcaagcacaaatcaatctgtctcttcagaagagatgcgaccaaacgagcttgatgatggcccaagcgatccaaacaagtagcaggccgagaccgaaccatggagttccaaccggtgatagacaaaaaggatagtaagtggtgtatataagaaaagggattctattctacagtcactatagggtttgttctttctttcaactagcatctttttcttgcaccacaacctgtaatacatgccatgttgcttaatcgaactgggttgtgtgaaatgcatgaattttccaatgctccatccaaaaaaaaaaaaatttttttcctaatattttctataatggttcttaatattttt

SEQ ID NO: 42426 - DNA, 1338 bp, Oryza sativa
  Clone ID: PAT_MRT4530_4567C.1
gttctttagagagcttgacggagaatttctcatggtgtaaaattgttgtctgatgccattcgcatgtaatgatattggtttttatgacatcaaaacatagaacagtttttcctatttgttcttgcgcatgtagtaaacttgaacaaaaatgtatcttctgacttctgatgagagcaaatagaagctagaagaagggataaaatatggggactcagctttagtctcatcggcaagaatcatctaagatgaaattcagggagaaaattcatagcgtgcaagtgcatcattcaaaggacgaaatgcaaccatgcttatatgaatctatggataatctgaaaggtcagttatatgctcatatggctcctcgtcctcaccgccggcgccggcgcgatggccatggccgcagccacccccgtactcctcctcctccgccgttccgccaccatcttactccctcgatctcgatctccgcgcgcctccgcttgcgtcttggcgccgcagcggaggagggggagaaggtggcggctgctccgatcgtcgccgcctcccgaaggggtccccggcgaactcatggaggaggaggaggactccaagttcgtgccgctgaacgccgaggatcccatgtacggaccgccggcgctgttgctcatcggattcgaggaaggcgaaaccaacaaggttcaggagttcctgagagagcttgacggagaatttctcaaggtgattcattgtacagaagaaatgacaaagcaaacgttgtgggatgccatgcacactgagcaacctagtatagaagctgtcaagattgcaaagtcaatgccaagaatttgtatattttctggcctgactggtgaagagatgatgatgttcatcaattcctacccagaaactgggttggaaccagctgcttttgcagcacttgttcctaacagtgcagacaagattcttggtgaggtgatcgaggaaataatgggtgaccacgagatgctgtggatgtttgacgactcacgtgctcaaccactggagatatacaaatttgtgatgcagaacattgagcatgaggggtggtcacttgtcaggcgaattgctcgtgagccgtcagagagagacagtcaccgcttcgtcgtcaatccgaggaggatcgagtacgagaggatgtacatgtttggtgatgcacctaataagggacttgtttggttgatttgtggaccgtcgggtcgtcttgagattcgtgtctacaagaggcctgttcggctagctggtacagccattgtacgcagccgttgttgctgcagctgcaaactcaacttactatttgtgttgactgcacaacaataa

SEQ ID NO: 42427 - DNA, 1556 bp, Oryza sativa
  Clone ID: PAT_MRT4530_45680C.1
gatactggaagtaatctgaacatgttggcaaggtttctctcccgaacgagagaccaaatacatgtatgatggtctgatgaggtaaaaagctaacaaaagagaaatctgtgttatgcgcgcagttatgcaaaacttgccgctacttgtgatttgctgagatcatttcaaccagcttgccgtgcagagcaccgttggtgacgagaacaccacctgaagggtaaatgtctctgcgcccagttaggtcagctgcaagatccaacggtttcccactccagtcactaatctgacctccagcttcctgtacacaaattactccgacagcatgatcccaagacttgagatttttcgtccgtgctcgaagtacaaaaacggaggctctcccagaagctacagttaggtacttgcacaagctgccacagtaaacagataagaggagaatttcattctcatctctaggattggattcatccattgttgagttgaagagaacagatagcggtatcatattccaggtttggctatcaggaatgcaaaagcgtgccatgttcacaactgaacaagaatccactaagcatctattccaagtactctgtgccgtagtgaactggccaatatcgacagacaaatgcctagaccaagttccacagcccacatgagcaatcataaggatcccatgatcaggttgggcagcagcgctgtcttcttttctgctggctatggtagcattagaccaattaggacatcccatcactcctgctactaccttttcatttaccacaagagccagccccaccacatacagagcatcgtcccctcccaagaaaccttttgtgccatcaattggatcaagtacccaataactagcaggatttgaatcaaaggatacagcattcttgcctcctctatcaatagctctcagcacatcatcatgagttaaaagtgaattggcgttactcactttttctgcaacagcacttgaaattgactcaacaagaacattactactgttatcatcagtattggatgacctcagagaagctgaatcctcttctgccaccagaggtattgacggaaacaatcgctggagctctaaactaataagagcttgtactccaaaatctgcaactgtgacaggagtttggtcattcttttcaagaatcttcttgtcacccgaaagcagcgttctcttcacgtctacgcagaggcggcaggcgcgctcgacggccgcggcggccgccgcgagctcccggtggtgggcggcgcgctcaggagggaagggtagcccgtacgcctccgccgcggccgcggccgccgacgccgccgccctatccagaacacaaacacatgagccacttagggcggcggcggcggcggctgtcggaactcaaacgagcggagaatacggttagggtatccaggagaggggtcacctgacgcggacgagggagcggcggcgagccgccgggaggagtaggcggcggcggccgcccccggcgaggaggaggcggtgcggcggcggcgagaggtggaggagcggcattcgcgcgtgtggcggg

SEQ ID NO: 42428 - DNA, 294 bp, Oryza sativa
  Clone ID: PAT_MRT4530_45681C.1
atggcgtcatcacgcgccattgcatgcaagacgcccaagtacttgttcaaggtcggccatggcctagaggacaccggcaagccatttctatgggtagtgaagaagtcggaggtcatggcgtcacccagcgacacgcttgccggcgtctatgatggccatggcggccccgacgcctcccgctttcttcgctcccgcctcttccctttcgtccatgagttcgcggcgttgtgcagcggcgtggtggacgctgacgtgattaggaaggcgttcctggcggccgacgaggagtactag

SEQ ID NO: 42429 - DNA, 790 bp, Oryza sativa
  Clone ID: PAT_MRT4530_45682C.1
atggttgaaaatgaagaaaaagataacaacattccagattaggctcaattcggtgaatttgaagaaaatacaacaggcgcgacaggcgggcctgttgcagaaaatgacagtgcagatgatttttgtcggatgttgtacgacgcaaagaaggactacgaaagtgaaaaggaggtcacgaaatttgagcgtatgttaacggaccacaaaatgttcttgtacccaggctgtgaacagggcataaaaagttaggtaatacgctggaattcttacaatggaaggcaaaaaaatggtgtgactgacaaggcattttgtgagttattgaaactcataaagaatattcttccggagggaaataaatggcccgaaacaacgtacgaagctaacaggtagtctgccctctaggacttgaagtacagatcagatacacgcatattcgaacgattatatcctctattgtggtgaggattacgagaacttagaaacatgcccagtttgtatggcgttacaatataagattagacgagatgactccggtgatgttgacggataaccttccaagacgagagtttctgctaaggtaatgcgatatttccctataatatcacggctgaggcatttctttaggtacaaagctcaagttaaaatgatgcgttggcacgtaaaagaacatatgggaaaaaactctgccgatggatcgcatcggcgaagcatcgacatcacatttcaagacttcgaaaagtctgtatgaaacataaggtttggtttcagtatggattgcatgaatccattt

SEQ ID NO: 42430 - DNA, 188 bp, Oryza sativa
  unsure (1)..(188): unsure at all n locations
  Clone ID: PAT_MRT4530_45683C.1
antacaaaggcggggaggggcaaaactttttatncccaaacacacaaagggaccaccggacaggaacccccgggaattacacattattccaggccttgtgcaaagcgcgggcagaacgcttcaagggcgccagggcaccaaggttacncatgtgcttcctgtgcctatctttggggcaaccacatgng

SEQ ID NO: 42431 - DNA, 849 bp, Oryza sativa
  Clone ID: PAT_MRT4530_45684C.1
tttgattgttttgtttcgtgcaaaaccacgatagatgatattgagtcaaagctgagacagatagaggaagatcccgaaggtgcaggaactgctcacttgtactcagtcacccagaaaattagtggtgtagcaaaccgtgcatttgagcctctatttgagaggcaggcccaagctgagaagatcagatctgttcaaggaatgctttgatattccggacattatttaacctgccaagtgcaattcgtgggaacattagaaaaggagaatatgacctagctgtcagggagtaccagaaagctaaatctattgttcttccttctcatgtggggatactaaaacgtgtacttgaggaagtggaaaaggtaatgcaggaattcagaggcatgctttacaagtcaatggaggatcctcatcttgacctcgctgagcttgagaacattgttcggctactgttggagttggaacctgagaccgatccagtgtggcattatcttaacattcagaatagcaggatccatggattgtttgaaaaatgcaccttagatcatgaagcacgaatggaggttctacagaataaaattcgtgagaaaatactatctgatgcaaaatggaggcaattgcaacaagattcaaataaatcattggaagttgattctgctaccggtgactcttttcaagatgatcaactgtcaacaaatattatggctgatgaagctgatagcttaagggcagcctacattcgtaggttaactgctgtacttatccagcatgttcctgcattctggagattagctttatctgtcttcagtggaaaatttgcaaggcagcttgcgggaattactttctgat

SEQ ID NO: 42432 - DNA, 192 bp, Oryza sativa
  Clone ID: PAT_MRT4530_45685C.1
atgtcgacggcgggcggcggctacaaggaagcgaagcaggagcagcaggatgaaggaatccggcgagagctttcggtggcggtggcgaccgaagtttctcgcaacggctgcggcgacaacgcctgcagcaactttgggtggcgtcgcgggggagaggagccggcgtggcctgcagcggcagcggagtgttag

SEQ ID NO: 42433 - DNA, 3255 bp, Oryza sativa
  Clone ID: PAT_MRT4530_45686C.1
atggcgagcgacagcgacgtcgacgaggacgagctcctccagatggcgctgcaggagcaggcggcgcgtgacctcagccaccagcgccccgcgggggccgggaagcccgtcgtcaacctcgtccgcccccctgccaactcctcccgcggcggcggcggaggaggacgcggcggagggggccccgccaaggcgaggcagcccagccgcggaggcggcgacgacgacgacgacgactccgaggtcgagatgctgtccatttcctccggggatgaggatggcgccccctcctcccgtgaccgtggccccccgcccccccgcggcggcggccgcgccggggcacggcgggccgcgtcgagggatgatggggatttcgacgacgacgagcccaggagctggaagcgcgtcgacgaggccgagcttgctcgcagggttcgggaaatgcgtgaagggggggcagctcctacagttgatcagaaagcagctgctgcagcaactcggaaggcacttaccaatgtacagactttacctagaggagtagaagttctggaccctttgggccttggagtcattgataataagtctctgcgattaattactgatgcttcagtaagttctcctgtttcaagggagaaggctcagggtttagaccccagtatgcgagagaaagttatatattcttctccgaattttgaccccaaggtttttctttcgtgggttcacaaagatacaagtgctgctgacttagagtctggtgcgcttaccttgaaaactgatctcaaagggagaacacagcagaaaaaacaattagtcaaggagaactttgattgttttgtttcgtgcaaaaccacgatagatgatattgagtcaaagctgagacagatagaggaagatcccgaaggtgcaggaactgctcacttgtactcagtcacccagaaaattagtggtgtagcaaaccgtgcatttgagcctctatttgagaggcaggcccaagctgagaagatcagatctgttcaaggaatgcttcagagattccggacattatttaacctgccaagtgcaattcgtgggaacattagaaaaggagaatatgacctagctgtcagggagtaccagaaagctaaatctattgttcttccttctcatgtggggatactaaaacgtgtacttgaggaagtggaaaaggtaatgcaggaattcagaggcatgctttacaagtcaatggaggatcctcatcttgacctcgctgagttctatctgcctcctgattttcttgccaactgccagcttgagaacattgttcggctactgttggagttggaacctgagaccgatccagtgtggcattatcttaacattcagaatagcaggatccatggattgtttgaaaaatgcaccttagatcatgaagcacgaatggaggttctacagaataaaattcgtgagaaaatactatctgatgcaaaatggaggcaattgcaacaagattcaaataaatcattggaagttgattctgctaccggtgactcttttcaagatgatcaactgtcaacaaatattatggctgatgaagctgatagcttaagggcagcctacattcgtaggttaactgctgtacttatccagcatgttcctgcattctggagattagctttatctgtcttcagtggaaaatttgcaaaggcagctgcggggaatgtactttctgattctgatatgaatacaaaacagagtgtaaataagactgatgataaaggtggagaagcaaagtacacaaaccatactcttgatgaagttgctagtatggttcgtgctactgtatctgcttttgacaccaaggttcagaatactttccgtgattttgaggaatgtaacattcttcgtccgttcatgggtgatactataaaagaaatagctaaggcttgccttactcttgaagggaaggattcatctccaactgctgtgaaaatgttgcgggcccttcattatgaaataacgaagctttacattctacgactttgttcatggatgcgggcaacaactaaggagatatcgaaatatgagacctggtttactttaaccacccttgagaggaacaaatctctatatgcaatttcaagcatgcccttggagttccgtgatatcatagtttcggcaatggaccgcattgatttctgtgttagtgcatcaggttatctggagaggtttggaggggaactagctcagaacagatcaaataaagaaaacaaccatacccaaaatggatatgtaaatggtactaacagtgaaacatctgctggcatggatggggacttgtacaagaagctgttggttgttctgagtaacattggatattgtaaagctgaactttcagatgaactgtataccaaatacaggcacatttggtccccagtcagggataatgatgagcgtagtgctgacatgcgagatctgatgacttctttctcagcacttgaggagaaagtcctggaacagtatacatttgcaaagtcgaacttgatcagaaatgctgcacgaaactatctgttggattatgggattcactggggagcagcaccagcagtaaaggtctactccggtgctaggcctctgctggaaaaggcgatgacaattttggtagagggtttgattgatatcttcctcagtattttccatgagaataagaccaaagaactcagaatgttggacgcaaatggtttttgtcagctcatgcttgagcttgagtattttgagactatattacggacatacttatcaactgaggcagagcaggctttgagatccttacaagagaatttattggagaaggcctgcgaaagtgtgactgaagccttggagaatcctggacaccaccgtcgaccaactcgtggcagtgaggatgctgcatcagatgatagacaatcagtatcacctgatgatctgcttgcacttgctcagcaatgcagtagcgatttgcttcaaggggagctggagaaaacccggttaaatattgcgtgctttatggagtcaactcttcaatcaacgcctgcaccggctggatcaaaacctgctgcttatcagtcatacaaggcacctgcgacacaccaaccagttcaagtgtcctccccaagttttagaaggcagcagacaaataaaaggggtgtacaggggttgctgtacggggctatctacttgtataatttccatgagcctggaattattgtcgccattttttctaaagacaccatctcaacttaa

SEQ ID NO: 42434 - DNA, 3663 bp, Oryza sativa
  Clone ID: PAT_MRT4530_45687C.1
atggcgagcgacagcgacgtcgacgaggacgagctcctccagatggcgctgcaggagcaggcggcgcgtgacctcagccaccagcgccccgcgggggccgggaagcccgtcgtcaacctcgtccgcccccctgccaactcctcccgcggcggcggcggaggaggacgcggcggagggggccccgccaaggcgaggcagcccagccgcggaggcggcgacgacgacgacgacgactccgaggtcgagatgctgtccatttcctccggggatgaggatggcgccccctcctcccgtgaccgtggccccccgcccccccgcggcggcggccgcgccggggcacggcgggccgcgtcgagggatgatggggatttcgacgacgacgagcccaggagctggaagcgcgtcgacgaggccgagcttgctcgcagggttcgggaaatgcgtgaagggggggcagctcctacagttgatcagaaagcagctgctgcagcaactcggaaggcacttaccaatgtacagactttacctagaggagtagaagttctggaccctttgggccttggagtcattgataataagtctctgcgattaattactgatgcttcagtaagttctcctgtttcaagggagaaggctcagggtttagaccccagtatgcgagagaaagttatatattcttctccgaattttgaccccaaggtttttctttcgtgggttcacaaagatacaagtgctgctgacttagagtctggtgcgcttaccttgaaaactgatctcaaagggagaacacagcagaaaaaacaattagtcaaggagaactttgattgttttgtttcgtgcaaaaccacgatagatgatattgagtcaaagctgagacagatagaggaagatcccgaaggtgcaggaactgctcacttgtactcagtcacccagaaaattagtggtgtagcaaaccgtgcatttgagcctctatttgagaggcaggcccaagctgagaagatcagatctgttcaaggaatgcttcagagattccggacattatttaacctgccaagtgcaattcgtgggaacattagaaaaggagaatatgacctagctgtcagggagtaccagaaagctaaatctattgttcttccttctcatgtggggatactaaaacgtgtacttgaggaagtggaaaaggtaatgcaggaattcagaggcatgctttacaagtcaatggaggatcctcatcttgacctcgctgagttctatctgcctcctgattttcttgccaactgccagcttgagaacattgttcggctactgttggagttggaacctgagaccgatccagtgtggcattatcttaacattcagaatagcaggatccatggattgtttgaaaaatgcaccttagatcatgaagcacgaatggaggttctacagaataaaattcgtgagaaaatactatctgatgcaaaatggaggcaattgcaacaagattcaaataaatcattggaagttgattctgctaccggtgactcttttcaagatgatcaactgtcaacaaatattatggctgatgaagctgatagcttaagggcagcctacattcgtaggttaactgctgtacttatccagcatgttcctgcattctggagattagctttatctgtcttcagtggaaaatttgcaaaggcagctgcggggaatgtactttctgattctgatatgaatacaaaacagagtgtaaataagactgatgataaaggtggagaagcaaagtacacaaaccatactcttgatgaagttgctagtatggttcgtgctactgtatctgcttttgacaccaaggttcagaatactttccgtgattttgaggaatgtaacattcttcgtccgttcatgggtgatactataaaagaaatagctaaggcttgccttactcttgaagggaaggattcatctccaactgctgtgaaaatgttgcgggcccttcattatgaaataacgaagctttacattctacgactttgttcatggatgcgggcaacaactaaggagatatcgaaatatgagacctggtttactttaaccacccttgagaggaacaaatctctatatgcaatttcaagcatgcccttggagttccgtgatatcatagtttcggcaatggaccgcattgattttatggttcttaatctgaggagtgagactgccaagtcttacgatatttctcaacacctccatgaaattcatgaatctgtcagacttgcatttctaaattcttttctggattttgctggttatctggagaggtttggaggggaactagctcagaacagatcaaataaagaaaacaaccatacccaaaatggatatgtaaatggtactaacagtgaaacatctgctggcatggatggggacttgtacaagaagctgttggttgttctgagtaacattggatattgtaaagctgaactttcagatgaactgtataccaaatacaggcacatttggtccccagtcagggataatgatgagcgtagtgctgacatgcgagatctgatgacttctttctcagcacttgaggagaaagtcctggaacagtatacatttgcaaagtcgaacttgatcagaaatgctgcacgaaactatctgttggattatgggattcactggggagcagcaccagcagtaaaggtctactccggtgctaggcctctgctggaaaaggcgatgacaattttggtagagggtttgattgatatcttcctcagtattttccatgagaataagaccaaagaactcagaatgttggacgcaaatggtttttgtcagctcatgcttgagcttgagtattttgagactatattacggacatacttatcaactgaggcagagcaggctttgagatccttacaagagaatttattggagaaggcctgcgaaagtgtgactgaagccttggagaatcctggacaccaccgtcgaccaactcgtggcagtgaggatgctgcatcagatgatagacaatcagtatcacctgatgatctgcttgcacttgctcagcaatgcagtagcgatttgcttcaaggggagctggagaaaacccggttaaatattgcgtgctttatggagtcaactcttcaatcaacgcctgcaccggctggatcaaaacctgctgcttatcagtcatacaaggcacctgcgacacaccaaccagttcaagtgtcctccccaagttttagaaggcagcagacaaataaaaggggtgtacaggggttgctgtacggggctatctacttgtataatttccatgagcctggaattattgtcgccattttttctaaagacaccatctcaacttaactttttggaactgagtgtcagatttgtcggtggctgacgaactcattagtcattaccaccattggacctcactcttccgattttctatgcggacttaaatgtgtcttgtaccaggctgaatctataaataaagcacgcgatcgatcttatttcacccctggatctgaaaaactttctttagtctaatgtaacatgtttttttcttccttctcgatcgatcattttgctgtttatacgactaaacgtggaagccccccatccccctttgttttgttgattaaaaaaaaaaaaaatttaaaaaacaaaacc

SEQ ID NO: 42435 - DNA, 273 bp, Oryza sativa
  Clone ID: PAT_MRT4530_45688C.1
atgggggccgcggctcccgctagcatcctcactcccgaagggagtgggggtgtgcaccaccacttcttccttcaagacctcgaccatgatcgtcgaggccggaggaatacttggggcggaagaaaacgacttctctttgaagcgccacctggtgcgccagctgtcgagaagacgctatggagcgtaataccctactcctgtgtgtgggatttatggttgagtgttacaaaggttcctgaactccggagagcgctcttgatcttctccttctag

SEQ ID NO: 42436 - DNA, 145 bp, Oryza sativa
  Clone ID: PAT_MRT4530_45689C.1
ggaggaagaggacaacttggaggactcaataaaccacagaaggttcccttgggcgtattgaatgagggaagaaatgtaaacccgtaacataatttgccacacagccgatacaaaacaaggtgtgggcatgcattgaacggccagg

SEQ ID NO: 42437 - DNA, 242 bp, Oryza sativa
  Clone ID: PAT_MRT4530_4568C.1
atggtgggttgtgagcacatggttttgatggtcgtgctcatgacagttaaggaccggttcacgattttcggttatgaaacattaaccgtgccaaccacaagccagcgtgggcaacgactttactttttgtatagtatggttcattgtagagcaccagactgtgaagtggcggagataagcccacgggggtcgctggggagtccatgccttgtttgtaagggggtgattatgatccagaaacg

SEQ ID NO: 42438 - DNA, 438 bp, Oryza sativa
  Clone ID: PAT_MRT4530_45690C.1
ccggccctaagaactcggaagaacccacctgggtggaacaggggacctggaccaaaaaaaacgctgggagaggataaacccaatcccggatagggagaacccagcgggacaaaaaggggcggagcttccaaaacctctttttgatgggagagaggggggacgggatgctaaaggtggacccatgaatgggggggcgaataacctgaaggacacatctccctccggatccccaggggctcaatagcaggatggaaaccaaggggaataaaaaatacagggggacggaatataggtccgctggatgcactgaaaaccacaaggtaaggaggaggaacctggagcaaccaggggaggaggaatctgctcgctgggaaggagatatggggggggcccaagttctccagcgtcacatatccatctggaaagataacccaaaaa

SEQ ID NO: 42439 - DNA, 477 bp, Oryza sativa
  Clone ID: PAT_MRT4530_45691C.1
atggcggcgaccggccacgcgggcacacaaggccggcggcggcggcgaccgggaacaaagcggcggcggcacacgggccgggcggccaccggcggcggcggcgcgacgcgcgcaagcacgggaggcggccggcgaaggggagaaggaggagggaggcggctcaccgagagccgcggcgacagagggagcggccggcgaagggaggcggcgacgctcctcgggtcgacaacacggaggggctcccggcaatggaaggtgtcgaccgagcggcggccgagaaagagcgtgacgcggcgagggaggcgatgcagccggcgcgtcgcggcggcagccggggcgatggcgaacggcgaccggaggaggaaaaaggtggccgaggcggagaggggaaaagaagtaggggccggggtgtggcgtggagcggcgacgacggtggtggcgacggcgcagcgcggcgacggcgagagcggcggctag

SEQ ID NO: 42440 - DNA, 139 bp, Oryza sativa
  Clone ID: PAT_MRT4530_45692C.1
gaaggaaatgggcttttcaattccacagatgcagtgctttataaaaaggcagctagttgagtagcaaccttgtaagaatatcagtatataactcttagcatcatattcagactgtatcaatcagagtaacttacattcc

SEQ ID NO: 42441 - DNA, 1781 bp, Oryza sativa
  Clone ID: PAT_MRT4530_45693C.1
gtgagaaaaagtcaacggcgtcatctattaaaaaacggaggtagcacttaagtatatgatacaacaccttcatcgcctataggtaccagttgtctaatactactacagcaacaacaacataaaaaccaagggaatgtcactggcaagggcgcagggcttgctgggcacatcgtctcaaaaagaagcaaaggtagtaggaggaaggaagaaaggaggctttacatttaacggattggcttggttttcttttactgatcatcatcagtctctcatctgatcttctgaagaatgtgctgtgcgcacaaacaagcgaggacagcagcaactatgtatggtgggtgggtgcatctgacctaccatggcttcaggtcacccaccgggccctgggtccagttcagcaccttctgccccgggtccaggtacacgctcttcgggtgtggaagcttccgtcccagcccgttgagtatctggtggaaggcgtcacctggctgggcgggctgcgggaacagcatggcctgcttcatcgacgggttcgctagcagcctctgcttccgcaggatcacatccattggtatcgatgtcaggatggtgtccagctttgggacgtcgtcctccgccacaaatacaccgatctcatcccacgggatcgcgtccgcaaaaggtaggacaatgtcgtctgcaatgatcactggaatgcagccgaacacaacggcttcaaccaaccgggggctccacggagcccagcctagagggcacaagcagaagatggaacgctgcatgtcctcgtagtaggttggtgggtggtctgtggagatgtcaaaaagaggattgttcttgaagttctcccacaccgatgcacgggcacctcttgcatagtaaccaccctcaggatcatttgcggtatcatagaataaaccacggaaatagacaaagattgatcgaggtgtctctgggggaacaaggtgagttttcatcttctgaggaggagcatatggtgggattgtgatggacccttccttgaggcagacatgatccttctgcccaaaagtctggaccagcgtcgcacggcgaagcaatggcaggattccccgctcaatggccttctcttcctgataatggaagcatgctccgaaatcatgtggcacaacaaagaaatggtctgccccatctgtcctgttccaatagggccaatgcgaggaaatgaactgaattgcacttctcataatccttggagacttgaagggcaagggatgaccccatggagtaagatcgcacgtcgtgtatactggagtatagaaccaatcagcttcctccggatttaaagtccggatcgcacttgacaagaggaatcgatgcatgaaaatctctgcagcaaacatgtggctgaggcatctggaatcttttgccaccatcttcttgttgtatttagtgggcaactcgtagacatacaccttaagcctcccgacagggtcatcttccagcacatcacccgcactcccttcgatcctctcggtgtcctggcccctggcaacgtcctccaaggcggtggcggccagaagcagcgcgagcgccacggccgccgaagacagccgcatcgccatggctccccccacctctcctcccttccaaccaccgacctcgacgaaacccccaagaaggatgctggatgcggctggccaatcgaggaggaggaggaggaaggagaggaacacggggaggggagaggagggaggcgagctcgcgaggatgatgatggcggtggccggtggctgaccggccgg

SEQ ID NO: 42442 - DNA, 744 bp, Oryza sativa
  unsure (1)..(744): unsure at all n locations
  Clone ID: PAT_MRT4530_45694C.1
gagccagagaggccacacacacacaagcacaacacaaaagtggccatggctctcctcctctcctaccccaggcgccacccatccatccacctcctcatcctctccgcctacgccctcttcctcctcccaatcttggatggattggagctgggaggagatgggctctacagggagatcctcagggatgagacggtgctcaggctcaaagaacttggcaagatatctgatggggaaggttaccttgagaggacatttttgagtcctgcctcaatcagagcctctgctgtcattatcagctggatgaaagatgccggacttaccacgtggattgatcaaatggggaatattcatggtcgatttgaaccgaccaactcaaccaaggaggccttgttgatcggatctcacatggacactgttattgatgctggcatgtatgacggagctttgggtattatctctgcaatctctgctttgaaggttttgaaagttactgggagacttcagagacttactagaccagtagaggtgattgcattcagcgatgaggagggtgttagattccaaacaacttttctgggaagcgccgctgtagctgtggcacgacagttcaagatgtcctaaagctgaattctcttgagggcactgctaatgctcttggtgaagtaaggtacagcccggagtctgtcgggagntatntcgaggttcacattgaacaagggcctgtcctggaagcccttcgttatc

SEQ ID NO: 42443 - DNA, 2842 bp, Oryza sativa
  unsure (1)..(2842): unsure at all n locations
  Clone ID: PAT_MRT4530_45695C.1
cagctagttcgaagcgatctcaggaagacagaagccagaaaaagcaggccttgcgaatgctgtaactgacactcggatagattcttcttgcttcaatgtgtcactgatagggcaagggtgatcaccacatgggaagaggagacnaatctgctgatgaagaacagacatgttgctgccgttgtagcagccggactggaggtggagcgagaggccacacacacacaagcacaacacaaaagtggccatggctctcctcctctcctaccccaggcgccacccatccatccacctcctcatcctctccgcctacgccctcttcctcctcccaatcttggatggattggagctgggaggagatgggctctacagggagatcctcagggatgagacggtgctcaggctcaaagaacttggcaagatatctgatggggaaggttaccttgagaggacatttttgagtcctgcctcaatcagagcctctgctgtcattatcagctggatgaaagatgccggacttaccacgtggattgatcaaatggggaatattcatggtcgatttgaaccgaccaactcaaccaaggaggccttgttgatcggatctcacatggacactgttattgatgctggcatgtatgacggagctttgggtattatctctgcaatctctgctttgaaggttttgaaagttactgggagacttcagagacttactagaccagtagaggtgattgcattcagcgatgaggagggtgttagattccaaacaacttttctgggaagcgccgctgtagctggtacactacctgaatcaattttacaagtatctgacaagagtatatattttgcattcaacttcttcagtggcacgacagttcaagatgtcctaaagctgaattctcttgagggcactgctaatgctcttggtgaagtaaggtacagcccggagtctgtcgggagttatgtcgaggttcacattgaacaagggcctgtcctggaagcccttcgttatccgcttggtgttgtaaaaggaattgcaggacagacgcgattaaaggtaattataaatggttcacaagggcatgctggcacggttccaatgaaattgcgccgtgatccgatggttgcagctgcagagctcgtcctgacactggagacgctctgcaaagaacccaacaagttcctcacctacgacgaggaatgcggctgcttcactgaggaatccctcgccggactcgtctgcaccgtcggcgagctcctgacatggcccagcgccagcaacgtcataccaggccaggtgaacttcacggtggacatacgcgccatggacgacaaggtgagggagacgatcgtcaccagcttctcgaggcttgttcttcagagatgcgacgacagattggtcgactgcgccgtcgagcagaagcacgcggcggcggcgacgccgtgcgacgcggagctgacgtcgcggctggagcgcgcgacgcggtcgacgatctcgtcgatggcggcgggcgtgcgccgggccggcggcgagacgccggtgctgatgagcggagcggggcacgacgcgatggcgatggcgaggctgacgaaggtggggatgctgttcgtgcggtgccgcggcggcgtgagccactcgccggaggagtccgtgatggacgacgacgtctgggccgccggcctcgcgctggtcaacttcattgaccagaacgcggtggatgcggcggcggcgacggcggcggaatcgtgacgacgacggcggcgattcttttggtaggtgtgtgcctagtagcctacaaattgtaaatatggatttgcttgttacatttgtcaagaaataaaattgaattcaattcgttgagacgttcaaaaaaaaaaaaaaaaaaaaaaaaaaaaggggcgctccggcggcgccaagaggcagcagtgcaagaacctcgaggcggagaggaagcggaggaagaagctcaatggccacctctacaagctccgctcgctcgtcccaaacatcaccaagatggatcgcgcgtcgattcttggagacgcgatcgactacatcgtggggttgcagaagcaggtgaaggagctgcaggacgagctggaagacaaccatgtccaccataagccgcccgacgtgctcatcgaccacccgccgccggcgagcctcgtcgggctcgacaacgacgacgcctcgccgcccaacagccaccaacagcagccgccgctcgccgtttccggcagcagcagcaggaggagtaacaaggacccagcaatgaccgacgacaaggtcggcggcggcggcggcggtgggcaccggatggagccgcagctggaggtgcgtcaggtgcaggggaacgagctgttcgtccaggtgctctgggagcacaagcccggcgggttcgtccgcctcatggacgccatgaacgcgctcggcctcgaggtcatcaacgtcaacgtcaccacctacaagaccctcgtcctcaacgtcttccgcgtcatggtagtgagggacagcgaggtggcggtgcaggcggacagggtgagggactcgctgctggaggtgacgcgggagacgtaccccggcgtgtggccgtcgccgcaggaggaggacgacgccaagttcgacggcggcgacggcgggcaggctgcggcggcggcggcggcggccggtggagagcactaccacgacgaagtcggcggcggataccatcagcacctgcattacctcgcgtttgattgatgatgatgattgattttaccatctacgtctcactactagtgtatacacactcgaattattcgagaaagaaacataatgctacgtactagtaataatggatttgat

SEQ ID NO: 42444 - DNA, 2082 bp, Oryza sativa
  Clone ID: PAT_MRT4530_45696C.1
atgggcgtgggcggtcggcgaggacggtgtggacgtcggcgctcagggcggcacgcacggcacggcggcaggcaggcgtttggcgccgtggtccggaagggagcaacggcggtgagggacacggaggcggcgaccgcgtgggacacggaggtggcgaccgcgcgggacacagaggcagcggcggcgaactccacctccgcctccagccgctgcctgcgccacaggccgccgcccccatcccgagccccacctccagctgcatccaccatcgcccgccatccttatcccgagccccgcttccagcctccttcgccaccagccaccgcccccatcccgagcaccatctcgacggcgaagaagactggaccttcccctctgcgtcccgcgccaccgtttctccctcccagaggggacgagccgacgacgaggcggcgccggtgccccggagcgacagcacgcgggaccggcggttcgaccagttcaagaccttctccggctacctcgagcgccagttctccagtccagcctccgcgggatgctgccgtaggagttgccgatatcgagacggcagactcgaagatctccgaggaggaggtcgacggcggcgaggtgcccaccgttgaccgctacttcgccgcgctcgagggccccgagctcgacaccctccgagtattaataactcttgattttgtgaaaattgacaccaacgatccggttttcaatcaacacaatctgaaccttgcaatcacagcaccatatcttctktggttatcaatcgtttgttgctcgattgatcttgttgagaagggagtacataatgggaaggagattgctgtgaagaaacttaatttgttgccgggactcaatgatacggtattcaaaaatgaatctcttaaccttatgtctgtccagcatcaaaatattgtgaaattaattggctactgctatgaaacgaaaaataaagttgttgaatataatggcaaacttacttatgctgaaataagtgagcgagttatctgcttcgaatatttgaagcgtggaaacctagcaaattttatttctgatgaatctggtggtggacttgactggaccacgaggtacagaataattaaaggggcttgcgagggattaaattatcttcacaatggacaagaaaagcctatttaccatctggacttaaagcccgaaaatatattgttagatgagaacatggcaccgaaaattgcagattttggcttgtccagactctttgaatcgacaaaaacacatataacgaaaactgtgaatggaacaagaggatacatgccaccagaattcatagaccaaggaaaaatcactaagaagtttgacgtattcagtttgggcgtcataattatacagataatcgctggaattgacggctacagacagtgttgtgacatgtcgtccacccaagaatttgttgattatgtatatgcaaaatggaacaaaagagtgcagggaatatcgaggtatgcatcgcgcgaagcagacatgctcgcagtgagacaatgtattgaattatcgttaagatgtgtggaggccaaccgagacaaaaggcctgcgataaatgatataatccatcaactgaacgagttagatgctgagattgaaaacatgtttatgcgtcagcccaagtcacttttgggccagaaaagctctgaatccaaatatgttgggcttgatcctgtccgcgagcttcgattccccttcgaggtaaagaaggatatatcatgctgtctgcagctaacaaaccagacggattacttcatcgcgtttaatacaaaggcaaaccaaaagaagtatagcacacaaccaaacaaaggaaccattgcaccatggtccagttgctatgtcactgtaaccatgaaagcacaggagacggcacccccgtatttgcagtgccatgacatgttcgttgtgcagagcactagagtgaatgaggacctcgaacctgaaactgaagatatcactgaagaattgttcaagaaaacaatgggtaaggtcgtggatgaggagaagctgccgatcgtttatgtggcgttgccccaggcagaaagctag

SEQ ID NO: 42445 - DNA, 523 bp, Oryza sativa
  Clone ID: PAT_MRT4530_45697C.1
tctttttttttttttttttttttcttttttttttttatttttttttttttattttttttttttcttttttttttttttttttttttttttttttttttttttttttttttttttttttttttttttttttttttggggggggggtttttaacttccccccccctttcctgttaaaacccattacaaaacccccccaaggggggaaatggtcctggggcccccctaacccccaggggggatcccctttctaaatggccccttaaaacccaccaaagctttgccttggccccatttcccatcaaaggaaaaacccccaaactgctggagttttacctcctgccctttgccctgaacaattttaatgccccgaaagggaaattgttgccccccccccccaagctgttcccaaacttggttgtttctcatttaaaacccctcttattccaaaaaggggcttgcccttttcccatactgttgccttaccaacccattttatgggctaaaccccttttgtttaaacaaa

SEQ ID NO: 42446 - DNA, 318 bp, Oryza sativa
  Clone ID: PAT_MRT4530_45698C.1
atgtctacatctcctggacgggacaggagatgcagcgagccctgctacttcaccttcgtcatgctcatcatgatggtgcaggagaagatcccacacatcaccaccttcctgatgcccatcgacattatgctgtcaactttcaaccatcccggagatccaagtgatggtgttcctgtcaaggcattccatcccggctccgctcatgttcgacgacctcatcaagcttcccaacgcaacaatagttcccacagcccattcgagccagacaatcacaataaccaatgtgaagcaccagaagatctacttcaacaatattga

SEQ ID NO: 42447 - DNA, 597 bp, Oryza sativa
  Clone ID: PAT_MRT4530_45699C.1
atggatggatggtctggagtctggagtctggacgcctcgggattgggggtgggggatctttctcggaggggagagcacaggccattggtgggggtggtgggttcgccttttgaattactgcgctgcaaagcaggaacagtaaagctgatcaggagacatctcacatctaatgtctctgttttggtgctagtgctgcaaaaggagagtccaagttggtgtgggcctgtgggcccaaacggcagctcacatactgggcctcaaaccctcaatcctagcgatggcaagatcttcctgcacagtggcttgactggcttcatcctccagaaccttcagaacgtacagttgacatcgaaggccttctgttgctatgaagctgaaggcaccacattgcgagatgcatcatgtgcattacatcttaagaatgaagctgcatgtcatccatcctgtggtcaatcatatctaaaagcttgtcatttctggcgctatcttgcaacaagctcatcaggtgaagggcttcctctggctgcgagtgacactactacaaaagtgatttttctgtacgaggccccatcatttttccatgtggaccgtaactag

SEQ ID NO: 42448 - DNA, 431 bp, Oryza sativa
  unsure (1)..(431): unsure at all n locations
  Clone ID: PAT_MRT4530_4569C.1
ctgcattcaatctccaagcctggaagctgcgcgtgtcaaatacgggatggcaccttctctgctctgcacagtggctgtactgactgcctcctgggacatggctgcagactgttctttataccaagtgtccaagtctcgatgcttcttctttattataagctcatattcttgtctcatatcctccaggaccttaatcagatcttccctgggacctgtatccaccttcacattgacattgaagtcacttnncacatgatgcttctccatttcctgctcatggtgcttcttcatgagaatgatctctttcctcattccttccacctcctgttctaagtctgttgtgacaatggtcatgttgtctaaggtccttcggaggcccttaacttcaatttccaagtctttcttaaaaggagtgttcattttcatacttg

SEQ ID NO: 42449 - DNA, 1497 bp, Oryza sativa
  Clone ID: PAT_MRT4530_456C.1
atggctactctcctcttctccttggccccgtcccctcgtctcctcctcccactccgccgcctcgatcccaaacccctactccgcccaaaacccctcctcctcctctccacggccatgggttccccggcgagggctcagccttcctcgtggcgcagcgcggggcggccgccgccgcagcagcagtggtcctgcgccacctgcacgctcgacaaccccggccactcccgcgcctgcgacgcctgcggcaactcgcgacccgtggaggtcgacggcgacgccgtcgccaaagcccagaccccaactctcccgaccatgtcgacccctccggcgagggcctcgacttcttcgggttgcggggcgggccggccgccgactgagcggaagtggtcctgcgccgcctgcacgctcgacaaccccggccactcccgcgcctgcgaggcgtgcggcaactctcgccccatggaggtagtcgccgtcgacgacgacgacgaggacgccctggacctgggcgccctcgccggcgcctcgttcctcccgctccagcggcactccatgaagagggagcgcgcggcgtcgccggaggtcgtgggagtgtgcgccgacgagggagacggcgccaagggcggggaggataagcccgccaagaagaaagcatgtgctgagattattttggataagaagaccttcaaaatcatgacatacaatgtctggtttcatgaggatttggaattgtgtagaaggatggatgctcttggggatcttattaagaaccacaaccctgaccttatatgcttccaggaggttacaccaaacatatatctgcttctacaaaaatctgactggtggcaagaataccgatgctcgctgtcgaatagcatggctatgcagcggaaatattactgcatgcagatgagcaaattgcctgttgagtcttttgactgcactccattttccaactcaataatgggaagagaactgtgtgtagcacatgtcaaaactggaggtgcagttaagctagtgctggccactagccaccttgagagtccaatgcctgggcctcctacttgggatcagatgtacagcacggaacgagttgctcaggcaaacaaatctctcaaaattttgggatccttccgcaatgtaatattttgtggcgatatgaactgggatgacaaaggagatgggcccttccccctaccagctggctggaccgatgcttggattgagttgaagccgggtgaagatggctggacttatgacacaaaagctaacagtatgctatcagccaaccgtaagttacagaagagattggaccgattcgtgtgcaagctggcagatttcaagattaacaacatccagatgatcgggaagaatgcgatacctggtctctcatatgtcaaggagaagaaggtccgcaaggaagttcgcaaactggaacttcctgtcttacccagtgaccactttggacttgttttgagcattactcttgaaagctga

SEQ ID NO: 42450 - DNA, 3086 bp, Oryza sativa
  Clone ID: PAT_MRT4530_45700C.1
acacacaaccgcccgaatcacttgcattgcatttcgttaagtctgcagcatatcagaacgcaagacaagtacatagccgctgtttcgccttcccatcttccaaggttcaatctttgtaacctcctaaaaagtcccaatcgttacaaagaatgtaacctagatgttgccctactctgaagtctgaaaaatggggtttcctatgaagatgagacttttcagcataaacaggagctaaagttcaccggtgacttggaagaatgtttcagccttggcaaaggcttgtaccccctcagcttgaagtgaaactttcttagtatttctcttcagactcacagccatctcttcgcctttgcagctgaattcaccgggggtggtgtcttggcacctcttttatcgctacctatatctgacttccctcctagagatgatctacgtgacatggtcgatggtggtggtgggagacctgttagtgattgtcttctccttaaccttaaatcaggtgtaattgaagatgggacatcattgtttgtgctattagcaattttagcaggagttgcttgtcctaaatgttgaacattccttctttcagagccatggatcaattttcctatgctgctttgaatggattttcttagatgtgatcctttcttcgttgcattactcgaggtcattttctccaatttggcagaagaagaaggttcatcggtctgaccaacttccaagttcaagttccttgatctacaaggtgttctcaggagagtatccaatcctgattgcttggacgaaatataagcatcagggtgtagtccacaaaagggaactgtgtccactgtagtaattattttctcggtctcctctctaactggatcttcagaggatgttgcagacatctgcattactgatccttggtgcatgatgtggtgattgaagccatcaatgctgtcatgaattgtagcatgatctctgttcaactttgtcactgaaagaggggactttggtccctttctgtcaggtatgctacctttgccaataccagtattctctaggcttaacctacgtggccttggtggggtgcgctccggtacttgttttgctctctccctcaccactgtattttcctttagtttaaatgatgatttttccagctctttggctgcaagtgccctcttgagattttctacctgctctttaagctcccttatttcattgctttctttgtttgcatgtgcagttccaagttcaacgcaagaagccctttgagcaaatttcaatgtgctaagagtttctacatatgaatctgcctccggacttatgtgggcaaacattagcgtcttcgcgtttccccctaatgaactctgcagcaattgggtgagtttgctatttctgtagggaatgtgagaattcttctgagctaaggccgtgataacatctcccaggcaggaaagtgacttgttaatgtgctgagcctccttcaacctgtctcctgtggcttccgacctatcaactctttcacttcctgcaagatctaccaaatgcaaactgctacgggttacattaccagacatgtccttcccattaacatggacagtcaagatatttacatcttccctagaagttgatgtcttgaagagatcgttcagagccatataactgattcccaaatcttgagatgacaacccaccagatggaccacacattgtatgagtttttccggaacctgtctgcccgtaagcaaatatgcatacgttatagccatccattaccgatctaatcaaatattgtgtctccttataaacctcatcttgagtagttgttggcccaaaaattttgttgaactggaatatcttacgtgtagtttgcggcttaagtggatcacagaccattattgagccatcatttccaatatgttcaatcgaagaaattgactctgagttaataagtggtcttatccggcagaatactcgaatatttcctcgcaattcttgaagcaagttatacaagcttttgttttctttcacagcttggttataaccaagagctgctttggaaagcccttgtacattatcacctaatttaatgatatcatcttgaaactgggtcttcaaagtcctaaagtcaattttaacctcttgaaacatagacttcagctccttgtatggtaatgtggatttcagaaacacagaataaaattcataatgtaacaaaagttcagattcctgtgcttgcaagaggcgccgtctattttcaacctgtgaatttgaactctcaataggtggacatgattcatttttcactgtaacaccttctggagaaaagagttgaagaagaggttcgaactgttccttttccagttgacgtgataaaatagttccaaccaacttatatggatcctttttcagagaatcattgtccaaattttctttacaacttatcatgcagtccaaaataaccttctgaagtctttccattgcctcttgacaattaggacccacattttgatttggttgtctctcggtatcagtctctaccaaatctagacgttttggggtggaagaagatccggaacaaacatattcagactgaacatgacttgcagaacgtgttgcaagaggtgatttcaagtgcttgaggtgcccataacttcctccccgttgcctccactcatgataagacttcaaggaaatgacacaatcgacaatcttgcctactgacccagcatcaatattgtccttttccaaatcagaggcctcaaagcatggaagcttcagctcttgaacagcaaccaagaagttccggatgttctcaaaatactggaaagccgtcgatggctggctatcacaggaggcattagccacgacctttggcacagcgcctggttgtattttgttaattgccttgcataggacaatgccattccttacagcggcaacaaattcttgctccgatgggcaccgggagaggccgaagggccctatcacgctctcaagccaggttgcagcctggtgccgtctcaatgcagcctcctccgccttccgcgacgcgaggcggccgtcgcggaacgacaccctccgcggctccgccgccat

SEQ ID NO: 42451 - DNA, 211 bp, Oryza sativa
  Clone ID: PAT_MRT4530_45701C.1
ccaggggtacccccgggttacacagcgtaaaatgttcgcgcggggggttcttgaaaccccacccgactgttcccggggataaccgttttgtgtaacaagtctccaagctagttgaaattaggtgcttttcgatgtggccacttgtggagacctaggcctttcattgacgccaataccctcacaggagacacctttgtactgaccgaattta

SEQ ID NO: 42452 - DNA, 452 bp, Oryza sativa
  unsure (1)..(452): unsure at all n locations
  Clone ID: PAT_MRT4530_45702C.1
tcctcggctcctcgcgcaggagcactggcacggacagtgacatcgtcttcccttcacctcctcgtccttccctctcgtggcatcgcatcgcatcgtgtcctctgcgactgcgagagtgcgtgtgtgcagcgcgcgctcgtcgagacagacagcagcagcagttgctctttaatgccggtgccttgctgaacagagcaaggtctctccaatggccttgaggcattcaatgcgcccgtaatccatctcttgaacggccgtgtgtgtgttcttggcgtgttggtgtgcgtggattgggtgggtgaggaggatgaactatctcaggagccggagcctcaagcggcttcctgtctctcggtcgccggagcaacaattccgatgagtccaatgacgagtgcgtcttcgtcgtcgacccagccgccgncgtcggacaagcctactttgagggtgcttct

SEQ ID NO: 42453 - DNA, 624 bp, Oryza sativa
  Clone ID: PAT_MRT4530_45703C.1
gggggaaaaaaatcaagcgattttcaattgataatagacagtcgcacaccacttctgagttcttacatgcatatcctaatggcatagattggccgatcgctgatggcagtttaagcatacacaaggacaaactataactacactaaatgaatgacataacatgaactaattttttgatttaattagattaacattctcattttcagcctatgcttgctgccgatgttgttggctgactgcttcttcatgctgaagtagcaatggtagctctgcaacgccctgctcactgaacacccaacgtccgtgcgtaaagactggattttcttttgttagttcctgagatcttgtcaggtttcagaataaagcatttgctagtaagttcagttgatgccagctactgaagtttctaaattcatcacctttagctcaatctcacctctgatgaaacaaggggtggcttcataagctgcttgccctctgcacgcaaccgctatggaaccacgacagtgtgttccgtcacctgttactgtgtctcattctggaactgaatctggcaaggggggtagtactttggtcagatatttgaacctcagacctgcacccacgcgtccgcccacgcgtccg

SEQ ID NO: 42454 - DNA, 4018 bp, Oryza sativa
  Clone ID: PAT_MRT4530_45704C.1
atgtgggcagaacaagattagtcacttgatcatctcggtttgcgaatagcactggtcaatctcttgaaaaaaaacggagtaggagtcccttaaaatgttgactttcatagacgaaatttaaaattgcactgatgcaaatccaatctcaatacactattcttgggaagacaccaaggtcagctcattcactcagtctcaaactaatggcaactgtcagattgaatctcatttcgtagtttcctttttggcgtcaaataaggggggtgaagatcacacattgaaaaccaacagctgacgacaattagaggttctttttaaaactggggaaaggccaccttacccagataccctgcgccggttatttggatgccgcctttgcctgatttgccgcaactgacatggcacggagtcgtccagctatctctgtgaatgctgggcgttgtgatggatctggggcccagcactgctccataagccttctccactctggatcacatgacgctggcacaggtggcctcaatgtgttgtttacaattcccccaataattgcgccataatgcatattggcatagggttcttctccagtaagtatttcccacataacaatgccaaaggaaaatacatcaaccttttcagacaccttattgctgctaccattgagtaattcgggtgccatccatgggagagtccccctcacaccacctgaaaccagggtgtttctttttattttggataggccaaaatcaccaactttacatataggacgagattgatctttaagattcaccagcaagttatcacacttcagatcaaagtgcacgatatttttcgagtgcaaatactccagcccaaatgctgcatccattgctatgataagccgcttacgacgatcaaggtacttgtccttgcgctgcaagacatgccgaagagaaccattaaccatgaactcagttacggttgccaaggtaccaccagggccatctttcacaacaccatagaaggccacaacatttggatggtgaagcttagagagaatttcagcttcccgccagaattcatttgccagtctttctagctccgaagatcgtcctgtaaagcagcttttctttattctcttaatagccacatcacttcccctccattttccatgatacacagtgccaaatgttccagaaccaagttccctaagttcttcaaggtcttcattcttgatgatctgcaagtattcaaaattattatctttaaaagaggcatccatgactggtccaacagctttgccctcctcaaattttggctcctcaaactcaggaacagatggcatcatctcgtgcatattagtataaggattgtcaacctgaaacccttcaacattctttgtcataggtgggttgtcctgtgatgagatgaaacctggaggcaaaatactagaatcaagattgatgccagaagatactggataagtttccagatgaacatcattctgaggagccacattcttcacgttaactgcatcatgctctgcatgtaccaaaggataaactccctcctcgatctttgccaggtcttgctccttatttttatgttcaaattcattttgtgcaaggtttctgaagaatgaccatctctgaggttcataattatgcatgttcaagctaagtacaggttcattgaaagggcttaatgattgtgctgcagtgttggcgaagaaatcagaaagaatgtcaggggaggtcctctcactcataccaccaacaatgtccttattatcctttttagggataattggttccttgtgagaatcatctaaagaactggtggaaggtacaaatggatcacaaccaacatcagttgggattgcaggattgggggtgtcccaactaacatgatgtggcacagcagaatgatccgcctgctgattgactatttttgtgccatcagaagttgcatcattcagattacatttagctacagcattttccgctgcatgcatatttttctctacatttcttgtactcatgtcagttgaggacctcttttcaccaagcagttgttcactaaatgtgctagtctgttgtacagtattggcacattctttctcaggtgtgacactatcaacagtagctggatcattcagatttattgcccgagcatctaaatttgatttttcagtcccctcaattgcaggatcagaagcttctgcaatggattcctttgccacaccagactgtgactgaagaattagaaactgagaattaagtgaatcatcagatttagataaccggtttagcgacccggcctgctccctaggtatccgctcagaatgaaaaacccttccagagtgaggtggcggattcttattgctgtggtccatcatgtcaacttgaaagtcagagcagccagatgcaaaagctccactagagtggcgatcatcttcattacactctgaatcttgagcagcagacatagcttttgatgctgtataagtctctaggctctttgcactgtcacttggttgaagagaagatttcaggccttcttgaatggaagttgtaactgggacatctgaattcatatagtttgtactagaagagtcatggtgaatcacaggaacactcatattctcaagggattggaaataatctagatcattcttttgaagtggcactctaacagaaggctgtttttcctccttcattgatccttccatcatactatcatggtaagattgttggtcgaaagattgcagtgaagtagttcctgagtacggtgtgcactgagaagtatatctataaccagaaggtacagataaaggaatagatgtctggccctcaatgtcataaaatctttcactggaagctgggagggagtaatcagagccctgaacatgctgcatcccatggctatggtaaggatacaaatttgcagtactgtcactggagagggtcactggtaatggtactgaaatcaaagcaggagggacagcagttgatgcactcatgctatacaaatttgaaccatctctacttgaatttggttggttactatcgttgttgagattaatgaactgatccaactcattgatggacgtgtttcctaaaccatgcccacttgaaggctttgtagttcccacatccataccattgatggcaacaacatactggatcccagaatcactatccatactgcccaggctgaaactcatgtcatcgaaatcaatggaagaaacaaggaagatcctaagcttctgggacccctccccattgtcaagaaaaccacattcctccatcatgtttctcaaatcttcatcatttgagactgagatcaacgcatcaagatcttcacctggtagctgatacttgataacgtggggttgattatagatagctgttgtcttctgtttgagctcctgccaagaaatgttcctactgattcgaataatatgtgtctcaccaccaacatacctaagctttccatcacttggtcggggtaatatttttcccccaaagctacagagaatttttatccttctggaggagtctgaagactcagaagaagcatagccatgggacagtctctgactacttccactgcgagatgggattcgtggaactgagctagttgacacatgcctgcttctgttttcattttcagcaaaagattttctttcaatcccctctgtttgctggatatcagtagtcaaaaatattgcggcatcaaatctactctctgcacctgttcgatgagcaccgaggagtcctctaggatctttgagaccagcaccagatgcaacattttgatcatgagacatgccagaaaccagatgcttcttaggtatagctcgatctctcatgaattcaagagcaaactcctccccagtctggattgaataattaaggacaggcttaacagagcccgaaatagggtagtctggaactggagaactggtaggtgctgagctcgaggatccatggatggtactttgagctgcagagcgaacatcatctcttctaggttccat

SEQ ID NO: 42455 - DNA, 678 bp, Oryza sativa
  Clone ID: PAT_MRT4530_45705C.1
ctatcctacccctgtgctgcttcgccacaatccatcgggtcgacgatgatgcagcaggcggagctgcacgcgctctggcaatgtcaggtcgaggtcgtcgtccagcaccgccgccgtgagccttgcgtccacctccctccacggggcaaccaagacgaggcgccctcgtcccccacgctcgaggccgagggtcgtcagcgtcccggagccgagcgccgccgcaaccaccagctcgtacggccgagaatccgacgggtctttctgcacggccgccttgtaccgccgtagtgcgtcgtcgaggtccccatctcgggcggcgaggaaggtgaggacgaggttgacgtcgaccgccgcgaggtcgtcgccctccgccttggcgtcggcaagggcgtgctcggcggtggcgcgcgcctctcggagtcgctcgccgcagagcggccgcgctcggagcagcgaggcgagcatcgcttgggagcattccacggggatcaccaactgctggtacggaggaggaggcggcggcatcgaccaaaagcactcgtacggaagcggcagtacttcctcaaaattcatgacgagcactgcctcggcgaacttggtcgctacaatcatgaccatcctgtcgacggcggcgaggacccgggcatggcgaacacgacctcgaatgccagcctccat

SEQ ID NO: 42456 - DNA, 2607 bp, Oryza sativa
  Clone ID: PAT_MRT4530_45706C.1
atggcttcgccggcgtcggtcgccggcggtggtgaggatagcaatggctgcagcagcctcatcgacccgctgctagtgagccgcacgagcagcatcggcggcgcggagaggaaggcggccggcggcggcggcggcggcgccaaggggaagcactgggccgccgccgataagggggagcggcgcgcggcgaaggagtgcggcggcgaggacggccgccggccgctgctgttcaggtcgtacagggtcaagggctccctcctgcacccgtacagggctctgatctttgcacgcttgattgccgttctcctcttcttcggatggcggatcaggcacaataattctgacataatgtggttctggacaatgtcagtcgccggtgatgtttggtttggtttttcatggctacttaaccaactcccaaagttcaatccggtcaaaaccatacctgaccttactgccctaaggcagtactgtgatctcgccgacggaagctacagacttcccggcatcgatgttttcgtcaccaccgctgatccaatcgacgaaccggttctatacaccatgaattgtgttctctctattcttgcggctgactaccctgttgataggtcagcctgctatctctctgatgatagtggagcattgatcctatatgaagcattggttgagacagccaaatttgctactctatgggttccattttgccggaagcattgcattgagcctagatccccagagagctactttgagcttgaggcaccatcgtatactggaagtgcaccagaggagttcaagaatgactctaggattgtgcatcttgagtatgatgagttcaaggtgcgattggaagcacttcctgagactattcgtaaacgatcagatgtttacaatagtatgaaaactgatcaaggagcaccaaatgcgacttggatggctaatgggacccaatggccaggcacgtggattgagccaatagaaaatcacaggaaaggacaccatgctggaattgttaaggttgtgttggaccatcccatccgtggccacaatcttagcctgaaggatagcacgggcaacaatcttaattttaatgccactgatgtgcgcatcccgatgcttgtctatgtgtctcgtggaaagaacccaaattatgatcataataagaaggcgggtgcattaaatgcgcaacttcgtgcctctgctctactctccaatgcacaattcatcatcaactttgattgtgatcactacatcaacaattctcaagccttccgtgcagcaatttgtttcatgcttgaccaaagagaaggtgataatactgcctttgttcagttcccacaacgctttgacaatgttgacccaaaagaccgatatggcaatcataatcgtgtattctttgatggcacaatgcttgccctaaatggtctccaaggaccttcataccttggtactggttgcatgttccgtcgcttagctctctatggtattgatcctcctcattggagacaagacaacatcacacctgaagctagcaagtttggtaactccatactcttattagagtcagtgttagaagccctaaaccaagaccgatttgctacaccatcaccggtcaatgacatatttgtcaatgagctggagatggttgtgtcagcttcattcgacaaagaaaccgattggggcaagggtgttggatacatatatgacatagccacagaagatatagtcacgggttttcgcatccatgggcaaggttggcgatccatgtattgcaccatggagcatgatgcattctgtggcactgcacctataaatctaacagaacgtcttcaccaaattgtacgttggtctggtggatccctagagatgttcttctcccacaataacccacttattggaggtcgtcggctccaacctctccagcgtgtctcatacctcaatatgacaatctacccggtgacatcactctttattttactctatgctatcagccctgtgatgtggcttatccccgatgaagtatatattcagaggccattcactaggtatgtggtgtaccttctcgtgatcattttgatgattcatatgatcggatggctcgagataaagtgggcagggatcacatggttagattattggcgcaatgagcagttcttcatgatcggctcaacgagtgcttacccaacagctgtgcttcatatggtggtcaatcttctcacaaagaagggtatacattttagagtcacttcaaagcaaacaaccgctgacaccaacgataaatttgctgacttatatgagatgagatgggttcccatgttaatcccaacaatggtagttttagttgctaatatcggtgccattggtgtagctattggaaagacggcagtatatatgggagtatggacgatagcacagaagagacatgctgcaatgggactcctattcaacatgtgggttatgtttctcctttacccatttgcactagcaatcatggggagatgggcaaagaggtcaatcattcttgttgttttgttgccaattatctttgtaattgttgcccttgtatatgttgctacccatatcttactagcaaacattattccattctag

SEQ ID NO: 42457 - DNA, 1125 bp, Oryza sativa
  Clone ID: PAT_MRT4530_45707C.1
atggttcgctacgctacatacattcgtcagctgggtttcacgccatcggcctccgacacatcgctcttcatcctccgggacggtgatcgcctcgcctacctgctgctctacgtcgacgacatcatcctcacggcctcctccgctgagcttcttcgccacatcacggctcggttgcacaccgagttcgccatgacggatcttggtgacctccacttcttcctcggcatctccgtctgtcgcacacccgacggcctcttcctgtcccagctacagtacgccgtcgatctcctgcagcgagccggcatgtctgaatgccaccccaccgccaccccagtcgatactcgcgccaagctctccgcctcggagggtgcccccgttgccgatcctactgagtacaagagcctcgccggtgccctccagtatctcaccctcacccgtcctaagatcgcctatgccgttcaacaaggctcactctccgccggcctccacatcggcaccggtccggtcgggtctctgaccgcctactccgacgcagactgggccggctgccccgactctcgtcgctccacctcaggctactgcatcttcctcggtgataacctggagttgcatgctcccatctccaccacgaccattgtcttttgcaacaacgtcagtgctatctacatgaccgccaacccggttcgccaccgccgcaccaagcacattgagatcgacatccactttgttcgggaaaaggtggctctgggacaggtccgtgtgctccatgttccatctacgcatcagttcgccgatatcatgaccaagggcttgcctgtgcagttatttacagattttcgatccagcctttgcatccgtgatcctcccgctgtgactgcgggcggtgattttgacccaattttatccaacgttacggctgagccggacggcgagtggagaggaggccgcggggtgaggcgggagagcaggagggtgtcgacggccgacgacgggcgaccggcggtggcggcgacgcgggagaaggggagacggcagttgcggaggagggcgtcggcggccaacgacaggagaaggggaggaggtgactgccaccatggcctcgccctccttgacgagttcccctag

SEQ ID NO: 42458 - DNA, 1440 bp, Oryza sativa
  Clone ID: PAT_MRT4530_45708C.1
atggtgacacgctccaagaccggttctctcaagccagtggaccgactcgtgctctcggcatcccacagcgccatttctccactgccggccaactaccgctctgcccttgccgaccccaactggcgtgcagccatggccgaagagttcaaggctttgatcgacaatggcacgtggcggctcgtccctcgtccacctggtgcaaacgtcgttaccggcaagtggatcttcaagcacaagttccactccaatggctcgctcgcccgtcacaaggcacgttgggttgttcgtggctactcccaacaacatggcatcgactacgacgagaccttcagccccgtcgtcaagccctctaccattcgtgtcgtcctcagcatcgccacctcccgctcctggccgattcatcaacttgatgtgaagaacgctttcctccacggcaccctcgatgagacggtgtattgccagcagccgtccggcttcatcgaccccgctgctcccaatgctgtgtgcctcctccagcgctccctctacggcctcaagcaagcgcctcgggcttggtaccaacggttcgctacatacatttgtcagctgggtttcacgccatcggcctccgacacatcgctcttcatcctccaggacggtgatcgcctcgcctacctgctgctctacgtcgacgacatcatcctcacggcctcctccactgagcttcttcgccacatcacggctcggttgcacaccgagttcgccatgaaggatcttggtgacctccacttcttcctcggcatctccctctccgcctcggagggtgcccccgtcgccgatcctactgagtacaggagcctcgccggtgccctccagtatctcaccctcacccgtcctgagatcgcctatgccgttcaacagggctcactctccgccagcctccacatcggcaccggtccggtcgggtctctgaccgcctactccgacgcagactgggccggctgccccgactctcatcgctccacctcaggctactacatcttcctcggcgataacctggtgtcttggtcctccaagcgacagacgacggtctcccgctctagtgccgaagcggagtatcgtgccgttgctcacatggttgccgagtgctgttggctctgccagctactccaggagttgcatgctcccatctccaccgcgaccgttgtcttctgcgacaacgtcagtgctgtctacatgaccgccaacccggttcaccaccgccgcaccaagcacattgagatcgacatcctctttgttcgggaaaaggtggctctgggacaggtccgtgtgctccatgttccatctacgcatcagttcgccgatatcatgaccaagggcttgcctgtgcagatatttacagattttcgatccagcctttacgtccgtgatcctcctgctgcgactgcgggcgggtattag

SEQ ID NO: 42459 - DNA, 1464 bp, Oryza sativa
  unsure (1)..(1464): unsure at all n locations
  Clone ID: PAT_MRT4530_45709C.1
atgggacanggccgngcactggtacgggactactgcccatatacttccccacagaacggcaaggccgaaagcatgattcgcaccctcaacaactctgtctgcaccctctcctacaagccttcatgccaccctcctattgggccgaagggtgctactgctccttctgtggtcgctccaccactggctggtgttgagcagccgcacgctccattccctgtgaacgtcgagcagcggctgcccacggccggctgccgcgtctccatcttcctcaaggagggcgccgtcgtcaccagctgtccggccgccacatctttttcacgaccagccggcacgttggagccattcccgtaccactaccaacgacgactggcgctgactcctccgccccaagtcgtggctccggctgcacccgcaccttcttcacaagtccacaccatggttacgcgctccaagaccggttctctcaagccagtggatcgactcgtgctctcggtgtcccacaacgccatttctccactgtcggccaactaccgctctgccctcgccgaccccaactggcgtgctgccatggccgaagagttcaaggctttgatcgataacggcacgtggcgcctcgtccctcgcccacctggcgcaaacgtcgttaccggcaagtggatcttcaagcacaagttccactccgatggctcgctcgcccgtcacaaggcaagatgggttgttcgtggctactcccagcaacacgacatcgactacaacgagaccttcagccccgtcgtcaagccctctaccattcgtgtcgtcctcagcatcaccacctcccgctcctggccgattaatcaacttgatgtgaagaacgcctttctccacggcaccctcgatgagacgctgggtttcatgccatcggccttcgacacatcgctcttcatcttccgggacggtgatcgcctcgcctacctgttgctctacgtcgacgacatcatcctcacggcctcctctgctgatcttcttcgccacatcacggctcggctgcacaatgagttcgccatgacggatcttggtgacctccatttcttcctcggcatctctatccgccgcacacccaacggcctcttcctgtcccagcgatacctccacatcggtaccggtccggtcgggtctctgatcgcctactccgacgcagattgggccggctgccccgactcgtcgctccacctccggctactgcatcttcctcggcgacaacctggtgtcttggagctgcatgctcccatctccaccgcgaccgtcgtcttttgtgacaacgtcagtgctgtctacatgaccgccaacccgattcaccaccccacaccaacctttgcgtccgtgagcctcccgctgcgactgcgggcgggtattaggaatactttgccatatatgtacagattgtattgtattgtctctttccttgtattctcctctaattga

SEQ ID NO: 42460 - DNA, 423 bp, Oryza sativa
  Clone ID: PAT_MRT4530_4570C.1
tcggtcctgtcaagggaggatccactgcgattgcctctgcacaggatcctgacgattacatgtaagaccttattcatatacattcaacacctgatactatatgacaagttatgcttcgtcgtgtatgacataaatcgctccatcaagttatattacatggacctcgttatgaagctggtgatgaagaccgaagcacactgactataacatataccattgccaaggagggctattctgatgaggataatacaactggtactgagtggacataaaactatcgccctacatattataccaacaactacacatattctcaagtttttattgcctctgaagaggcaataaaaacctcagaagatgccgagccgttgacatattatgtaacaccatagatgtatgtgaactcaataacagtagcattat

SEQ ID NO: 42461 - DNA, 348 bp, Oryza sativa
  Clone ID: PAT_MRT4530_45710C.1
cgacgcatagctatgctgccatcaacaagaattctggtgagagcaaagccgtccaaatgactcgacaagatggaatccttaagaagcaaggtaaagaatcatggcacaagctctggagagcacatccaacgatatcatccatgctcgctcccggcgactgcgagctcactaaccaccacagcctatgcccagagcggtacaaaagagagactaatcacacgaggatgatcctgatcctgcatcatgcgccacgtctccacctacatgttgtatatgttgaatgactacaagaagcctgagccttccatcaagagaaacttcggcttgttctacccaaatgcataaaag

SEQ ID NO: 42462 - DNA, 5445 bp, Oryza sativa
  Clone ID: PAT_MRT4530_45711C.1
atggccgaacgggcagtggcgcacaatctctctccgagcgctagcggtgacgacggggagcagaacctgcgccgtcgagctcgtactccactgtccccctctcgccgaagtcttgggcgggaggaggcgctcgaggaggtcgaaagatccgcgacttcgccgcacgcgggcgatggagaaggacgtcgagacggggagcgtcgtctcctcgtctacggtgatggcagcacgccccagggcgcgctccaggctgcgggcgcgctcctgcgtcacccgcccgtcatccctgatccagagacttcaacccgacgttggctagatgacgtggccaatttgctcatgacggcgcagcagcgcctaggcgccgactggcggtcctccgccaccaaggccactggcgttgctactgctggctccgtgtcgtcgaggcggagggcgcggcgagcggcggccgttacccgccgttcgtccgccattccctcgtcaacgcctccaacccaagaagatgtgcgtagggggccagatgcccgcttcaatatcgagcgccggcgcaatgatcgccgtgctgccaacgcatcggagggcgcttcctcgtccggagcgccacttcggtccgggcacgggggccagccccccgtgtccccggttggcggtgccggctgtcgagcctttgtggcgagccttcggaacgtccgttggcccccaaggttccggcccaccatcaccgaaaaatacgacggaagcgtcaaccccgccgagttcctccagatctacacgactgggatcgaggccgccgggggtgacgacagggtcatggcgaatttcttccccatggccctgaaaggacaggcgcggggttggctaatgaacttgccacccgcgtcggtgcactcttgggaggatttgtgccagcagttcaccatgaacttccagggcacatatccgcgcccaggtgaagaagcggacttgcacgtggtacagcgaggggacgatgagtctcttcgctcgtacattcagcggttttgtcaagtccgcaacactatactgtgcatccctgcacacgcggtgatctacgcgtttagggggggcgtgcggcacaaccgcatgctcgagaagatcgcctccaaggagccccagaccaccgcggagctttttcagctcgcggaccgtgtggctcgcaaggaggaggcctggacctggaactcctccggttccggtgtggcagctccggccgcccccgggcccgctgctcggtcagggcggcgggacaggaggaggaagaagaggtcggcccattccgacgacgagggtcacgtcctcgccgtcgagggcgcttcgcgggccacccgaaaggggaggcctgcgagcgacaaaaagaaggaggccggcgctcccagtagggagcgcccgaccggcaagtggtgcaccgtgcacaacacctccctccacgacctcgtggactgccgcgcggtcaaaagtttggctgagcggacgaggaagtgggaggaggagaggaggcaggagcgccgtgagggcaataccccggcggctcccgccggcaaccggcgaggtgaggccaagcagaaggcccccgccgaggacatcaacgatggcgacgatgacctagggttccaggagcctgaggccaccgtcgccaccgttgatgggggagcgtgtgctcacgcttctcgccggagcctcaaggccatgaagcgagagcttctggccgtggcccctacccatgaggcgacgcggcgggcgcggtggtcggaggttgccctcaccttcgatcagaccgaccacccaccgtgcgttgcccggggaggacagatcgcgatggtggtttcccccaccgtttgcaatgtgaagttggggcgtgtcctcattgacgggggtgcagccctcaatatcctttcccccgctgcctttgacgccattaaggccccggggatggtgctccggtcgtcccagccgatcatcggtgtgacgccggggcacacttggccgctaggccatatcgacctcccggtcaccttcggtggttccgccaacttccgcacggagcgggtgaacttcgatgtggcggacctcagtctaccctacaacgcggtcctggggaggcccgcgttggtgaagttcatggtggcggtccactacgcctatctccagatgaagatgccgggccccggtggccccatcaccgtccatggcgacctcaaagtcgcgcttgcttgcatggagcagcgcgcggaccacctcgccacggcatccaagcccacgggtggcgacgagaagctcagcacctccgtcccagccgccccgaggcagcggatgatcacgtgcgacgaggtccagatcaagcaggaagacgcgctcgtctccttcctgcgggcaaacgccgacgtcttcgcctggagaccggcggacatgcccggggtccccaaggaggtgattgagcaccgtctcgccgtacggccgggcgcaaggccggtcctgcagaaggtgcggcggcaggccccggaacgtcaagccttcatccgcgaggaggtggcgcgacttctggaggccggattcatccgagaggtcatccatccggagtggctggcgaacccggtcgtcgttcccaaggcgaacggcaagcttcggatgtgcatcgactacaccgaccttaacaaggcatgtcctaaggacccttaccccctgccacgcatagatcagattgtcgactccaccgcggggtggtcagcgcggcgttggtcgtggagcgcgacgaggacgaccctcgctccgcgcatccccaccctgtgtcgactcgacccgggagagagcagggaggagaggcccccgacgaccgaagctggccctctgcccgcttgtccgacggtgccaggcgcccccgacccccaggatggccccggggccactgcgggaaggccgcgcctgtcgccctctgaccccgaggtcgtcggcacagaagccgagtgcgccccgcgcggcctctcggacgaagagcaccctgtatcgactcgacccgggagagagcagggaggagaggcccccgagccgaacggcggcccgaggcccccgacgaccggagctggccctctgcccgcttgtccgacggtgccagaagcccccgacccccaggatggccccagggccactgcgggaaggccgcgcctgtcgccttccgaccccgaggtcgtcgacacagaagccgagtgcgccccgcgcggcctctcggacgaaaagcgccctggagatgcggcccctagcgaagaggatcggccccgccaaaaggtgcagcggcccgtctactttgttagtgaggccctccgggacgccaagacccgataccctcaggcccagaagatgctttacgctattctgatggcttcgaggaagttgcgccattatttccaggcgcgtcaggtcacggtggttacgtcctacccgctcggccaaatcttgcataaccgagaaggtactggacgggtggtgaaatgggcaatcgaactctctgagttcgatttgcactttgaaccacgccacgcgatcaagagccaggccctcgccgactttgtggcagagtggacaccggctcccgagcccgtctccatccccgaggccagctcgggcccttcgcagctgcctcacaccgcctattgggtgatgcagttcgacggctccctgtctcttcagggcgccggtgcgggggtcacgttgacctcgccgagcggagatgtccttaaatacctggtccgccttgactttcgggcaaccaacaatatggcagagtacgagggactccttgcgggactcagagtggcggctggactggggatccgccgcctcctggtgttaggcgactctcagttggtcgttaaccaggtctccaaggagtaccagtgctctaacccgcagatggatgcttacgtgcgccaggtgcggcgtatggagcgccattttgacgggatagagctttggcacgtgcccagacgggataacgcggtcgccgacgaactctcaaggctcgcttcctcgcgagcccagaccccaccgagcgcctttgaagaaaggcttgcccagccgtcggcgcgacccgaccccctaggggagacggacgcgcctgaacggcccccgaggcccgtcggagtccaggcctcgggacccgaggggagcgctcccagctcccttagattgattgcttggatcgctgagatccaggcgtacctcgcagataagactctacccgaggaccacgaagggagtgaacgcgtccagcgcatctccaagcgctacgtgctggtggaagggaccctctatcggcacgcggctaacggagtcctcctgaagtgcattcctcgggaacaaggcgtcgagcttcttgccgatatccatgaaggcgagtgcggagcccactctgcctcacgcaccttggttggcaaggcctttcgccagggtttctattggccgacggctctcaacgatgcggtcgacttggtccggcggtgcagggcgtgccagttccacgccaagcaaacccatcagccggcccaggccctgcagaccatacctctttcatggccgtttgctgtctgggggctcgatatcctgggtccatttagacgggccccgggcgggttcgagtatctgtatgtcgctatcgacaagttcactaagtggcccgaggcttatccggtcatcaagatcgataagcactccgcacttaaattcatcaggggtatcactgctcggtttggggtgcctaaccgtatcattacggataacggcacccagttcactagtgagctcttcggtgactactgcgaagacatgggcattaagctctgcttcgcctctcccgcccaccccagaagcaatggccaagtggagcgcgccaacgcagaaatcctcaagggcctcaaaaccaagaccttcaacatcctcaagaagcacggcgactcgtggatcgaggagctgccagcggtgctctgggcgaaccgaaccacgccaagccgagcaaccggggaaacgcctttcttcctcgtctacggcgcggaggcggttctcccatccgagctcaccctgaggtcccctcgggccaccatgtactgcgaggctgatcaagatcagcttcgcagagatgacctcgactacttggaagaacgaaggcggcgcgcggcccttcgagccgcgcgctaccagcagagcctgcggcgctaccatcagcgtcacgtccgggcccaatcactctgcgtcgatgacctcgtcctacgccgcgtccaaacgcgtgctggactgagcaagctctcaccaatgtgggagggtccgtatcgagtgatcggcgtctcccggccgggctccgttcggctggccacgggcgacggcacagagctgcctaacccgtggaacatcgaacaccttcgtcgcttctacccctag

SEQ ID NO: 42463 - DNA, 895 bp, Oryza sativa
  Clone ID: PAT_MRT4530_45712C.1
cacatcaacaataaattgcaaatcaaatatagccccgacggcctcttcctgtcccagcgacagtacgccatcgatcttctgcagcgagccggcatgtttgaatgccacccaactgccaacccggttgatgctcgcgccaagctctccgcctaggagggtgcccccgtcgccgatcctactgagtacaggagcctcgccggtgcgctccagtatctcactctcacccgtcctgagatcgcctatgtcgttcaacaggtctcttcatgcatgaccctcgcgagcctcacctcgccttggttaaacgcatcctgcgctacatcaagggctcactctctgccggcctccacatcggcaccgtccggtcggttctctgactgactactccgacgccgactgggccagctgccccgactctcgtcgctccacctccggctactacatcttcctcggcgataacctggtgtcttagtcctccaagcgacagacgacggtctcatgctccagtgccgaagcgaagtatcgtgccgttgctcacgcggttgccgagtaatgttggctccaccagctactccaggagttgcatgctcccatctccactgcgactgttgtcttctgcgacaatgtcagtgctgtctacatgaccaccaacccggttcaccattgccgcaccaagcacattgagatcgacatcctttttgttcgggaaaaggtggctctgggataggtccgtgtgctccatgttccgtctacacaccagttcgccgatatcatgaccaaaggcttgccagtgcagttatttacagattttcggtccagcctttgcatccgtgagcctctcgctgcgactgcgggtgggtattaggaatactttgccatatatgtacagattgtattg

SEQ ID NO: 42464 - DNA, 638 bp, Oryza sativa
  Clone ID: PAT_MRT4530_45713C.1
caaaaggtgcttcaatatggatattatcaaatagacgcgctagcaatgaaatgggtaaatggttataagatcaccaaaagcaatcagaattactcgccagtgcaggctcattattatctaataaaaatgaacattatcttaatcaaaccgtattggatttacagttttctcattcacaacgttcgggttatgaattaggttcaaccgtattatctacctttaaaaagttactccacttgctaaaaaaacgcctcaacacgcaagtttaagcgtcttacgttcgccagatatcacctcaattttagtcgaaacggggtttttatctaatgcaattgaagaaaaacaactcgccagctctatttatcgacgcaaaatcgcacaagctatttataaaggcttaaatacttattttaaaccgtcgcctaaaaaagatagcgcccaaaaatcaacttcaacaacccaatcaacagcaacggccaacaaagaaaatggtaaattgaacaatggctatcacattgtgcaaaaaaatgaaacgctttattcgtgtgcccgtttatataacaccacaccagataaattgagtaaattaaataaaatccaaaacaatcatattgttgtcggcaaaaaattaaaaattc

SEQ ID NO: 42465 - DNA, 5619 bp, Oryza sativa
  Clone ID: PAT_MRT4530_45714C.1
atggccgaacgggcagtggcgcacaacctctctccgagcgctagcggtgacgacagcgagcagaacccgcgtcgtcgagctcgtactccaccgcccccctctcgccgaagtcttaggcgggaggaggcgctcgagggggacgaaagatccgcgacttcgccgcccacgagcgatggagaaggacggcgagacggggagcgtcgcctcctcgtctacggcgatggcagcacgccccagggcgcgctccaggctgcgggcgcgctcctacgtcacccgcccgtcgtccctgatccagagactccaacccgacgttggctagatgatgtggccaacttggtcatgacggcgcagcagcgcctaggcgccggcgggcggtcctccgccaccaaggccactagcgctgctactgccggctccgtgtcgtcgaggcggagggcgcggcgagcggcggccgttacccaccgttcgtccgccattcccttgtcaatgcctccgacccaagaagatgtgcgtgaggggccggatgcccgcctcaatatcgagcgccggcgcaatgatcgccgtgctgcccacgcatcggagggcgcttcctcgtccggagcgccacttcggtccgggcgcgggggccagccccccgtgtccccggttggcggtgccggctgtcgagcctttgtggcgagccttcggaacgtccgttggcccccaaggttccggcccaccatcaccgaaaaatacgacggaagcgtcaaccccgccgagtttctccagatctacacgactgggatcgaggccgccgggggtgacgacagggtcatggcgaatttcttccccatagccctgaaaggacaggcgcggggttggctaatgaacttgccacccgcgtcggtccactcttgcgaggatttgtgccagcagttcaccatgaacttccagggcacatatccgcgcccaggtaaagaagcggacttacacgcggtacagcgaggggacgatgagtctcttcgctcgtacattcagcggttttgtcaagtccgcaacaccataccgtgcatccctgcacacgcggtgatctacgcgttcagggggggcgtgcgacacaaccgcatgctcgagaagatcgcctccaaggagccccagaccactgcggagctttttcagctcgcggaccgtgtggctcgcaaggaggaggcatggacctggaactcctccggttccggtgtggaagctccggccgcccccgggcccgctgctcggtcagggcgacgggacaggaggaggaagaagagatcggcccattccgacgacgagggtcacgtcctcgccgtcgagggcgcttcgcgggccacccgaaaggggaggcctgcgagcgacaaaaagaaggaggccggcgctcccagtagggagcgcccgaccggcaagtggtgcaccgtgcacaacacctccctccacgacctcgcggactgccgtgcggtcaaaagtttggctgagcggacaaggaagtgggaggaggagaggaggcaggagcgccgtgagagcaaggccccggcggctccctccggcaaccggcgaagtgaggccaagcagaaggcccccgccgaggatattgacgatggcgacgatgacctagggttccaggagcctggggccaccatcgccaccgtcgatgggggagcatgcgctcacgcttctcgtcggagcctcaaggccatgaagcgagagcttctggccgcggcccctacccatgaggcgatgcggcgggcgcggtggtcggaggttgccctcaccttcgaccagaccgaccacccgccgtgcgttgcccggggaggacagatcgcgatggtggtttcccgcaccgtttgcaacgtgaagttggggcgtgtcctcatagatgggggtgcagccctcaacatcctttcccccgtagcctttgatgccatcaaggccccggggatggtgctccggccgtcccagccgatcatcggtgtgacgccggggcacacttggccgctaggtcatatcgacctcccggtcaccttcggcggttccgccaacttccgcacggagcgggtgaacttcgatgtggcggacctcagtctgccctacaacgcggtcctggggaggcccgcgttggtgaagttcatggtggcggtccactacgcctatctccagatgaagatgctgggccccggtggccccatcaccgtccatggcgacctcaaagtcgcgcttgcttgcatggagcagcacgcggaccacctcgccgcggcatccaagcccgcgggtggcgacgagaggctcagcacctccgtcccagccgccccgaggcagcggatgatcacgtgcgacgaggtcccgatcaagcaggaagacacgctcgtctccttcctgcgggcaaacgccgacgtcttcgcctggagaccggcggacatgcccggggtccccagggaggtgattgagcaccgtctcgccgtacggcctggcgcaaggccggtccggcagaaagtgcggcggcaggccccggaacgtcaagccttcatccgcgaggaggtggcgcgacttctggaggccggattcatccgagaggtcatccatccggagtggctggcgaacccggtcatcgttcccaaggcgaacggcaagcttcggatgtgcatcgactacaccgaccttaacaaggcatgtcctaaggacccttaccccctaccacgcatagatcagattgtcgactccaccgcgggccaaataggacgtaatgttgaggcctatgttgatgacttggttgtgaaaacacgcaaccaggagaccttactctcggatctagcggaaactttcgaaagtctccgcaccgcccgcataaagctgaaccccgacaagtgcgtgttcggcgtgcctgcgggcaagcttctcgggttcttggtctctgcccgaggcattgaggccaaccccgagaagatacgagctatagagcggatgcgcccccccagcaagcttagggatgtgcaatgcgtcattggttgtatggccgccctaagtcggttcatatcgaggctgggagagaaggcgctacccctatttaagctcctcaaacgctccgtgccgtttatctggacgaaggaggctgaacgggccctcactcaggtgaaggcgtacctcagttttcccccagtcctggtcgccccggagccagatgagccgttgctactctacctggcggcaaccccgcaggtggtcagcacggcgttggtcgtggagcgcgacgaggacgaccctcgctccgcgcatccccaccctgtgtcgactcgacccgggagagagcagggaggagaggcccccgagccgaacggtggcctaaggcccccgacggccggagctggccctccgcccgcttgtccgacggtgccaggcgcccccgacccccaggatggccccggggccactgcgggaaggccgcgcctgtcgccctccgaccccgaggtcgtcggcacagaagccgagtgcgccccgcgcggcctctcggacgaagagcgccctggagatgcggcccctagtgaagaagatcggccccaccgaaaggtgcagcggcccgtctacttcgttagcgaggccctccgggacgctaagacccgataccctcaggcccagaagatgctttacgctattctgatggcttcgaggaagttgcgccattattttcaggcgcatcgggtcacggtggttacgtcttaccccctcggccaaatcttgcataaccgagagggtactggacgggtggtgaaatgggcaatcgaactctctgagttcgatttgcactttgaaccacgccacgcagtcaagagccaggccctcgccgactttgtggcagagtggaccccggcccctgagcccatctccgtccccgaggccagctcgggcccctcgcagctgcctcacaccgcctattgggtgatgcagttcgacggctccctgtctcttcatggcgccggtgcgggggtcacgttgacctcgccgagcggagatgtcctcaaatacctggtccgcctcgactttcgggcaaccaacaatatggcagagtacgagggactccttgcgggactcagagtggcgactggactggggatccgccgcctcctggtgttaggcgactctcagttggtcgttaaccaggtctccaaggagtaccagtgctctgacccgcagatggatgcttacgtgcgccaggtgcggcgtatggagcgccattttgacgggatagagcttcggcacgtgcccagacgggataacgcggtcgccgacgaactctcaaggctcacttcctcgcgagcccagaccccaccgggcgcctttgaagaaaggcttgcccagccatcggcgcgacccgaccccctaggggagacggacgcgcctgaacggcccccgaggcccgtcggagtccaggcctcgggacccgaggtaagcgctcacagctcccttagattgattgcttggatcgctgagatccaggcgtacctcgcagataagactctacccgaggaccgcgaagggagtgaacgcgtccagcgcatctccaagcgctacgtgctggtggaagggaccctctatcggcgcgcgactaacggagtcctcctgaagtgcattcctcgggaacaaggcgtcgagcttcttgccgatatccatgaaggcgagtgcggagcccactctgcctcacgcaccttggttggcaaggcctttcgccagggtttctattggccgacggctctcaacgatgcggtcgacctggggctcgatatcctgggtccgtttagacgggccccgggcgggttcgagtatctgtatgtcgctatcgacaagttcactaagtggcccgaggcttatccggtcatcaagatcgataagcactccgcacttaaattcatcaggggcattactgctcggtttggggtgcctaaccgtatcattacggataacggcacccagttcactagtgaactcttcggtgactactgcgaagacatgggcatcaagctctgcttcgcctcccccgcccaccccagaagcaatggccaagtggagcgcgccaacgcggaaatcctcaagggcctcaaaaccaaaaccttcaatatcctcaagaagcacggcgactcgtggatcgaggagttgccagcggtactctgggcgaaccgaaccacgccaagccgagcaaccggggaaacgcctttcttcctcgtctacggcgcggaggcggttctcccatccgagctcaccctgaggtcccctcgggccaccatgtactgtgaggctgatcaagatcagcttcgcagagatgacctcgactactttgaagagcgaaggcggcgcgcggccctccgagccgcgcgctaccagcagaacctgcggcgctaccatcagcgccacgtccgggcccgatcactctgcgtcgacgacctcgtcctacgccgcgtccaaacgcgtgctggactgagcaagctctcaccaatgtgggagggtccgtatcgagtgatcggcgtcccccggccgggctccgttcggctggccacgggcgacggcacagagctgcctaacccgtggaacatcgaacaccttcgtcgcttctacccctag

SEQ ID NO: 42466 - DNA, 5790 bp, Oryza sativa
  unsure (1)..(5790): unsure at all n locations
  Clone ID: PAT_MRT4530_45715C.1
atggccgaacgggcagtggcgcacaacctctctccgagcgctagcggtgacgacagcgagcagaacccgcgtcgtcgagctcgtactccgccgcccccctctcaccgaagtcttaggcgggaggaggcgctcgagggggtcgaaagatccgcgacttcgccgcccacgagcgatggagaaggacggcgagacggggagcgtcgtctcctcgtctacggtgatggcagcacgccccagggagcgctccaggctgcgggcgtgctcctgcgtcacccgcccgtcgtccctgatccagagactccaactcgacgttggctagatgacgtggccaacttggtcatgacggcgcaacagcgcctaggcgccggcgggcggtcctccgccaccaaggccactggcgctgctactgccggctccgtatcgtcgaggcggagggcgcggttccggcccaccatcaccgaaaaatacgacggaagcgtcaaccccgccgagtttctccagatctacacgactgggatcgaggccgccgggggtgacgacagggtcatggcgaatttcttccccatggccctgaaaggacaggcgcggggttggctaatgaacttgccacccgcgtcggtccactcttgggaggatttgtgccagcagttcaccatgaacttccagggcacatatccgcgcccaggtgaagaagcggacttgcacgcggtacaacgaggggacgatgagtctcttcgctcgtacattcagcggttttgtcaagtccgcaacaccataccatgcatccctgcacacgcggtgatctacgcgttcagggggggcgtgcggcacaaccgcatgctcgagaagatcgcctccaaggagccccagaccactgcggagctttttcaactcgcggaccgtgtggctcgcaaggaggaggcatggacctggaactccaccggttccggtgtggcagcttcggccgcccccggatccgccgctcggtcagggcggcgggacaggaggaggaagaagaggtcggcccattccgacgacgagggtcacgtccttgccgtcgagggtgcttcgcgggccacccgaaaggggaggcctacgagcgacaaaaagaaggaggccggcgctcccagcagggagcgcccgaccggcaagtggtgcaccgtgcacaacacctccctccacgacctcgcggactgccgcgcggtcaaaagtttggctgagcggacgaggacgtgggaggaggagaggaggcaggagcgccttgagggcaaggccccagcggctccctccggcaaccggcgaagtgaggccaagcagaaggcccccgccgaggacattgacgatggcgacgatgacctagggttccaggagcctggggccaccatcgccaccgtcgatgggggagcatgcgctcacgcttctcgtcggagcctcaaggccatgaagcgagagcttctggccgcggcccctacccatgaggcgacgcggcgggcgcggtggtcggaggttgccctcaccttcgaccagaccgaccacccgccgccccggggatgtgtgctccggccgtcccagccgatcatcggtgtaacgccggggcacacctggccgctaggtcatatcgacctcccggtcaccttcagtggttctgccaacttccgcacggagcgggtgaacttcgatgtggcggacctcagtttgccctacaacgcggtcctggggaggcccgcgttggtgaagttcatggtggcggtccactacacctatctccagatgaagatgccgggccccggtggccccatcaccgtccatggcgacctcaaagtcgcgcttgcttgcatagagcagcgcgcggaccacctcgccgcggcatgcaagcccgcgggtggcgacgagaggctaagcgcctccgtcccagccgccccgaggcagcggatgatcacgtgcgacgaggtcccgatcaagcaggaagacgcgctcgtctccttcctgcgggcaaacgccgacgtcttcgcctggagaccggcggacatgcccggggtccctagggagaaagtgcggcggcaggccccggaacgtcaagccttcatccgcgaggaggtggcgcggcttctggaggccggattcatccgagaggtcatccatccggagtggctggcgaacccggtcgtcgttcccaaggcgaacggcaagcttcggatgtgcatcgactacaccgaccttaacaaggcatgtcctaaggacccttaccccctaccacgcatagatcagattgtcgactccaccgcggggtgcgaccttttgtgttttctagatgcatactctggatatcatcagattcgcatggctagggaggatgaggaaaaaactgcattcattacccccataggaacttattgttatacgacaatgcctttcgggttaaagaatgcaggtcctacttttcaacgtactactcgaatttctttgggtagccaaataggacgtaatgttgaggcctatgttgatgacttggttgtgaagacacgtaaccaagagaccttactctcggatctagcggaaactttcgaaagtctccgcaccgcccgcataaagctgaaccccgacaagtgcgtgttcggcgtgcctgcgggtaagcttatcgggttcttggtctctgcccgaggcattgaggccaaccccgagaagttacgagctatagagcgaatgcgcccccccagcaagcttagggatgtgcaatgtgtcactggctgtatggccgccctaagtcggttcatatcgaggctgggagagaaggcactacccctatttaagctcctcaaacgctccgggccgtttatctggacggaggaggctgaacgggccctcactcagttgaaggcgtacctcagttctcgcccagtcctggtcgccccggagccagatgagccgttgctactttacctggcggcaaccccgcaggctgcccaacggcagccccccccgaaccccccccaaaggaatcggaccacccggggccactgcgggaaggccgcgcctgtcgccttactgaccccgaggtcatcggcacagaagccgagtgcgccccgcgcggactctcggagcgtgacgaggacgatcctcgctcggcgcgtcaccaccctcgctcgcacaccaccaggcaccacaaccagggcaccagaagccaccncaggcaaacaacggaagggaaggaaggagagacccccgagccgaacggtggccaaaggcccccgacggccggagttgccactccagcccgcttgtccgacggtgccaggcgcccccgacccccaggatggcactggggccactgcgggaagcccgtgcctgtcgccctccgaccccgaggtcgtcggcacagaagccgagtgcgcctcgcgaggcctctcggacgaaaagcgcactggagatgcggcccctagtgaagaagatcggccccgccgaagggtgcagcggcccgtctacttcgttagcgaggccctccgggacgctaagacccgataccctcaggcccagaagatgctttacgctattctgatggcttcgaagaagttgcgccattattttcaggcgcatcgggtcacggtggttacgtcttaccccctcggccaaatcttgcataaccgagagggtactggacgggtggtgaaatgggcaatcgaactctctgagttcgatttgcgctttgaaccacgccacgcagtcaagagccaggccctcgccgactttgtggcagagtggaccccggcccctgagcccatctccgtccccgaggccagctcaggcccctcgcagctgcctcacaccgtctattgggtgatgcagttcgacggctccctgtctcttcagggcgccggtgcgggggtcacgttgacctcgccaagcggagatgtcctcaaatacctggtccgcctcgactttcgggcaaccaacaatacggcagagtacgagggactccttgcgggactcagagtggcggctggactggggatccgccgcctcctggtgttaggcgactctcagttggttgttaaccaggtctccaaggagtaccagtgctctgacccgcaaatggatgcttacgtgcgccaggtgcggcgtatggagcgccattttgacggaatagagcttcggcacgtgcccaggcgggataacgcggtcgccgacgaactctcaaggctcgcttcctcgcgagcccagaccccaccgggcgcctttgaagaaaggcttgcccagccgtcggcgcgacccgaccccctaggggagacggacgcgcctgaacggcccccgaggcccgtcgaagtccaggcctcgggacccgaggggagcgctcccagctcccttagattgattgcttggatcgctgagatccaggcgtacctcgtagataagactctacccgaggaccgcgaagggagtgaacgcgtccagcgcatctccaagcgctacgtgctggtggaagggaccctctatcggcgcgcggctaacggagtcctcctgaagtgcattcctcgggaacaaggcgtcgagcttcttgccgatatccatgaaggcgagtgcggagcccactctgcctcacgcaccttggttggcaaggcctttcgccagggtttctattggccgatggctctcaacgatgcggtcgacctggtccggcggtgcagggcgtgccagttccacgccaagcaaacccatcagccggcccaggccctgcagaccatacctctttcatggccgtttgctgtctgggggctcgatatcctgggtccgtttagacgggccccgggcgggttcgagtatctgtatgtcgctatcgacaagttcactaagtggcccgaggcttatccggtcatcaagatcgataagcactccgcacttaaattcatcaggggcatcactgctcggtttggggtgcctaaccgtatcattacggataacggcacccagttcactagtgaactcttcggtgactactgcgaagacatgggcatcaagctctgcttcgcctcccccgcccactccagaagtaatggccaagtggagcgcgccaacgcggaaatcctcaagggcctcaaaaccaagaccttcaacatcctcaagaagcacggcgactcgtggatcgaggagttgccagcggtgctctgggcgaaccgaaccacgccaagccgagcaaccggggaaacgcctttcttcctcgtctacggcgcggaggcggttctcccatccgagctcaccctgaggtcccctcgggccaccatgtactgcgaggctgatcaagatcagcttcgcagagatgacctcgactacttggaagagcgaaggcggcgcgcggccctccgagccgcgcgctaccagcagagcctgcggcgctaccatcagcgccacgtccgggcccgatcactctgcgtcgacgacctcgtcctacgccgtgtccaaacgcgtgctggactgagcaagctctcaccaatgtgggagggtccgtatcgagtgatcggcgtcccccggccgggctccgttcggctggccacgggcgacggcacagagctgcctaacccgtggaacatcgaacaccttcgtcgcttctacccttatctcgacacgtggatctccccagacactagccccgacccgcgccatttgaggctgggacctgggcacgagccctcgttcaagccaagacatagaaggaccgcggcacagaccatcctcgtctcatacacacaacgaacagagctgacacaaaaatttcttctttatttgattgcagattaa

SEQ ID NO: 42467 - DNA, 5784 bp, Oryza sativa
  Clone ID: PAT_MRT4530_45716C.1
atggccgaacgggcagtggcgcacaacctctctccgagcgctagcggtgacgacagcgagcagaacccgcgtcgtcgagctcgtactccgccgcccccctctcgccgaagtcttaggcgggaggaggcgctcgagggggtcgaaagatccgcgacttcgccgcccacgagcgatggagaaggacggcgagacggggagcgtcgtctcctcgtctacggtgatggcagcacgccccagggcgcgctccaggctgcgggcgcgctcctgcgtcacccacccgtcgtccctgatccagagactccaactcgacgttggttagatgacgtggccaacttggtcatgacggcgcaacagcgcctaggcgccggcgggcggtcctccgccaccaaggccactggcgctgctactgccggctccgtgtcgtcgaggcggagggcgtggcgagcggcagccgttacccgccgttcgtctgccattccctcgtcaacgcctcccacccaagaaaatgtgcgtgaggggccggatgcccgcctcaatatcgagcgccggcgcaatgatcgccgtgctgcccacgcatcggagggcgcttcctcgtccggagcgccacttcggtccgggcacgggggccagccccccgtgtccccggttggcggtgccggctgtcgagcctttgtggcgagccttcggaacgtccgttggcccccaaggttccggcccaccatcaccgaaaaatacgacggaagcgtcaaccccgccgagtttctccagatctacacgactgggatcgaggccgccgggggtgacgacagggtcatggcgaatttcttccccatggccctgaaaggacaggcgcggggttggctaatgaacttgccacccgcgtcggtccactcttgggaggatttgtgccagcagttcaccatgaacttccagggcacatatccgcgcccaggtaaagaagcggacttgcacgcggtacagcgaggggacgatgagtctcttcgctcgtacattcagcggttttgtcaagtccgcaacaccataccgtgcatccctgcacacgcggtgatctacgcgttcagggggggcgtgcggcacaaccgcatgctcgagaagatcgcctccaaggagccccagaccactgcggagctttttcagctcgcggaccgtgtggctcgcaaggaggaggcatggacctggaactccatcggttccggtgtggcagcttcggccgcccccggatccgccgctcggtcagggcggcgagacaggaggaggaagaagaggtcggcccattccgacgacgagggtcacgtcctcgccgtcgagggagcttcgcgggccacccgaaaggggagacctgcgagcgacaaaaagaaggaggccggcgctcccagcagggagcgcccgaccggcaagtggtgcactgtgcacaacacctccctccacgacctcgcggactgccgcgcggtcaaaagtttggctgagcggacgaggaagtgggaggaggagaggaggcaggagcgccgtgagggcaaggccccagcggctccctccggcaaccggcgaagtgaggccaagcagaaggcccccgccgaggacgttgacgatggcgacgatgacctaaggttccaggagcctagggccaccatcgccaccgtcgatgggggagcatgcgctcacgcttctcgtcggagcctcaaggccatgaagcgagagcttctggccgcggcccctacccatgaggcgacgcggcgggcgcggtggtcggaggttgccctcaccttcgaccagaccgaccacccgccgtgcgttgcccggggaggacagatcgcgatggtggtttcccccaccgtttgcaatgtgaagttggggcgtgtcctcattgacgggggtgcagccctcaacatcctttcccccgctgcctttgacgccatcaaggccccggggatggtgctccggccgtcccagccgatcatcggtgtgacgccggggcacacttggccgctaggtcatatcgacctcctggtcaccttcggtggttccgccaacttccgcactgagcgggtgaacttcgatgtggcggacctcagtctgccctacaacgcggtcctggggaggcccgcgttggtgaagttcatggtggcggtccactacgcctatctccagatgaagatgccgggccccggtggccccatcaccgtccatggcgacctcaaagtcgcgcttgcttgcatggagcagcgcgcggaacatctcgccgcggcatccaagcccgcgggtggcgacgagaggctcagcacctccgtcccagccgccccgaggcagcggatgatcacgtgcgacgaggtcccgatcaagcaggaagacgcgctcgtctccttcctgcgggcaaacgccgacgtcttcgcctggagaccggcggacatgcccggggtccccagggaggtgattgagcactgtctcgtcgtacggccgggcgcaaggccggtccggcagaaagtgcggcggcaggccccggaacgtcaagctttcatccgcgaggaggtggcgcggcttctggaggccggattcatccgagaggtcatccatccggagtggctggcgaacccggtcgtcgttcccaaggcgaacggcaagcttcggatgtgcatcgactacaccgaccttaacaaggcatgtcctaaggacccttaccccctaccacgcatagatcagattgtcgactccaccgcggggtgcgaccttttgtgttttttagatgcatactctggttatcatcagattcgcatggctagggaggatgaggaaaaaactgcattcattacccccataggaacttattgttatacgacaatgcctttcgggttaaagaatgcaggtcctacttttcaacgtactactcgaatttctttgggtagccaaataggacgtaatgttgaggcctatgttgatgacttggttgtgaagacacgcaaccaagagaccttactctcggatctagcgaaaactttcgaaagtctccgcaccgcccgcataaagctgaaccccgacaagtgcgtgttcggcgtgcctgcgggtaagcttctcgggttcttggtctctgcccgaggcattgaggccaaccccgagaagttacgagctatagagcggatgcgcccccccagcaagcttagggatgtgcaatgtgtcactggctgtatggccgccctaagtcgattcatatcgaggctgggagagaaggcactacccctatttaagctcctcaaatgctccgggccgtttatctggacggaggaggctgaacgggccctcactcagttgaaggcgtacctcagttctcccccagtcctggtcgcctcagagccagatgagccgttgctactttacctggcggcaaccccgcaggtagtcagtgcggcgttggtcgtggagcgcgacgaggatgaccctcgctccgcgcatccccaccctgtgtcgactcgacccgggagagagcagggaggagaggcccccgagccgaacggtggcccaaggcccccgacggccggagctggccctccgcccgcttgtccgaaggtgccaggcgcccccgacccccaggatggccacggggccactgcgggaaggccgcgcctgtcgccttctgaccccgaggtcatcggcacagaagccgagtgcgccccgcgtggcctctcggagcgtgacgaggacgatcctcgctccgcgcgtccccaccctgtgtcgattcgacccgggagagagcagggaggagaggcccccgagccgaacggtggccaaaggcccccgacggccggagttggccctccgcccgcttgtccgacggtgccaggcgcccccgacccccaggatggccccggggccactgcaggaaggccgtgcctgtcgccctctgaccccgaggtcgtcggcacagaagccgagtgcgcctcgcgaggcctctcggacgaaaagcgccctggagatgcggcccctagtgaagaagatcggccccgccgaagggtgcagcggcccatctacttcgttagcgaggccctccgggacgctaagacccgataccctcaggcccagaagatgctttacgctattctgatggcttcgaggaagttgcgccattattttcaggcgcatcgggtcacggtggttacgtcttaccccctcggccaaatcttgcataaccgagagggtactggacgggtggtgaaatgggcaatcgaactctctgagttcgatttgcgctttgaaccacgccacgcagtcaagagccaggccttcgccgactttgtggcagagtggaccccggcccctgagcccatctccgtccccaaggccagctcaggcccctcgcagctgcctcacaccgcatattgggtgatgcagttcgacggctccctgtctcttcagggcgccggtgcgggggtcacgttgacctcgccaagcggagatgtcctcaaatacctgggcggaaaacgcggtcgccgacgaactttcaggctcgttcttcgggagcccagacccacccggggccttgaagaaaggcttgcccagccgtcggcgcgacccgaccccctaggggagacggacgcgcctgaacggcccccgaggcccgtcggagtccaggcctcgggacccgaggggagcgatcccagctcccttagattgattgcttggatcgctgagatccaggcgtacctcgcagataagactctacccgaggaccgcgaagggagtgaacgcgttcagcgcatctccaagcgctacgttatggtggaagggaccctctatcggcgcgcggctaacggagtcctcctgaagtgcattcctcgggaacaaggcgtcgagcttcttgccgatatctatgaaggcgagtgcggagcccactctgcctcacgcaccttggttggcaagacctttcgccagggtttctattggccgacggctctcaacgatgcggtcgacctggtccggcggtgcagggcatgccagttccacgccaagcaaacccatcagccagcccaggccctgcagaccatacctttttcatggccgtttgctgtctgggggctcgatatcctgggtccgtttagacgggccccgggcgggttcgagtatctgtatgtcgctatcgacaagttcactaagtggcccgaggcttatccggtcatcaagatcgataagcactccgcacttaaattcatcaggggcatcactgctcggtttggggtgcctaaccgtatcattacggataacggcacccagttcactagtgaactcttcggtgactactgcgaagacatgggcatcaagctctgcttcgcctccccaacccaccccagaagcaatggccaagtggagcgcgccaacgcggaaatcctcaagggcctcaaaaccaaaaccttcaatatcctcaagaagcacggcgactcgtggatcgaggagttgccagcggtgctctgggcgaaccgaaccacaccaagccgagcaaccggggaaacgcctttcttcctcgtctacggcgtggaggcggttctcccatccgagctcaccctgaggtcccctcgggccaccatgtactgcgaggctgatcaagatcagcttcgcagagatgacctcgacacttggaagagcgaaggcggcgcgcggccctccgagccgcgcgctacctgcagagtctgcggcgctaccatcagcgccacatccgggcccgatcactctgcgtcgacgacctcgtcctacgccgcgtccaaacgcgtgctggactga

SEQ ID NO: 42468 - DNA, 374 bp, Oryza sativa
  Clone ID: PAT_MRT4530_45717C.1
cagacgagggttgatattagatcaaacagtctgactaactgatgcttcagttaatcagttacactttttttaagaaaaaagaaacatagttttctcacactttggctaataactgactgcatggcccatccactcatccagtgccaagttagctcaaagaattgacaaggcatccaacctatccccaaataatagccagtgcatgtcactgccttgcccaatactgaactaattggagtttgttgtgccctacttttttatgttgaagtgtaggcatcaatggagattcaagtactacaaatataaccaccacttcaaattcttccctataaagttaaagcatcccctatatctttatagagttggtatacata

SEQ ID NO: 42469 - DNA, 4800 bp, Oryza sativa
  Clone ID: PAT_MRT4530_45718C.1
atggcgcacaatctctctccgagcgctagcggtgacgatggggagcagaacccgcgccgtcgagctcgtactccactgtccccctctcgccgaagtcttgggcgggaggaggcgctcgaggaggtcgaaagatccgcgacttcgccgcacgcgggcgatggagaaggacggcgagacagggagcgtcgtctcctcgtctacggcgaatttcttccccatggccctgaaaggataggcgcggggttggctaatgaacttgccacccgcgtcggtccactcttgggaggatttgtgccagcagttcaccatgaacttccagggcacatatccgcgcccagtccgcaacaccataccgtgcatccctgcacacgcggtgatctacgcgttcaggggggcgtgcggcacaaccgcatgctcgagaagatcgcctccaaggagccccagaccaccgcggagctttttcagctcgcggaccgtgtggctcgcaaggaggaggcctggacctggaactcctccggttccggtgtggcagctccggccgcccccgggcccactgctcggtcagggcggcgggacaggaggaggaagaagaggtcggcccattccgacgacgagggtcacgtcctcgccgtcgagggcgcttcgcgggccacccgaaaggggaggcctgcgagcgacaaaaaaaaggaggccggcgctcccagtagggagcgcccgaccggcaagtggtgcaccgtgcacaacacctccctccacgacctcgtggactgccgcgcggtcaaaagtttggctgagcggacgaggaagtgggaggaggagaggaggcaggagcgccgtgagggcaataccccggcggctcccgccggcaaccggcgaggtgaggccaagcagaaggcccccgccgaggacatcaacgatggcgacgatgacctagggttccaggagcctgaggccaccgtcgccaccgttgatgggggagcgtgtgctcacgcttctcgccggagcctcaaggccatgaagcgagagcttctggccgtggcccctacccatgaggcgacgcggcgggcgcggtggtcggaggttgccctcaccttcgaccagaccgaccacccaccgtgcgttgcccggggaggacagatcgcgatggtggtttcccccaccgtttgcaatgtgaagttggggcgtgtcctcattgacgggggtgcagccctcaacatcctttcctccgctgcctttgacgccatcaaggccccggggatggtgctccggccgtcccagccgatcatcggtgtgacgccggggcacacttggccgctaggccatatcgacctcccggtcaccttcggtggttccgccaacttccgcacggagcgggtgaacttcgatgtggcggacctcagtctgccctacaacgcggtcctggggaggcctgcgttggtgaagtacatggtggcggtccactacgcctatctccagatgaagatgtcgggccccggtggccccatcaccgtccatggtgacctcaaagtcgcgcttgcttgcatggagcagcgcgcggaccacctcgccgcggcatccaagcccgcgggtggcgacgagaggctcagcacctccgtcccagccgccccgaggcagcggatgatcacgtgtgacgaggtcccgatcaagcaggaagacgcgctcgtctccttcctgcgggcaaacgccgacgtcttcgcctggagactggcggacatgcccggggtccccagggaggtgattgagcaccgtctcgccgtacggccgggcgcaaggccggtccggcagaaagtgcggcggcaggccccggaacgtcaagccttcatccgcgaggaggtggcgcgacttctggaggccggattcatccgagaggtcatccatccggagtggctggcgaacccggtcgtcgttcccaaggcgaacggcaagcttcggatgtgcatcgactacaccgaccttaacaaggcatgtcctaaggacccttaccccctgccacacatagatcagattgtcgactccaccgcggggtgcgaccttttgtgttttctagatgcatactctggttatcatcagattcgcatggctagggaggatgaggaaaaaactgcattcattacccccataggaacttattgttatacgacaatgcctttcgggttaaagaatgcaggtcctacttttcaacgtactactcgaatttctttgggtagccaaataggacgtaatgttgaggcctatgttgatgacttggttgtgaaaacacgcaaccaggagaccttactctcggatctagcggaaactttcgaaagtctccgcaccgcccgcataaagctgaaccccgacaagtgcgtgttcggcgtgcctgtgggcaagcttctcgggttcttgatctctgcccgaggcattgaggccaaccccgagaagatacgagctatagagcggatgcgccccccagcaagcttagggatgtgcaatgcgtcactggctgtggtcagcgcggcgttggtcgtggagcgcgacgaggacgaccctcgctccgcgcatccccaccctatgtcgactcgacccgggagagagcagggaggagaggcccccgagccgaacggtggcccgaggcccccgacgaccggagctggccctctgcccgcttgtccgacggtgccaggcgcccccgacccccaggatggcctcggggccactgcgggaaggccgcgcctgtcgccctctgaccccgaggtcgtcggcacagaagccgagtgcgccccgcgcggcctctcggacgaagagcaccctgtatcgactcgacccgggagagagcagggaggagaggcccccgagccgaacggctgcccgaggcccccgacgaccggagctggccctctgcctgcttgtccgacggtgccaggagcccccgacccccaggatggccccggggccactgcgggaaggccacgcctgtcgccttccgaccccgaggtcgtcgacacagaagccgagtgcgccccgcgcggcctctcggacgaaaagcgccctggagatgcggcccctggcgaagaggatcggccccgccaaaaggtgcagcggcccgtctactttgttagtgaggccctccgggacgccaagacccgataccctcaggcccagaagatgctttacgctattctgatggcttcgaggaagttgcgccattatttccagacgcatcgggtcacggtggttacgtcctaccccctcggccaaatcttgcataaccgagagggtactggacgggtggtgaaatgggcaatcgaactctctgagttcgatttgcactttgaaccacgccacgcgatcaagagccaggccctcgccgactttgtggcagagtggacaccggctcccgagcccgtctccatccccgaggccagctcgggcccttcgcagctgcctcacaccgcctattgggtgatgcagttcgacggctccctgtctcttcagggcgccggcgactctcagttggtcgttaaccaggtctccaaggagtaccagtgctctgacccgcagatggatgcttacgtgcgccaggcgtacctcgcagataagactctacccgaggaccgcgaagggagtgaacgcgtccagcgcatctccaagcgctacgtgctggtggaagggaccctctatcggcacgcggctaacggagtcctcctggagtgcattcctcgggaacaaggcgtcgagcttcttgccgctatccatgaaggcgagtgcggagcccactctgcctcacgcaccttggttggcaaggcctttcgccagggtttctattggccgacggctctcaacgatgcggtcgacctggtccggcagtgcagggcgtgccagttccacgccaagcaaacccatcagccggcccaggccctgcagaccatacctctgtcatggccgtttgctgactgggggctcgatatcctgcgtccgtttatacgggccccgggcgggttcgagtatctgtatgtcgctatcgacaagttcactaagtggcccgaggcttatccggtcatcaagatcgataagcactccgcacttaaattcatcaggggtatcactgctcggtttggggtgcctaaccgtatcattacggataacggcacccagttcactagtgagctcttcggtgactactgcgaagacatgggcattaagctctgcttcgcctctcccgcccaccccagaagcaatggccaagtggaacgcgccaacgcagaaatcctcaagggcctcaaaaccaagaccttcaacatcctcaagaagcacggcgactcgtggatcgaggagctgccagcggtgctctgggcgaaccgaaccacgccaagccgagcaaccggggaaacgcctttcttcctcgtctacggcgcggaggcagttctcccatccgaggtcaccctgaggtcccctcgggccactatgtactgcgaggctgatcaagatcagcttcgcagagatgacctcgactacttggaagaacgaaggcggcgcgcggccattcgagccgcgcgctaccagcagagcctgcggcgctaccatcagcgtcacgtccgggcccgatcactctgcgtcgacgacctcgtcctacgccgcgtccaaacgcgtgctggactgagcaagctctcaccaatgtgggagggtccgtatcgagtgatcggcgtcccccggccgggctccgttcggctggccacgggcgacggcacagagctgcctaacccgtggaacatcgaacaccttcgtcgcttctacccctag

SEQ ID NO: 42470 - DNA, 6036 bp, Oryza sativa
  Clone ID: PAT_MRT4530_45719C.1
atggccgaacgggcagtggcgcacaatctctctccgagcgctagcggtgacgacggggagcagaacctgcgccgtcgagctcgtactccactgtccccctctcgccgaagtcttgggcgggaggaggcgctcgaggaggtcgaaagatccgcgacttcgccgcacgcgggcgatggagaaggacgtcgagacggggagcgtcgtctcctcgtctacggtgatggcagcacgccccagggcgcgctccaggctgcgggcgcgctcctgcgtcacccgcccgtcatccctgatccagagacttcaacccgacgttggctagatgacgtggccaatttgctcatgacggcgcagcagcgcctaggcgccgactggcggtcctccgccaccaaggccactggcgttgctactgctggctccgtgtcgtcgaggcggagggcgcggcgagcggcggccgttacccgccgttcgtccgccattccctcgtcaacgcctccaacccaagaagatgtgcgtagggggccagatgcccgcttcaatatcgagcgccggcgcaatgatcgccgtgctgccaacgcatcggagggcgcttcctcgtccggagcgccacttcggtccgggcacgggggccagccccccgtgtccccggttggcggtgccggctgtcgagcctttgtggcgagccttcggaacgtccgttggcccccaaggttccggcccaccatcaccgaaaaatacgacggaagcgtcaaccccgccgagttcctccagatctacacgactgggatcgaggccgccgggggtgacgacagggtcatggcgaatttcttccccatggccctgaaaggacaggcgcggggttggctaatgaacttgccacccgcgtcggtgcactcttgggaggatttgtgccagcagttcaccatgaacttccagggcacatatccgcgcccaggtgaagaagcggacttgcacgtggtacagcgaggggacgatgagtctcttcgctcgtacattcagcggttttgtcaagtccgcaacactatactgtgcatccctgcacacgcggtgatctacgcgtttagggggggcgtgcggcacaaccgcatgctcgagaagatcgcctccaaggagccccagaccaccgcggagctttttcagctcgcggaccgtgtggctcgcaaggaggaggcctggacctggaactcctccggttccggtgtggcagctccggccgcccccgggcccgctgctcggtcagggcggcgggacaggaggaggaagaagaggtcggcccattccgacgacgagggtcacgtcctcgccgtcgagggcgcttcgcgggccacccgaaaggggaggcctgcgagcgacaaaaagaaggaggccggcgctcccagtagggagcgcccgaccggcaagtggtgcaccgtgcacaacacctccctccacgacctcgtggactgccgcgcggtcaaaagtttggctgagcggacgaggaagtgggaggaggagaggaggcaggagcgccgtgagggcaataccccggcggctcccgccggcaaccggcgaggtgaggccaagcagaaggcccccgccgaggacatcaacgatggcgacgatgacctagggttccaggagcctgaggccaccgtcgccaccgttgatgggggagcgtgtgctcacgcttctcgccggagcctcaaggccatgaagcgagagcttctggccgtggcccctacccatgaggcgacgcggcgggcgcggtggtcggaggttgccctcaccttcgatcagaccgaccacccaccgtgcgttgcccggggaggacagatcgcgatggtggtttcccccaccgtttgcaatgtgaagttggggcgtgtcctcattgacgggggtgcagccctcaatatcctttcccccgctgcctttgacgccattaaggccccggggatggtgctccggtcgtcccagccgatcatcggtgtgacgccggggcacacttggccgctaggccatatcgacctcccggtcaccttcggtggttccgccaacttccgcacggagcgggtgaacttcgatgtggcggacctcagtctaccctacaacgcggtcctggggaggcccgcgttggtgaagttcatggtggcggtccactacgcctatctccagatgaagatgccgggccccggtggccccatcaccgtccatggcgacctcaaagtcgcgcttgcttgcatggagcagcgcgcggaccacctcgccacggcatccaagcccacgggtggcgacgagaagctcagcacctccgtcccagccgccccgaggcagcggatgatcacgtgcgacgaggtccagatcaagcaggaagacgcgctcgtctccttcctgcgggcaaacgccgacgtcttcgcctggagaccggcggacatgcccggggtccccaaggaggtgattgagcaccgtctcgccgtacggccgggcgcaaggccggtcctgcagaaggtgcggcggcaggccccggaacgtcaagccttcatccgcgaggaggtggcgcgacttctggaggccggattcatccgagaggtcatccatccggagtggctggcgaacccggtcgtcgttcccaaggcgaacggcaagcttcggatgtgcatcgactacaccgaccttaacaaggcatgtcctaaggacccttaccccctgccacgcatagatcagattgtcgactccaccgcggggtgcgaccttttgtgttttctagatgcatactctggttatcatcagattcgcatggctagggaggatgaggaaaaaactgcattcattacccccgtaggaacttattgttatacgacaatgcctttcgggttaaagaatgcaggtcctacttttcaacgtactactcgaatttctttgggtagccaaataggacgtaatgttgaggcctatgttgatgacttggttgtgaaaacacgcaaccaggagaccttactctcgaatctagcggaaactttcgaaagtctccgcaccacctgcataaagctgaaccccgacaagtgcatgttcggcgtgcctgcgggcaagcttctcgggttcttgatctctgcccgaggcattgaggccaaccccgagaagatacgagctatagagcggatgcgcccccccaggaagcttagggatgtgcaatgcgtcactggctgtatggccgccctaagtcggttcatatcgaggctgggagagaaggcgctacccctatttaagctcctcaaacgctccgggccgtttatctggacggaggaggctgaacgggccctcactcagttgaaggcgtggtcagcgcggcgttggtcgtggagcgcgacgaggacgaccctcgctccgcgcatccccaccctgtgtcgactcgacccgggagagagcagggaggagaggcccccgacgaccgaagctggccctctgcccgcttgtccgacggtgccaggcgcccccgacccccaggatggccccggggccactgcgggaaggccgcgcctgtcgccctctgaccccgaggtcgtcggcacagaagccgagtgcgccccgcgcggcctctcggacgaagagcaccctgtatcgactcgacccgggagagagcagggaggagaggcccccgagccgaacggcggcccgaggcccccgacgaccggagctggccctctgcccgcttgtccgacggtgccaggagcccccgacccccaggatggccccagggccactgcgggaaggccgcgcctgtcgccttccgaccccgaggtcgtcgacacagaagccgagtgcgccccgcgcggcctctcggacgaaaagcgccctggagatgcggcccctagcgaagaggatcggccccgccaaaaggtgcagcggcccgtctactttgttagtgaggccctccgggacgccaagacccgataccctcaggcccagaagatgctttacgctattctgatggcttcgaggaagttgcgccattatttccaggcgcgtcaggtcacggtggttacgtcctacccgctcggccaaatcttgcataaccgagaaggtactggacgggtggtgaaatgggcaatcgaactctctgagttcgatttgcactttgaaccacgccacgcgatcaagagccaggccctcgccgactttgtggcagagtggacaccggctcccgagcccgtctccatccccgaggccagctcgggcccttcgcagctgcctcacaccgcctattgggtgatgcagttcgacggctccctgtctcttcagggcgccggtgcgggggtcacgttgacctcgccgagcggagatgtccttaaatacctggtccgccttgactttcgggcaaccaacaatatggcagagtacgagggactccttgcgggactcagagtggcggctggactggggatccgccgcctcctggtgttaggcgactctcagttggtcgttaaccaggtctccaaggagtaccagtgctctaacccgcagatggatgcttacgtgcgccaggtgcggcgtatggagcgccattttgacgggatagagctttggcacgtgcccagacgggataacgcggtcgccgacgaactctcaaggctcgcttcctcgcgagcccagaccccaccgagcgcctttgaagaaaggcttgcccagccgtcggcgcgacccgaccccctaggggagacggacgcgcctgaacggcccccgaggcccgtcggagtccaggcctcgggacccgaggggagcgctcccagctcccttagattgattgcttggatcgctgagatccaggcgtacctcgcagataagactctacccgaggaccacgaagggagtgaacgcgtccagcgcatctccaagcgctacgtgctggtggaagggaccctctatcggcacgcggctaacggagtcctcctgaagtgcattcctcgggaacaaggcgtcgagcttcttgccgatatccatgaaggcgagtgcggagcccactctgcctcacgcaccttggttggcaaggcctttcgccagggtttctattggccgacggctctcaacgatgcggtcgacttggtccggcggtgcagggcgtgccagttccacgccaagcaaacccatcagccggcccaggccctgcagaccatacctctttcatggccgtttgctgtctgggggctcgatatcctgggtccatttagacgggccccgggcgggttcgagtatctgtatgtcgctatcgacaagttcactaagtggcccgaggcttatccggtcatcaagatcgataagcactccgcacttaaattcatcaggggtatcactgctcggtttggggtgcctaaccgtatcattacggataacggcacccagttcactagtgagctcttcggtgactactgcgaagacatgggcattaagctctgcttcgcctctcccgcccaccccagaagcaatggccaagtggagcgcgccaacgcagaaatcctcaagggcctcaaaaccaagaccttcaacatcctcaagaagcacggcgactcgtggatcgaggagctgccagcggtgctctgggcgaaccgaaccacgccaagccgagcaaccggggaaacgcctttcttcctcgtctacggcgcggaggcggttctcccatccgagctcaccctgaggtcccctcgggccaccatgtactgcgaggctgatcaagatcagcttcgcagagatgacctcgactacttggaagaacgaaggcggcgcgcggcccttcgagccgcgcgctaccagcagagcctgcggcgctaccatcagcgtcacgtccgggcccaatcactctgcgtcgatgacctcgtcctacgccgcgtccaaacgcgtgctggactgagcaagctctcaccaatgtgggagggtccgtatcgagtgatcggcgtctcccggccgggctccgttcggctggccacgggcgacggcacagagctgcctaacccgtggaacatcgaacaccttcgtcgcttctacccctag

SEQ ID NO: 42471 - DNA, 480 bp, Oryza sativa
  Clone ID: PAT_MRT4530_4571C.1
atgccgccgtaccccatcaaccggatgcaagggggcaaggataatcaacagcactacaagaagtttgaattaggtccaaccaagaacagcagccatgctcatgtgcacagccgtgaagccgacgccgtggcttccaccaaatccagcctccactttcccgaagtcgaagacccctggaagtcgctcgtcaccatggagcagatatattccagcttcagccgagccctattggttccagtcgtcgttggaggtcgctgtcatcaccatcggcatcgcagcatccaggagaagcccgtctgccacctctcctccaccaaaattcgccaaaacgctatcgtcgccatcttcccaaacctgccatcacttagagctcatcaccagccatctgttgttgccgctcgtcgttgtcattgcttcgccaaggatcaccatgtcctcctcttcctccctatgcccttgcatttcgccgttgtgccgtag

SEQ ID NO: 42472 - DNA, 213 bp, Oryza sativa
  Clone ID: PAT_MRT4530_45720C.1
atggacagagacgcagcccgtctagagaaggctcgtacccgcgggagccggtgtccgccgaccagtgagatagactcactgaaggcacagctccaggtccacggcgaccagttccagcagacgagctcgctcgagctcggctcgttgacagccctaagcccgagccccaaggcatccgtccgaggggtaggaggagcggagaggaacagctag

SEQ ID NO: 42473 - DNA, 372 bp, Oryza sativa
  Clone ID: PAT_MRT4530_45721C.1
gcggtgcggccagggactgtatggtgcggcgcaggggggcggcggagcggagagtggggaccggtcgatccgcatcggcatcacgcacccaggcagaggcggaggcgcagcggcacgccaggctgcgcggtcgagcggcgagggcggcggcggccggcgagggtgcggtcgtgcggcgcagaggcgcggcgtccggctgcccgtggcgagccgcgagcgcgaggggacaggtgcggggccggggactgatttgcacccgcatgtccactcgaggccggggccgggtggagagttcgggggtcggggtcggggccgttccagcccaacccacacccgccccgccccgttgccatccctaagcacaacttgtta

SEQ ID NO: 42474 - DNA, 276 bp, Oryza sativa
  Clone ID: PAT_MRT4530_45722C.1
atggggacggttcttgtgccgatggggccgatgggtctatcaacgatgacgctttcacctacaatagggaaaaggacgggttacaaagaggccatgaagaagacaaacatttttggcaaagctgaatatcaaccttgcgaatggcgtgacgaattctggagcagaagaaatgatcggggagggcaatatcttggtaatccctctggaatgcttgagaacctgggcatagaaaattggccgatcactcaggctgcgtttcggtgccagtggttttga

SEQ ID NO: 42475 - DNA, 492 bp, Oryza sativa
  Clone ID: PAT_MRT4530_45723C.1
atactgcaatattaggaatatataaaggcatgactaccattatgccaccggtacaatgcgaactacggaaaagggtgaaagaaagaatgtcaagtaaagaaagaaagacggaaagaaagaacggcatgtaaaccgctgagagaagttttacagaggaacgtttggattggatgtgtgcatcaaacacgtgtataaagtttcacgcatagattttgactgtaacgagcctcaccactactctgttaagaagggtgaacctaattaaagcagcgaagatttgcacaggtaatgaacgcctgaaggaacatggacttgctgctctccaacttgcataaaagttttccaaggggtggagctttcttcccacttcgtttaaacatctaggcaaaacagctgatactagcatctcaaatgtacagttgtgattcaaaagaatgacagaatctcatctaattattgacactactgaaactgcttgttgattcataatac

SEQ ID NO: 42476 - DNA, 573 bp, Oryza sativa
  Clone ID: PAT_MRT4530_45724C.1
gcacgagggaagaggaggaagccttcctcctcttcaagcagatgaggaaggcttccaaaaaccagaagactccaatcatcccagcaccgaacaaaatcaaaagaggaaattgcgcgatcttcgatttaccaacactgcaaattgcaactgataacttctctgacagtaataagctcggggaaggcggtttcggtactgtgtacaggggaaagcttggtaatgggcaaaaagtagcagtgaagaagctgtcacaggcacagtacaccagagagggactgaaccagctgcacaatgaacttcagttgttggctgagcttcagcacaagaattttgtcagattactgggtttttgctcgcatcaggatgagatgatgcttgtttatgagcacattaagaacgggagccttgacatctttctttttgatactagtagggggaagacacttaactgggagcaacggcacaatatcattcttggaatcgcaaagggaatattgtatcttcacgaagattcgagcataaaggatcattcaccgtgatttgaaagcgaacaatatattgttggatgaaaac

SEQ ID NO: 42477 - DNA, 432 bp, Oryza sativa
  Clone ID: PAT_MRT4530_45725C.1
atggcgaggaggcgaatgggagaggaaaggaagggagggcgcctgggtttaaggggcggcaaagtcggtttggaaaccgactttgggcggaggaggggagcgggggcgtcgcggcagggggaggaggggctctgcctccgtcccttggcggcttgcgcgcggagtggcggggccgaggcgatgacgacggcgatgacggcggggcggtttggagcggcgcgacgacacgggcgacaggcgcgggctggcgtggcagagggtgacggcggcggcgaccaggcggcgcggcaggagagcggggccgggcggcgcagacggcgcaggcgcgacgcgggcgacgaccacgctggcgcgcgcgcgcggaactattccatcacataccttatttacttcaataccaagaaagaaatgaagttctcccaggtcctttag

SEQ ID NO: 42478 - DNA, 1172 bp, Oryza sativa
  Clone ID: PAT_MRT4530_45726C.1
gcaaacaaaactgtactttataattttccaatgatgtccgcaagagtgatctttccacactttgcaaggccaagctgatcaaactggtctgagatcattgcaatgtctttgtcatcgatctttcctatctctttgagtttgtagatcagaaagtccgatttgcttacagaagcatcatggtctaggtctgcagccagtggctcattgtccattttcttctggaggatccattttgtagtttttcggttccttctatccatccttagatctgttaggaacaggaaggccttggcaactgccaaagtgctcactaacaaacacactgttgcagagagccttcctgctggtgttgagaagccataatccccatatccaactgttgtcacagaaatgactgataaatagaagctatcaatccaatttagaccctccacctcatgcactatgattgtacaaattgagatggtgcctacaacaacccctaacgcaagtagtactttcatcctccctcttgatcttttcttttcagcatcaatcatataggtgtcaaataccctattaagcttgttatcatccattgtgctaagtaagactgttctctgcttgtcaagtacatttgtcaacagctcatttagcacaatgtcaacaaagcgaacaccgattagtagaaacaagcatgtgaacacctttgtgaaggtagtgcaagggactatgtcaccgtatcctatggtgcacaagcttatgatggtgaagtaaaggccatcaactaacttcagtgtggacctccccttgaagccttcaacatttgtgatgtatacaaggactcctattgagatgtacaagatgacgctaacgatagcctgccttgcaaatgatggtacgtgttgtgcagcatggctttgctcattgaactcatctgcacagggagtttctttgattgatgtgaacatagaaggagaagaatgcacccgctggaaattttgtgcggtaactatattgccatttccgctagtatgtaacggatgattgggagtattggggttacctttgctatttgtacttgggtgaaaggaagtcacgaacctgtttgggacatcggaggattttcttctgtcttgtcttgaagagtatacttgatcacggtggactacaggcagcaggtgctcttccat

SEQ ID NO: 42479 - DNA, 1408 bp, Oryza sativa
  Clone ID: PAT_MRT4530_45727C.1
attcggcacgaggaattgatctcgttgtctccgaacccatggccggcagcggcggcggcgaccgcggctcgcccgaggcggagctccggcgcgggttcaagacgctcgccgtgacgcggcccgacccgtccgcggcggtctacgaggtccgcctcaaccgccccacccggctcaacgccctcagcccggacgccttcgcggagatcccgcgcgccatggcgctcctcgaccgcgcccccgccgcgcgcgccgtcgtgctctccgccgccggcccgcacttctgcgccggcatcgagctcggctcccccgggagccccgccacggccccctccggcgaccccgcgcccgcggccgccgaggggctccgccgcgccatcctggagatgcaggcggcgctcacggccatcgagcggtgccggaagccggtggtcgcggcggtgcacggcgcctgcgtcggcggcggcgtcgaggtcgtggccgcctgcgacatacggtgctgctccaaggacgccacgttcgtgctcagggaggtggacatggccatcgtcgccgacctcggcgcgctgcagcggcttccgcggatcgtcgggtacgggaacgccgccgacctcgcgctcaccggccgcaagatcaccgccatggaggccaaggagatggggctcgtgaccagggtgttcaattccaagcaagaattggatgctggcgttgcaaagattgcaaaagaaatatctgagaagtcagcatgggcagtgatgggaacaaaggctgttttgctgagaagcagggatataacagtagagcagggcctggagcatgttgcaacatggaacgccgcaatgctgagatctaatgacctggaggaggctatccaagccttcctagagaagcggaagccagtcttctccaaactgtaatgatcatacaccatacttgacagaagaaagttatatttgaatcctagtacttcagaataagggaaaggctataaatctatgattgcagttggcaaatatgtgaagagcttacacttagtacagtggaccagaaatgcttccaatcaatgcatcaaagatctccaacatgttgctgctttgttgatttgttcaactgtggaaatgtgttctataatgacctgaagaatgctataaaaaggacttcctggagagggggaaagcctgtctaatccaaactgtaaagttgaggttgtgtgaatcctggtacctaagaagttgagattgtaaacttgtaagagtagcccacttttgggaaaatatgtgaagatcttacatgtagtaaactgaaatgctccgtttaataagtcaaataattcacgatgccgtggcttggttacgaataagtcgaaagggcgactgctgtacggaacccgcgctcgcgcccgcttgcatta

SEQ ID NO: 42480 - DNA, 574 bp, Oryza sativa
  Clone ID: PAT_MRT4530_45728C.1
gaagaccatccttcttcttccacggcctcgctactctcatgagcaaggatgaggagggtgtggaggaggagcagcagcagcagcagcaacggcccaatgccatcgttgggatcgcaggagtcgccggcgacactgggatggccggccggtgagctgaatccaagataggatatagggaggatcgatatataggcgaagaaatatggaggggagttttggtgatggtgatggtggtggtgggttttcggtcgacggccggcgctgcaatgcggcatacaagggaaagccaggcattttctctgctgttccaagtactacctttcctttagctttcctctccatggaagaaaaaagaaacggttgcattattcatgtgttttctctgtttgttaattacctctttgagggtgattaattacttcgggttttttaagctaggcaagttaactagtagtagtttctgctacagatggtcaatgaagatcatgctaagacgacagtcacactgtatatctgcattgattccttccttctagattgttatgcattttcaaaaaaaaaaaaaaaaaaaaaa

SEQ ID NO: 42481 - DNA, 233 bp, Oryza sativa
  Clone ID: PAT_MRT4530_45729C.1
ccttgtagcaacttactaccttaattacctagccttgctcttctttgagctgtcttccatctctctctattttgcatggatctacttttatttttacctcaaattgtgaaatatggtaattattttcctctttttatatatgttgctaattaatcaacctgttggtttctttttgctcttgtgttatttgcaggttattaaataaagaagagagaatcatatatatacatttc

SEQ ID NO: 42482 - DNA, 1605 bp, Oryza sativa
  Clone ID: PAT_MRT4530_4572C.1
atgaccccggagcagcgcctccgtgccgctgacctggatgccaaggcagcatcgctgcggcgctcgatccacgacctccgcctccgggtgcccccgcctcatgtggcgcagcgcctgccgcacctccatgctcattccctcgcgtcctcagccgccctcgcgctccagctcaatgcccactcctccaccaaggaacagcaatcaagctcctgcaattattccagccgagccggttgctatctccacccatacctcaagctgaagacttcagcagccacttgctttggcagcctgccacccttccgcattgcagctgacttgcgtttccctgcaatatctgcaatgacgaccaatatgagaccaaatgatacattcaatacaatatctcacaaggcactgcagagagagataacacttcaagaagaaaatgcagcttatgagaaagctatatcaaattgtcggcagaaaattcaggaaaagcagatggaggttactctgcttcggagtaatttgaaggaaatggaaatttcagagcaggatttgaaggcacagctggacaatgctcagaatgagcaatatgcttctcaaaataaagcatcagctgctgcttctgacaatactggaaatgctttgatggaagctgaatcattgattaatctcaagtctaatgacttgaaagagaagaatgaagagctggctcaagctgaaggcctaatcgtggatgttcatgccaaagaaaaggaattggaaaggttgaataatttacataaaaatcttcaaagtcgtaacaatgatggtagtgtagcacgaaatccattcagggctgtgcatgaagattctgatgccaaagctgttcggcgaccctatcaatttggtcttagaaccgaagggctgaaaaggttgatgattcttaggtctgcttttgttctctatattttggtacttcatattgttgttttcataaagctctcggtttcaaagcagggcgacacgggtggtggccactgccggcgcgccaactccgcctcaccgccacaaggacggcggcagcagggcctccttctcccccaaggtcgcgggttcggagcccacgaccccggccagctcctgggacggcgtcaggcgttgggcgaagagcgcgatggcctggctgccggcgtcgaaggtgatggcatcggcagctgggtggaccgggtggcgatggcgaggcggcgacactggtctgacgccctcccagccagatccgacaccctgtcgtccggatccggcctccccggcgcgggaggccagcctcccgtgctggcggcgacggcgaggcgccggggtacagcggcgtggtggcggtggcaccgcgacgctgggtctggcacccctcgccagatctcgcccaccttgtccggttccggcctccctggtgcgggaggccaaccccgtgggccggcagcgcgcgcgtggaggatgcggcgcaaacgtggaggcagcggggcgacggtggaggtcggtgagacagcgggacgtggctatggaggtgacggtgcagacatatgagacgagagcttggcgggaggttgtgaccgacgcgatgacgatggcggccacgcccat

SEQ ID NO: 42483 - DNA, 618 bp, Oryza sativa
  Clone ID: PAT_MRT4530_45730C.1
attttgtttcttggagaggcataggcatagatggattttgcctcgcactgtctagtagcatggtcatatttagcattctatcctaatgttttttttgtttctactactgtactactacataatatgtaatgggtcatttcttgcattttgttagtcaaactacacagtaaaatcctcagaatccaaatcttgtatttcttgtagtaagttgtaaccaaatccaaaaaccctagccaccagatcctgtcatcgcgggcgagccattactatttactagtcgtcttcaagttgaagcagtttttttccatcgtttgtcttcgttctcttctgtcaaagcagcagcaattgccttcagtttgcctcgtccatccgtcgtcccccaccgcgtcttgtcgtctcgtcaatcggcaccgtcctcgtcgtcgtcgccgcgtttcccttcgccagttgcagccgccaccggcagcgctcatcttcaccatcgccggcggcaaccccgtccgcccatcgtcccgcgggcgtccttgcaccaaggccgttgccgcttccatctgtcgattcctgccgctgcggctttagctaatgaccacattctaagctgctgctatgtgcagacct

SEQ ID NO: 42484 - DNA, 778 bp, Oryza sativa
  Clone ID: PAT_MRT4530_45731C.1
gtaccgtcttctgcttcctcgctacgcatcatcttgtctatttaagggtcctccgatccatgaagcgacgggaagttatctcccgaattcgagtcctgttctttttgctgctgctgcttcttgttcctactgccgtgaaccatggccgctgagactgttgtcctcaaggtcggtatgtcatgccaaggttgtgctggagccgtaaggagagttctcacaaaaatggaaggcgtggagacctttgacatagacatggagcagcagaaggtgacggtgaagggcaatgtcaagccagaagacgttttccagacggtctcaaagacagggaagaagacctccttctgggaggctgcagaagccgcttcggattctgcagctgcagctgctcctgctcctgctccggcaacagcagaagctgaagctgaagctgaagctgctccacccaccaccaccgcggcagaagcacctgccatcgctgctgctgctgctcctcctgctcctgctgctccagaagcagctccggccaaggctgatgcttgatgatcacacataatgcttgcattgacatctggaaattgaactccaagcgattgatttactctctttgcatttagcctctagtaaacggggagtgcagtcttagcttgtgtgatctgcatcatagcagtgttgcaatatggttatctgttgccggccagtgtagcagttgaaatccgaattatgaataaatccagtccgatccgcatggtttcgaaataaaaaaaaaaaaaaaaataac

SEQ ID NO: 42485 - DNA, 186 bp, Oryza sativa
  Clone ID: PAT_MRT4530_45732C.1
atgtgggatgccgccgcaactcacaaggactacggcatagcctacatgctcatattgacaagcaaggaagacccagtcggccaagccccaaagcaagatgccaacctagtgatagatgatggatttcctttgttcctcgtgtatggggcaggggcctcaaagcacaggttaaggcctgatccataa

SEQ ID NO: 42486 - DNA, 517 bp, Oryza sativa
  unsure (1)..(517): unsure at all n locations
  Clone ID: PAT_MRT4530_45733C.1
cacgagggaaggatttattgaaggccaaccatggcgtctcttagagccaccacactccttgtgttgatgcaaattattatggtgttttacaccgtcatcttaagctgctcgttttctgatgcccgaactttcccaggcggagaaggtgggttagacccaaatcatccagtatgcgttggcggcgcgtgtccaacaccaggtctaccatacactaatccacgtgatccttgcatataccgtaacaggtgcaatccaccaggacggatgggtgatccataagtaattttcatcatcaatatttatcgttgtgatccagtatacgtccacatcgtccacatgacaatagtgtgtgtttgtgtatgttatactagtattcactagctgctcacactgcatgagagctagttaattaagagaatgtctatgtatgacaaataatgtactgtggtactatatatgtatccncctgtctcggcaatatatggattaataagacatgtgtactctggatctgatt

SEQ ID NO: 42487 - DNA, 424 bp, Oryza sativa
  unsure (1)..(424): unsure at all n locations
  Clone ID: PAT_MRT4530_45734C.1
ggcgaggagcccgcacgtcgtgctcttccccttcctcgcgcacggccacacatcccggccttcctccgcctcgccggccacctccaggtgctccgcccgggcctcgccgtcaagctcatctccaccccgcgcctcctcggctccctctccctcccggccgcctcccctccgatccaactccacgcgctcccctttagcggatttttttggggtgatttgcggtgacctccggcgaactccgagcgcggaggttgaggcggcggcgagcgtgcacggtgacgggggcaggggcgggggccgtggctgagatggcggagaaggagngcaggggctgtcgcctggttgctccgcatctcgtccccgcaagccgacgctggtggcggcgacgacaacgacgactacgacctccgcggcggcgggggca

SEQ ID NO: 42488 - DNA, 186 bp, Oryza sativa
  Clone ID: PAT_MRT4530_45735C.1
ggggatgtgatggcaccattgcgcgccgactactccatcatcatccccgcaaccatcttgtcagcaatgcattggggaaagatattgcgaagcatagcgggaggtagatggagcttggcaagagtcctgacggcgcctaatcagttggccatggtgtccgatggcgcaacagagatcgagatttag

SEQ ID NO: 42489 - DNA, 472 bp, Oryza sativa
  Clone ID: PAT_MRT4530_45736C.1
ccaagagaaagatcaatttttctatatagggtagtggggggcaaacttgcagttgcacctatgttctttccacagtcagaacaggacacttcaggtatcgcaaataaatatttatttgttgttataaaaagatgatttaatccaaagtgatggcaaacccaattgaaacaaatcttctgcaaagaagtgtaaccacaccttgtgttgtcttgacttcatgtagacagtagttattgatccagctggtgatgaagcaccctaactaatctgctgaagtcatggcatcttcatttcaagctccatccagttacagatatctgaggagactactatattaaacagaatggttgagtgcacacaaggtttattgaattcatctgcatgtgaaccttcatcagaaatatcttctatcctcctctggggacaaaaaataatcaattaagcgaagcataggcctgccttttttaaattg

SEQ ID NO: 42490 - DNA, 774 bp, Oryza sativa
  Clone ID: PAT_MRT4530_45737C.1
atgcatcatccactacatcattcatccattccactgcatcattccatccattaccactgcatcatccaaaaaaggaggggcggcgaagagaggggtacctggatcgaggaggcttggggaggaggtggccggcggctgcttggggaggacgacggcgccggcttagggaggacgattgcggcgtccttggtcgcagaggccagcggcttgacggtgctcttgacgccgagggggggaggtcggggaggccggcggcttgacggtgctcttgacgccggcattggtcttgacggcgtggagaagaggccggcggcggtccggatctcgctagcggtggaggaggcagtggcggcgtcggcgccggaggaggcagtggcagcgtcggtggagaccggggaggaggcgtcggcgacggaggccggtcggtgtggacgagagaagacggcggcggcacgggcgaggtggagaagaggcggcgaaaaggggcgaggtggagaagaggcgacggcggcgagggcgaggtggagctcggggaagaaggcggcgagggcgcggtggagaagaggcagtggtggcgagggcgaggtggagctcggggaagaaggcggcaagggcgaggtggagaggaggcgcgcggcccagatctggggctgccggcggaggggcgagttggtcggcggcgcagattcgagggggaggaggagaggaggggcagcggatggatggggaggaggagaggaggcggcggtgagggggaggagaagaggaggttag

SEQ ID NO: 42491 - DNA, 1461 bp, Oryza sativa
  Clone ID: PAT_MRT4530_45738C.1
aagagcagaggtgagcagagatctccaatggcggctgcaaggagagtggtcttgttccccagcctcggcgtgggccatctcgcccccatgctggagctcgccgcggtttgcatccgccacggcctcgccgtcacggtcgccgtccctgacccggccaccaccgcccccgccttctccgccgcgctccgcaagtacgcatcccgcctcccctccctctccgtccatccactccctcctcctcctcatcctcctgcctcctccggcgccgatgccgccgctcacccgctcctccgtatgctcgccgtcctccgcgcccacgcgcccgccctcggggacctgctgcgtggcccccatgccgctcgggcgctcgtggccgacatgttctccgtctacgccctcgacgtcgccgccgagctcggcgtccccgggtacctcctcttctgcaccggcgccaccaacctcgccgttttcctccgtttgccacggttttgcgccgggagcagcggaagcttgagggagctcggcgacgcgcccgtgtcgtttcccggcgtgcgcccgctgccggcgtcgcacttgcccgaggaggtgctcgaccgtgggacggacataagcgcggccatgctggacgcgttcgaccggatggcggacgcgcgcggcattctggtgaacaccttcgacgcgctggagggtcccggggtggcggcgctgagggacggccgctgcctctccaaccgcgccacgccgccggtctactgcgtcgggccattgatcaccgacggcggcgcggaggaggagaggcacccgtgcctcgcttggctggacgcgcagccggagcgcagcgtcgtgttcctctgcttcgggagccgcggcgcgctctcgccggagcaggtcagcgagatggccacgggcctcgagaggtccgagcagagattcttgtgggcgctgcgcgcgcccgcgggcacgaagccggacgccgcgatgtctcttcttcctgacggattcttggcgcggacagccgacagaggcgtcgtggtgaccgcgtcctgggtgccgcaggtggcggtgctgcagcacgcatccacgggcgcattcgtgacgcactgtggatggaactcgacgctggaggctgtcgcagccggcgttccaatggtgtgctggccgctcgacgcggagcagtggatgaacaaggtgttcatcgtggaggagatgaagattggcatcgaggtcagagggtataaacccggggcacttgtccaggccgacatcgtcgatgccatcttgaggcggatcatggaatcggatgcgcagcagggagtcctggagcgggtcatggcgatgaaggagagcgcagcggcagcatggaaggaagggggatcatcgtgcactgcattcgctgaatttctcaaggacatggaggaggggaatgttgccatggcgcattccaatcaggttgaaacttga

SEQ ID NO: 42492 - DNA, 442 bp, Oryza sativa
  Clone ID: PAT_MRT4530_45739C.1
accgctccttgtcctactccatttcttctggtggatgtctgtgtatctgtgtctgaagctcggagggccacctataacaggcgtgatttgtagacataaatcatcccggcaagggaggcatgagtctccataaggaccgcgccaagacgtaaccggaaggtgcttccagacaacatccaggggatcaccaagccggatatcctgatgctgacgaggaggggctgcgtgaatcgcatctgcaggctcatctacaaggagacccgcggcgtgctcaagatcttgctcgagaacgtcatccgcaacgccggcaactacaccaagcacgcccgtcataagaccgtgaccgacatggacgtcgactacgcgctcaagcgcgcaggacgcaccctgtacagcttcagctgatgatcgatcgtgcctccataccccatctctaccatgt

SEQ ID NO: 42493 - DNA, 461 bp, Oryza sativa
  Clone ID: PAT_MRT4530_4573C.1
tttttcggccgcgcctcctcagcgcgtggtctaccctcggcgacggcgccctgatgctgccccccggcctgccctcccagctatcagcgctaatgagtctgagtcaagctcaacaagccacctcgcaccgctcgtccctctcgggctccggctcagtccacaccgcggagactgcgtgtcagaccgaaggccctgctgtcatcctgccctctctcgacacagcgatttccatgggcagcgggaaccacatcccagaactctctccgctgcagataggcgttctctccacgatcagcgatgtctcctggccacgggtcccatgatgggtcgagcaccagcgcctcgccgaaccacgagcacccctaccggttcccgaccgcgaacggcgagtggaaggtgatgagctcggggggagtcaacgctgttggagttatcagaccgtccaaacgcgcgctcctgct

SEQ ID NO: 42494 - DNA, 569 bp, Oryza sativa
  Clone ID: PAT_MRT4530_45740C.1
ttttttttttttttttttttttataatatgaaatgtaattgcattgcctcctttttgcaaaatccccaaattgttccatacttccatatgcataacaggcatacattttcaccacaccagggcagcaccgcagcagcacggcactgaactaaccaacagatatcacatgataaactggattcagattggacatgatctgaagcaataacccaaatggggcatgaattgcaattgacatatctatcacacgcacacacccaaaaaaaaacagcagaacaaaaaactcgcccacgtttacagcgtatgcaaagaacagaaaacagcaacttgatcagttctaattgtcgacaattgtgatcatatccacaatcaggacggtcaactttttggcatgacaacgaatggtggatggcgcacaaaaactgcgcattaggttttcacagttgctccattcagtgccatttatctccgagttcttgagcagaatgtgtgcagataatcatttgacaaacaattgatatatatatatatatatatatatatatatatatatatatatatatatatat

SEQ ID NO: 42495 - DNA, 479 bp, Oryza sativa
  Clone ID: PAT_MRT4530_45741C.1
gtcgtcataccgagctccgccgacgccaaccccaacgctatgagctccgacttccgccagccgccatggcttcaaaggcctctgaaaagaatgctgatggaaagactcaacatgcctagaaggttgccaaggcagggaagactgggcctatctacagaatgtcaaactagatccgcactaccttgactttgcacagaccacagaccctgaacaaggcgagagaccctaagtacccaatactcagtgcaccatgactagaacaagcttgatcagtaccaaattcttaagtacccgcttacgaccgaatctgccctgaagaacattgaagacatcaacactgccggctccatcgacgacctaatggcatacactacgaagatcacggcacctggcacgaagatgtatctcgtccagactatgaacggaaacactctgagcaggccttacggcaggaagaatgcttacaggactctcactcc

SEQ ID NO: 42496 - DNA, 264 bp, Oryza sativa
  unsure (1)..(264): unsure at all n locations
  Clone ID: PAT_MRT4530_45742C.1
ggattattcactggtggcttggagggctttttgaagcctgtacacactcttgttagttcantatttcggggggaggagaagactgtattaatgttgcacgtatgccacggatcactataaagggaaatgtatatttttgttcacgcacttctacttgtaatccactatatagttttttgaagtcgaataatttgttataggccacggagaagagaaaatcacactgaaatgcatgcccctatcgaaaaaaaaaaaaaaaaaaaa

SEQ ID NO: 42497 - DNA, 2032 bp, Oryza sativa
  Clone ID: PAT_MRT4530_45743C.1
ttggttgaacaatacatgcccgaagacaccagtcatcctcctcctcctcgcggggacacgccgccgtgacgcccccgccatgcttaggttcctcctctggctagcatacctgctggctgactccaccgcgatatacgcccttggccacctctccctcggctccgtggcgagcgatcactggctggcatccttctgggcgccattccttctgcttcatctcagcggcccggataacatcacagcctacgccctccaggacagcgagctctggcttcgccacctgcagatccttcttctccagctccttggagctagctatgtcctctacaaacatatcatcatcggcgacgtgactacgagaggacacgagccctttctgctggccaacgtcttgatgtttgtcgtcggcctttccaagtacggcgagaggatacatgcgctcagatgtaacaagctgagcaacatctggagctccccgaaggaagtatatcgtaataaccaacttcttcactacctgcaggatcgagatcataggattagagaagaagaagaattatctctgcagtatgctcactccctgcaccacatctgcaagcgtgggatagtcaactttgtgattgaggaaccattggatgtggagaaatctgaggggtccagaaccaagatattaatcaagaagatgctcaacgagaaggacaggaagacgcacataaaaatgtggaaggtgatagagatggagctgtccctgatgtacgacatcctctacaccaaggcgggcgtgatccacagctggtttggctactccatccgggtcttgtctccggtcaccatcttttcctccttcatcttgttcatcgtcagtgggaggggtggcagcagctgctgcagcaaagccggctagcagcacgggatcgacatcgccgtcacatatgtcttattggttggtgctttcctgatggagacgacgtccttgataaacgctctagcatcgagctgggcacttggcttcttatatggcatgccatggagttggctcgagaatatggcatttcatgtcagatggtggcaccggctccggcgatcagtcttggctcttcgccggagtgtcgaagcaaagacaagaggctcctggggcagatcaaggaagtggtcaggcagcattggccagttcaatctgctctacttccgcgccgcgcaggtcaaccaaaccaactactggctcagcaagtgtgctatgaaattggggttcggcattggcaattggtggaacaacacttgttactcgtggactataatgattccagacaaggtgaagactagatcggtgagtttggtctccaagagtgatctcaatacaatgggcttgctcaggtataagtggggcgagctggcactcaacaacgataaaaaaaggatctggcctgaactgcttcaaaaactgggcgatctgcacggcgtcgacttccatgagagcatcattatctggcacatcgccactgatctcatcctcctagagagaaaaaacaactactccggcgacagtaaaaatgccaaggaagttgaacgtgtacgttcaatcagggcactgtctaactatctcatgttccttgttgtgactcgccccgacatggtacctggacttccccaaaattggttataccaacagacctgcaacaacctcgatgaaatatgcgaagatcggcgttatcaactcctttcttcagctggcaaggccagtaacatcatcttccgagtgctcagggagctgttcagaggccataatgataacacagcgtcagttcggctcaaccagaccaacgaactcgctaaaatcttactcgagaaatataatcctacagaaaaatttgaccgctcagttcctcgcctgacgtatgcacgcaacgtagctcatatagttctaaattgggagtatccagatgacctgaaggatacaggcccagtgaaggtgctgcatgacttgtggatggactttctcatttatgcaagacacattagtcacacaaactcacac

SEQ ID NO: 42498 - DNA, 967 bp, Oryza sativa
  unsure (1)..(967): unsure at all n locations
  Clone ID: PAT_MRT4530_45744C.1
gcgccacacccctggaggaatgggaaggtagaatgaacgtggggatgtcaaattcagtgacgactgcgataagggacagcataagggagacggcaattgggaaaacatggaacacagagaaggctgatcgtgctacagtagaacaggctattgatccaagaacacgcatggttctgttcaagatgttaaaccggggggtttttaataccataaatgggtgcatttctacagggaaagaggcaaatgtctatcatgcatcaaaggctgatggccaggagttagcgatcaaagtctataaaacatctgtccttgtttttaaggatagagaccgatatgtccatggagattaccgctttagacatggttactgcaagcataatcctcggaaaatggtgaagacctgggctgaaaaggaaatgagaaatcttttacgagttggagcagctggaatccgatgcccaaaaccattgctcctgaggcttcatgtactggtgatggaattataggaaaaggaggttgggctgctcctcgtctcaaggatgctgctttatctgatgataagttgcgtgaaagttattttgagttaattacgacaatgcggacactctaccaaaaatgcaaactggtccatggtgatctgagtgaatacaacattctttatttcgagggacacttgtatatcattgatgtttcgcagtccgttgaccttgatcatccttcagcgttggaattcttgaaggaagattgcttgcatgttactgacttctttaaaaaacgtggtgttgctgtcatgtcagtaacagaactatttaattttgtgattgatcaaaatattgctgatgaagatgttgatcattacctgnaaaaggtattttctcaatgtcacctttcagtctttctatagccactgagttctagatgtgccctgatcatgttggcttatgatgggcagaatgtctgatggatt

SEQ ID NO: 42499 - DNA, 2907 bp, Oryza sativa
  Clone ID: PAT_MRT4530_45745C.1
agactcttaaaagagaatgttggattcgggccaagagctgtacattcatgtctttccttcctcctgcaaggctcttgcaggagcctctcttttctttttttgtttttacccccaatcagaattgcctgcaagttcatcaaaactactagtttttgtttcgttgatggcgatgcttcatggtggctgattacctgattgcgaaccctgggcagttttcatcgttttcgcgatgacgagtagtagtccttggtgatttgacaatatcatgctgaccgcgttttcgctgctaatagattcaatgtaacagatcatggttcagctgacaacctcaagtatatccctgaatgttacttgactctggctgatcacctcccttcggggtgtaatggcggttacacccttgagtaatctgatcacctcactgcacccatccacatagtacttcgctttgctagccttctggccaacagagcaggcaaagacatctggagcagtaggaaacacagaacgtgagacggcttcattgatgctctcaaacatgtcctcgtccgatcgatcgttaccaatgcacatcagaaaatccggtgcgttttcgttgttgattaccgtccgaatgactgtgtccacagcaatccccttgctaacaccctggggcttaacttctacgatttgatgaccacgtttaaccacaacaggttcatttgccagcaccctctcaagatgactcactagctccttcgcctggcatgaaccgaagtcatgatctgcatcctgataatgccaaactagcccactctcctttgtctctatggcagacccatcggttgtttccttgtatacttccatgataggctcggcgatgttcttccattcacaatcttgagctgaggagcttgtttcccattcaccttctttgttccacctgataaaatagccatgttcagctgcaataccaagcttatcacatgaagcaaaccactcacttagggtagtacgatctcttccgctgactatgaacacacagttctttggatcattgcacaagcttgtaaggatagaaatgacttctgcacttggaactttgttgactgatgactgggggacaagggtgccatcataatccataaatatcagccttctattagtcttcttataagaagaagcaaagtgttccaaagatagccttctaaatccaggagaaagagcaatgactctaaaattcaaaccaaacccagtggtccaacaccttcggctatagtgatccttgcacgctctatctagatcttgggaaaaactgcgcgcccagtaagcaacgtcatgagttttgacgtagcgataatgcttatcatgacgcaatttcctctccgattgagtcaaatccattgctttatataatgcatcagctacatcttcaatactccaaggatttaccctgaaagcaccactaagtgatggggagcaaccaacaaactcagacacaattagtgtgcttgtgtgatgtgagctcttatcaacacctctgagcttatcaatctcctcatttccctgcctgcagacagtatactcatatggtatcaagttcatcccatccctcacagcatttacaatacagcaatcagatgcagcatagtatgcaatcttctcataagaaggtatggggtagtcgataaggatgacaggcttgtactcagcagaaccatacttaatgtttatcctttcagctacagagacggcttcatttattgcttcctccacatcttttccagtgcttcttgcaggatttataatctgcacaaggacaaccttccctcttagctttggagttctctccaaaagaaattccaagccaagcaattttagactgatccctttgaagatatccatatcatctacacccaacatcaccatcttacccttatatctttgctcaatttcttgaaccttgctaattgtggcaggcagcctcaacacagactcaagacgaccaacatgtacacccacagcaaggatcttgaggctcaccgtacggccaaagtactctataccgatgtgaccacgttttgactcgtaattaaggcctaacaatctgctgcaacatgaaaggaagtggcgggcatagtcaaatgtttgaaagccaatgagatcagcattcagaagagacttcaaaatttcatctcttactggcagtgtcctatagatttcagaggagggaaatggactgtgaaggaagaaaccaattttgatgcgatgaagcttttttcttaaaaaggttgggagaagcatgaggtgataatcatgaacccacacacagtcatcatctgaattgatggcctccataactttgtcaccaaatattttgtttgcccgaacataggcttgaaatagagagcggtcaaagagctcgcctttgtcgaggcaaataggaagcatataatggaaaagtggccataattgttgtttacagaatccatgatagaactgctgctggaggtcagctgggaggaaagtaggtatgcatttgtattctctgaaaagtttctgtgaaagttgatcttgctcaccaggatcaacttcagcgttcaagctacccacataaacaacttcgctctccattggaaatccatctttaagttgaacaagaagttgattgtcatccattgagaaggaccactgtccagtagcttcatctttggtacagtttagtggaagaaagttggagacgattattttccttacacagcaagatgcaggaccaactgaatcatcagcattacttgtatcccaatcaggattagatgtgatgcttggggaagtcacaaaacgaggaagcgatctaaatggttgctgaaagtcaaacacatcttcaccactcatatctagaagatttgtatatgactttgaaaccat

SEQ ID NO: 42500 - DNA, 1999 bp, Oryza sativa
  Clone ID: PAT_MRT4530_45746C.1
atggcgaccgccgccgccgccgccgccgtgtaccttcccgaggtggatagccgcttcgccgacgccgacgaggaggaggaggaggaagcgacggtgaggccagtcgaggtggccgagagtaaggatcaggaggaggtggaggaggaggaggatgaagaggagtggtcggactccgacgtggccgatgcgctcgactggctcgacgccgcggagggccccgacggctccggccggccagcggccgccttcacggcggcaggaggcgccgccgcggcgcggaggccgaacgcgcacggcggggtgctgtcccgcccgttccagccgatctccaaccgcacgcagaagctcgcctcgcacatccgcgccacacccctggaggaatgggaaggtagaatgaacgtggggatgtcaaattcagtgacgactgcgataagggacagcataagggagacggcaattgggaaaacaaggaacacagagaaggctgatcgtgctacagtagaacagctgtaccgcatggacaataatttggactgtatcattcaagaaaatcgctctagtgcaattgactgctttggtaggaagttcctaagatgtattttttttatggcctgttgtgttcacaaggctattgatccaagaacacgcatggttctgttcaagatgttaaaccggggggtttttaataccataaatgggtgcatttctacagggaaagaggcaaatgtctatcatgcatcaaaggctgatggccaggagttagcgatcaaagtctataaaacatctgtccttgtttttaaggatagagaccgatatgtccatggagattaccgctttagacatggttactgcaagcataatcctcggaaaatggtgaagacctgggctgaaaaggaaatgagaaatcttttacgagttggagcagctggaatccgatgcccaaaaccattgctcctgaggcttcatgtactggtgatggaatttataggaaaaggaggttgggctgctcctcgtctcaaggatgctgctttatctgatgataagttgcgtgaaagttattttgagttaattacgacaatgcggacactctaccaaaaatgcaaactggtccatggtgatctgagtgaatacaacattctttatttcgagggacacttgtatatcattgatgtttcgcagtccgttgaccttgatcatccttcagcgttggaattcttgaaggaagattgcttgcatgttactgacttctttaaaaaacgtgcggaacatagtgaatcttgcactgagttccgatgaagtcggttcatggcatgagattttgaaggtggggcctatcattacctggacaagattcagcaaaagatgttggaaaatggagatatggttgcaaacgacgatgaaatcaccccaacagtcttgtttcagacgctggattatgtgaagcaatgcgaagcagatattgtcaacatgtcattgatgcaacgcccatccttcgcgaatgaaccaacagcggataagctttacaaccaaccattgctaggatttgtgcggaataaaaacgagcctaccaaaaaccagcaagtacaatcagaagaacctttggatctgcaaaataagtgctcctcggaacatagtgaatcttgcactagttccgatgaagacggttcatggcatgagattttgaaggtgggacctgaggaaaggaaggctgctcggaaggaaaacaagaagaaagtaaaagcagaaaagagagaagctcgcaaagataagatcccaaaggctgagaagaagaagaggaagaaaatggcaaaagccaagtgcaagcggtagtcaaacagagtgtcgcaccaacaatggtcaatatcatcaaagctaaattagctataaaaatctactaaagttatcatatacttttcagtagattacaaatgtgagatggcctttatgaatgtaatgcaattggaagatgatttttaaattgagtataatcccttgcagc

SEQ ID NO: 42501 - DNA, 498 bp, Oryza sativa
  Clone ID: PAT_MRT4530_45747C.1
aacagcaaccccagaaaaagatcaacaggacagcaaggtgcttgatcatagtaggaaagaatgttttgtcattcggataaggcagagggatttggcggagaggtgctgaaactcccatagcagtgaaatgggaggacagaatcattgagattagagagggttcatggtcatacattgcaaatgcaagctccgtcggttatgctcctggtggtgggaacagcaaccccagaaaaagatcaacaggacagcaaggtggtttggcgcttttcaactggagatgtactgacggtaaagttgggagatgacttaaactttcatattcgaaatgaaagctcaggagaagaggcaaggcttcttgtgggaggagattgaactacagaataaacaaggaaagcacattaaatgaccgcaatgatgaggaggaataccttaccctagttcgtacatcacctgatcatctaggtgacagagcaactatgctcctcaactggaaactac

SEQ ID NO: 42502 - DNA, 1455 bp, Oryza sativa
  Clone ID: PAT_MRT4530_45748C.1
atgggcgttcacagtgcgttgagcgtacagtgcatttcctttcctacatgtcgcctttgccgtcgcctcaaccacaccgaccagcgtcacatccagcaagcaaagtccgtgcgtgtgggcgtggctgacaccacgacgcaggcgcaggcgcaggcgctgcacaggttggtttctagagggtcgcctcgccccgccgtgccgtgtcgaggcgagccgtccatctccgccgcaccatccaaacaccatccgaaagcggtacagttcgcgcgtcccgtctcccacctgctctgcttgccactgactccgtactacgagtgcccagttgccaccactgcgcacaagcacacgcgcacgcggcgaggctgcttgctatctcttccggccttccctctgctctgctcccccttgccggctcgggctctcggttcttgcattgcaccgccgtccacggagatggtcgctgcggcggagtggtgggaggccaccatcgcggcgtacacggggctgtctcccgcggcgttcttcacggccgtggcggtggccgccgcgctgtacgtcgcggtgtccggtctcctcacgcggcggccgccgccgctgcctaggagacaggaggaggcgagggcgtcgcagccgctgccgccaccggtgcagctcggggaggtgacggaggaggagctgagggtctacgacgggtccgaccccaacaagccgctgctcatggccatcaagggccaaatctacgatgtcacgcagagcaggatgttctatggacctggtggcccatacgcactgtttgcaggcagagatgctagtagagctttggcgaagatgtccttcgagctggatgatttaaccggcgacgtttctggcttaggccccattgagctcgaggctctacacgaatgggagggcaaattcatgagcaagtacgtgaaggttggaacaatcaagaagatcatcccggtgtcagagggagatgctgcaactcatggtgggacatctgatagaggcatcgatgtaggcacaatagagagcaaccgtgtgccagaaccagaggaaaatggagctacaagtcatgcagatgcagtggaaaaatcagatgctgatgtgagcacacacaaccacgaggatgttgtagagaagtcggatgagctgctggaatcaggtgtggatactagaagcacccatgaagatgcagtggggaagccaaaggaagaaacagaagatgcagatgttcagaaaacgatcagcactgaagttgcaggtgagggaaagggagcacctgatgaagatgacaggaacacgtgcagtctggaagacgcaattgagaagccaaaggaaacggcatacattgatgtgaaggatacaagcggccatgaagttgctggagaaccaaaggaagcaccagatgtggatgggaacaatacaagcagcaatcaagatggcagtggatga

SEQ ID NO: 42503 - DNA, 2595 bp, Oryza sativa
  Clone ID: PAT_MRT4530_45749C.1
atgtccggccccggcgggcgggagcgggaggcggcggggcccgcgttctccttctccgtcgacctcgtggcggccgcgcgccggctgctcgcgctcctccgctccggggacggggagcggggtggagctggggtggtggggccgcggtccgtgcggaggtacgaggagctgtggatgccgctcgtggcggcggagggggcgggaggggaggcgccgatgctggtgccgccgcccgacgtgcggctcgtctggctctgccactgcttccaccatgagagctatgctgcttactgtgcatcaaggtttggacgcctcatcaaccgtccgtcgatccttgatgctgataatgaagaatatgccgctgaccactgtcgggatgtctgggctgcacactatccatcggagccatttgatcttgaagataatgaaactgaaggaaacagtagtaatgacaaatctgctagtgaaattatcgaaatggttcaaagatatactggcctagcagcccgctttgcctcacccttcatctcagaaggtgtctatcatgttgctgctaggcggagatacatgcgtttccttgaacttatcaagaaaattgtgagtacaacccaaggaaacacgcggctggtgcctagcctggacatactgctaatgtggcttgctcaccagagtttcccagtgagctattacgcagacatggcagcgatggccgtcaaggataatgttgcaaaaatagttgtgggttatggggaagtggtgagtgaagagatggtggagagaacaagggtattgtgggaggaggcatacgatgaaccatacgatatggctggatcagagattgataaagcagaagttgatgcagcgagagaagcattctattgggagacagcagcatcagaagaggatgctaatcgactgtacaaagggctgcaacctaggttcattatggaggtatatgtgttcctgaaaggagaatttgacagtgaacacaccagtaaggaattcttacgtttgcggacacagaggtgttacagatcactaaagctcaacataccactgttcaatttatcctgcaaaaactggcaaaaaacatggcacctatattgtgagttttcaacaagaggcctcatcattgaggtcagacgcagcacaagtgggtgcttcaggaacagcaagctcatcaagaacatctcattctcatggagtgatatgttgcatgagaaatccctcatgcttacagaggagcttgatgttaggatgaaagcaatggcatcaatcacccctccggttcaagcaccatacttgttgaagtgcgtacctgaccgagttaccgatgatggtggggctatgatttctgatgtcatattgcggacaaaaggttaccgtccacaagaaggacgatggctgactcgcacggtgcttgatcatagtaggaaagaatgttttgtcattcggataagaataggcagagggatttggcggagaggtgctgaaactcccatagcagtgaaatgggaggacagaatcattgagattagagagggttcatggtcatacattgcaaatgcaagctccgtcggttatgctcctggtaagttcagtgtgcaaaataactgttatgctcctgagaaggtggtgggaacagcaaccccagaaaaagatcaacaggacagcaaggtggtttggcgcttttcaactggagatgtactgacggtaaagttgggagatgacttaaactttcatattcgaaatgaaagctcaggagaagaggcaaggcttcttgtagggaggagattgaactacagaataaacaaggaaagcacattaaatgaccgcaatgatgaggaggaataccttaccctagttcgtacatcacctgatcatctaggtgacagagcaactatgctcctcaactggaaactacttgcggtagaattcttacctgaagaggatgcagtttttgtgcttctcctgtgcatggcaatcgcacgaaccatgacagagattaggagagaagatgtatctgggcttttggtacgacgaagaatatgtgaagcgaaggttgggcagagagactggggttcagtgatgctcccaaactcaccttctcttgatcctcatttgcaaccgtggtatcggaatgcagcgcatgtattaagctctgcagaaacagcgtctaacagggtgatgcttatgaagtattcacctgctgatggcaaggatgagttgtacaggaaagctcttataccttaagcccccgatggagaattggagatgattcctatcatggcttgtacaggattagttttgagttgtcatttcactaatggtgttgatctttgatacagatctgattatggttgtaaaatatggtttataacaacagaaacttaacattccaccacaaaagggcttgctttttgtttgttcttttgaccaaggatgtgcagtttttttgtactttttgttgagtaaaagtttccattcctttgtgtacattgtaattctgaagggttcaccggttcagtggtgcaaacttcagttccagaatacacatgtttcacttcactgataaaaaaaaaaaaaaaaaaaaaa

SEQ ID NO: 42504 - DNA, 3946 bp, Oryza sativa
  Clone ID: PAT_MRT4530_4574C.1
atggctaagcctctccgctctaccgtcctcgtctgcgcctctgcggcgatggccccaacctccgcaccaagattgcccacttcggcgccgccgatctcgccggcgagctcccggaaaccgaaaccgaacagggcacgtgcgggtacattgtgccggagctcatcgcgggcggagcgccatcgcggcggtcggacgagtacgcgctgggcggcggtggcggcagaaggaggaggggaggcgatgcggcggtgggtggaccggaggctgagggattcgttcccggtggacacggtggaggagatgacgacgctggcgctccagtgcgtagccaaggacgcggcggcgcagccggagatgtcgtggcctcgtgggtcgccgccaaggtgtccaagctcttcctgcccagagccacagagacaagagtttggtggtggcaacccgctccggcggctgcctctcgtctctccaccaccccgtcccgccgattttccgcctcgacctggtggtgcagtgctcgattcggcagttcggggcttaccgagggcgcagggtgtcgatgtgcagcccgaggaatcgcatatccgaaggggagtcgaaattagggtttccctctactcgccgccgatgaaggggggccgcttgcaccgtctggagcggccgcccgccgcccacatcaccaccgccgcagccgccaccacgcccgctccggcgcccgccgatgattggggggatggctcgtggacggtggactgctcgtgcggcatcacgtacgacgacggggaggagatggtgagctgcgacgagtgcaacgtctgggtgcacacgcggccaagcgcgccccctcctccgccgacgaggctgaggtcgccgagctcctggccgagctggcccacccaccgcccacggccgttgtaccgccgatgggctgaagtccctctcccctcccgtgtccatgtccacgggcttccaggcggtacagacaccgccctattccgcagcgccgcaccctcccctgtattctcgtccgccctatggcgctgtgctgggtacgtacccaagagattcggcttccgctactgcgaattcccctactgggctgatgacaaggacggtgccaacgctctatttgcgctggctagagagaagcgcaaggaaaaggcagagactaggttccctctccgccttggagccatacacaaggacaagaattatgtcaggacgctgagcatttgcggcgataaggtggatggcgttgagcactctgtggacgatgacgcaaagaggacatctccaccaagtgatgcaaagaagagaggaacatccattagcattgtagagcctgatacttgggacaatggttgtgagaagaaaagggattttgatgtgccagctagtgaggatcagcatgccaaaacaaacatggtaaattctgatttgcacgtgcttgttgaagctaagaagaagagggcttcatcctcagaacgaagtggggataagaagtgctctgcctcgaaggaaattactgggatgctaaagaaatatgaacctaaggagtccaagcgattggtgatatcctcaggagttgcaacaacggcagctgtagcagagcaagaagtgcactcacgatttgtgaagctctacccacctcacttgagtgcgccaggtggaggagagatgcatggcagtgagctgcacctgccaatgggtggaggagcagagtggcaaagtcaccagcagacccttgcatggcgaaggtgcaaaccaggcgtgcaccagggtagcgtgtatgaaggactagacgggaatcaaaatgtaggtttacagactggagtaagatcgaatggagttgtgaaaagggatgatgccaaacgatcaaatggagatgtccagagcgatgctgctcctgagaaaatgaatgagggtctggatcttcagaagcaatcaaatcaaacttcaaatcttctggttgttggtggtgtaccggatttacagactaaccagtcagaatcattgactatcaagaaggaagcatctacagatgatcatgagagaaccgaggctatccagtttgtaagtgatgagcataaaagtggaaaacaagatactgcaatgttatcaacccttcagaggcattcgtccaagttagcatctgacttagtttatcaacatccaaagtctgaaacacaaaatccgatgcacacaataccagagcatccaaactcaagtttaggtaatgtgaaagtttgtacagcatcttctggtcctaactctaccacttttgatttatcttgctctttgctatccacagaaccatcatcagaagaaactactgttcgtttggtaaagaaggatcagacaaggttggtctcatccgctgacagcgaaaatgattttgcaaaaaaatctgagagttcccaggatcgcacaagatcctctgataaagttcaattgaaaggctttgttccgtctgcgccaaaatcatctcaaggaagtagaacatatgtatcttctgccaaaaatagatttatagtgccaaaggagcagttgcaaaagacatcaactgaaggaaacgctccaccagggtcattacaaggtgaagtggcacccttacattctcgtaataaggcaatgcctttgagcttttaccaaagaaaggacaagatccaccaccgctctattcatatcacacaggacacttccaatagttcagcatcggctgagctgcaatctactgaaacaacagcttcattgagcgatgaacagcttgcattgttattacatcaacaattgaacagctcccccagagtaccaagggtgccacgttgtcatcaagcatctaccatgcagatgctacatccaactggagctagtgtgttctcaaaacggtcttcagcacatggaggaagggatcaagcactggtcttaaagaagaggaacaaagatgatgcatggagagataatgatgagaccaagaagacaggaaaggtgtctagtgttgaacggaggcatagagatagtagcacagaacgtgtccttgctgcaaaagactcatgcaaatttactgaaaatatagaatcagaacagagaaatcgtggcatttgttcaactggagccacctctggcgtaggaaatgatgctccaatagatagaggtgtttcacatgatttacctgggttgattgaggaaatcattagcaaaaatacaaacataacatatggtgaactgtgcaacgctattcgccagcattggggggatttaagtaaacccaacgtggaaaacaatgcataccccaactatttacatgctgttaacgattgtcttaggaacaggaatgactgggctcaccttgttgaccaggctgcaatgatgaatccaaacaagcgccggaaggtagaggaaagtgactctttgtcagcagatgtactggcaaccgagaagacaaataaagaggctaaaaggggtccagaagacacaaatgctgaatcacaccatgaaattctgccaaggggcaaacgcaaggctcggaaatgcaggcgtcttgaactgaaagggaggagagtcaacgatacgaggaagagatctagctttgattcggcctctgatgatgatgataccaccttgtcggattccagtagtgacagaaatgacacccctatggataagagcctagaagatagttttgttatagctaagaatgcagattcaagttcatagaggtggttcaatgcagtgctgctggcaatacattcgaatggagttggtgaagaaagtcagatttagcgaccgcagatcggttcacttgtaagttgtaacagtagtgtaacatagttaatccttttctcgcctaactgtaatgcaggtagatttgttgaagtagcgtatcatgtaagcaatttgcaatttgtagcgtctgatgattgcgcccaaaataacaagcattatgtgt

SEQ ID NO: 42505 - DNA, 1145 bp, Oryza sativa
  Clone ID: PAT_MRT4530_45750C.1
ccctccctccctctctccttcgggcgccgacaggtggggcccacctgtcggtcgtcttcctcctctagccgttggagccgtagctccaaccgccggcgccccacctcctccactccgcatctgcgccccaccccacacccacgtcgccggctcgccgcccgcttccccctcctctcccgcacgcgcgagccccgcaagggcgggattcggtttcaatcccccccccccaaactctctctccccactcccccacgtcggcgagaaatccggcctcctcccggcctcgtccgtccctcccgagcccatataaaccatccccgcattctcctcctcctttttcctttttccatcagccgctcccgagctctccatcgctcccgcaccgctacaccagccgccgccgccttttccactcctccggccaccgcgtccgccgctcccccgtccaattccgtcaccggagcccgcatctcctcgcactccggcgagcttccaccattgccgccgccttcggccctagttttcgctcgccgcggacctcccttctccctctaatctctcccatggtgagaactccctgtcctccctctttctctccctcccgtgtccactgccatccaccgcgtgcgcgccattgccttcggccgacgccgacgccttccgcgccgttcgccgccgccggttgccatcgccggcgaccgtgcaccgccgccgctcgctgtagccggccggccggcttggagccgagccgagcccggcagacgtcgcccctccccctttttggagccgcggccggtggggcccgcctgctagtaccccctccctctcccttgtgcctccgacccttgggtcccgcctgtcggcgccgccccaccccttggatgatgtcagccttgggtatttgttgatagaaaacacgtggctgggagatctgcttaactccagtgcaggtccaaagctcgccttcggatgttgttagcgtgccagttgatttgatcctttaagccgatgtcatctgtgcatcggttggcagtcatgaataagtcaagaaggaccaaatctactcgatcggctgtagatattaacgatatatactccttatatcgatgtatacttaaatcaagtgattgggatagatcggtcat

SEQ ID NO: 42506 - DNA, 5458 bp, Oryza sativa
  Clone ID: PAT_MRT4530_45751C.1
atggcgtgcgacgcgggagggttggttccgctgaccttcgagcgcacgctcacgcatttcacaacccacttcggcagattcgccgatctctagcgatccagccaaacctgttgcggagcttccaagggcgcggttgggggggactaggcggtgtggggctacgatgcgagctcgcccatcaggtagatgctttagacgccagggcagaagctagagagtatgcacgtggagcggtggttgatctcctgcagcatagacttcatgacgaatcctcgcaatcttgggagggcgtcgttcaactggcaccattcacctcttccgattgagcaaggagtgctggaagctatggtcgatcttcttataaagtctcccctggtgattaacatcttgaaaatggtccgcgaatctgtagatatctcattctttgatagcagggtgctccaagtatggaacgtgcttcttagtgctgttgctttgaatatacttagagaaatgaccggtctcttttttcaaaatctcgtttatcttcaactcaccagatagggaatgatagacgaacaatcattgagaacagatgaatcagagtatgttgaaggattcactggtaaccaagctgatgaaaaaattactcttggagatgcgctatccttgaatcgagctacagaagcatctccagcatctgttgaagagcttcagagtcttgcaggaggagctgatattaaggggttggaggctgttcttgacaaggctgttgaacttgaggatggaaagaaagtatcaggtggaatagacctggacactgtgaacataatacagcgtgatgcactattgctcttccggactctctgcaagatgagcatgaaggaagagagtgatgaggttgctacaaagacaaggctgctatcactcgaactgttacagggattgctagaaggagtcagtgattcatttaccaaaaatttccacttcatcgattcagttaaagcctatctttcctatgctattctgcgagcggctgtgtcttcatctgcggttgtttttcagtacgcttgtgggatatttgcagttctattgcttcgttttcgagagagtctgaagggtgagatcggtgtcttctttcctctgatagttttaaggtctctcgatagctctgacagtccactcagccaaagggccagtgtccttaggatgctggagaaagtctgcaaggattcacaaatgcttgcagacatgtttgtgaagggaaatcattggcggggattttaccagcaattgatctcatcagcaagaatgctttggtggggatcttctactttgttggatttggattgttctgcgtcgaatcattgctcagcatctgggttatccagcaagtgtacatgtacttccgaggaagtggaaaagctgctgagatgaagcgtgatgcaactaggggtgctatgcgggcagctttttaattatcagaaaagattattggtccgactcatatctctgatggaatggatagattgtggtataaacgaacatatatgttttccctgtttgctgactacaatttcaaattgttagtaggttacagtgacgttgtatgacctgtcctcttgattcatcaatatagagaatgtgcagttgttacttgttaaatacaacaacagtaaatcaaattctcaagagcaattctagcttggataaggctatgattggtgaatatttgggacaacatgaggagttccctcttgctgtgatgcatgcttatgttgattcaatgaaattttcgggattgaagtttgatgctgcaattcgtgagttcttgaaagggtttcgccttcctggggaggcacaaaagattgatcgcataatggaaaagtttgctgagcggtactgtgctgataaccctggacttttcaaaaatgcagatactgcttatgttcttgcttatgctgttataatgttgaatactgacgcccacaacccaatggtgtggcctaaaatgtcaaaatcagatttcgtacgaatgaacactgcgagtgatgcagaggaatgtgccccaaaggagctcttggaggaaatttatgattccattgtccaggaagagataaagatgaaagacgatttccctgattcagcaaaaactaataaacccagacgagaaacagaagaaaggggtgttgtcaatatcctcaatttagctcttccaagactgaagtcagcaagtgataccaaagcagaaagtgagaaaatcattaagcagactcaagcacttttcaaaaatcagggacagaagagaggtgtttttcatgttgctcagcaggtcgagcttgttaggccaatgcttgaagctgtaggatggcctttgcttgcaacattttctgttaccatggaggaaggtgacagcaagcctagggttgtgctatgcatggaagggtttagggctggcatccatcttactcgtgttcttgggatggacaccatgcgctatgctttcttgacatccttagtgcggtttacatttttgcatgctcctaaggaaatgcgtagtaaaaatgttgaggctttacggaccctccttggcttagctgacacagatatggatgctttgcaagatacttggaatgctgttttagaatgtgtctccaggcttgaatatatcacttcaaatccttcaattgctgcaactgttatgcagggatcaaatcaaatatcgagagaatctgttgtccagtcactgaaagagttgtctgggaagcctgctgaacaagtctttgtaaacagtgtaaaactaccaagtgattccattgttgaattcttcactgctctttgtggtgtttctgcagaagaactgaaacagacacctgctcgtgtctttagcttacaaaagcttgtcgagataagctactataatatggctcggatacgtttggtgtgggcgagaatatggtctgtcttgtcacagcattttattgccgctgggagccaccacgaggagaaagttgccatgtatgcaattgactcattgaggcagcttggtatgaagtacttggaacgtgcagaattgaacaaattcacatttcagaatgacatattgaagccttttgttattttaatgagaaatagtcacagtgaaaaaatccgtggtctaattgttgattgcattgttcagttgatcaaatcaaaagttggcagcataaagtcaggttggcgttgtgtgttcatgatattcaccgcggcagctgatgatgagaatgaacatattgttgaaagtgcttttgaaaatgtagaacaagttatcttggagcattttgatcaagttgttggtgattgcttcatggactgcgtcaactgtcttattggtttcgcaaataataaatgcacacctcgaattagtttaaaggctatcgctctcctacgcatatgtgaagaccgtttggcagagggttgcattcctggtggtgctgttaaacctgttgatgatgttccagaggcccattttgatgttactgagcattattggtttcctatgctagctggcctatcagatttaactttagaccccagaccagaagttagacactgtgcacttgaagtgttgtttgatcttctgaatgagagaggtcataaattctcctcacctttttgggagagcatttttcatcgtgtattatttcccatatttgatcatgtaaggcatgctggaagggatggcctttcttctggggatgactggcttcgtgataccagcattcattctctgcagttaatctgcaaccttttcaatactttctacaaggaggtgtcatttatgcttccacctcttttgggcttgctgcttgagtgtgccaagaaaacagaccagactgttgtttcaattgctcttggagctttagttcatctcatagaggttggtggtcaccaattcagtgacagcgactgggaaacacttctaaagagcattagagatgcatcatacacaacccaacctctcgaactcctcaattcagtaggatttcagaaaccaaacaatcagcaatcactttcaagagaagcagagaccaacggtcttggtagtagttaccatgatagcagggaaggaggagcttcaataagtcatattgatgaacaggatggtcatcaggaaacaaatgcacagactagcctagacaattcagaaggtttgccatctccatcagggagagcacaacctgcagtttccccacggggtcagacctttggacaaagaattatggggaatatgatggacaatcttttggtcaggagtcttacttccaaatcaaaaggtcgtacagacgatattgtgccaccctcacctgtgaaggcacctgatgctgacggggctgacaaaactgacgatgaagagaatcctatgatggagactgttaggagtaatacaagaggtactggagcaggctaaaaaccacacagcagactgcaataatggatattttgctatcactcctagaatttgcttcttcctataactcaacttcaaatcttcgaaccaggatgcaccatatacccccagaaaggcctccactgaatcttcttcgccaggaactagctggaactgctatctatttggagattcttcagaaatcaactgtggaacatgatgggaatgacccaagtgaggatacaaatgggcacgtcatagaatctgatgaacatgaaaagctcaagagcctcgcagaagggaagcttgtttcgttttgtgggcagatcttgaaagatgcttctgatctccagccaagcactggggaagctgcaagtgcagacatacaccgtgtactggacctaagagcaccagttattgtcaaggttttgaatggaatgtgtatcatggacgctcagatattcaagaagcacatcagagagttctatccattaattacaaaacttatctgctgtgatcagatggatgttcgtggtgcccttggtgaccttttcagcaaacaacttaccccactcatgccctgagttgtgattgtacctccttccgttgcatatatcttctcttgttggagtatattcagtattagcatttttgtgcaaacatggagcgtcagaaagaagcttaacgcccttaaaggcacacatctgagctcggtaggctgtaaattgacaagcttaaggtttttgcaggtgttctaagtacgcaagaaaattagctttgcatgttgcgcatgaaatttttccttgccactttcgttctatgtattattatttatctatgcggggactggaactatgcttctatacacaagtagaggattgaggcgagggaatagcattggctagtgctatgtatacattgttcaggatattgtactcgaggcgtgttgttatacggcaatactagattactcttggtagagcatctaggttggtgcattcaataaaagttgtgtcatcattgttgtcataaaaaaataaaaaaacaaaa

SEQ ID NO: 42507 - DNA, 519 bp, Oryza sativa
  Clone ID: PAT_MRT4530_45752C.1
tggtcaggagtcttacttccaaatcaaaaggtcgtacagacgatattgtgccaccctcacctgtgaaggcacctgatgctgacggggctgacaaaactgacgatgaagagaatcctatgatggagactgttaggagtaaatgtatcactcaattactgctacttggggccattgacagcatacagaagaggtactggagcaggctaaaaaccacacagcagactgcaataatggatattttgctatcactcctagaatttgcttcttcctataactcaacttcaaatcttcgaaccaggatgcaccatatacccccagaaaggcctccactgaatcttcttcgccaggaactagctggaactgctatctatttggagattcttcagaaatcaactgtggaacatgatgggaatgacccaagtgaggatacaaatgggcacgtcatagaatctgatgaacatgaaaagctcaagagcctcgcagaagggaagcttgtttcgttttgtgggcagattttga

SEQ ID NO: 42508 - DNA, 107 bp, Oryza sativa
  Clone ID: PAT_MRT4530_45753C.1
cggaacgaggggggactaccgaactccgttttatcgaacaggagagtctcggttttactcatgggaacgtaggaccttgctggtatatggattgcactcccatcatg

SEQ ID NO: 42509 - DNA, 1628 bp, Oryza sativa
  Clone ID: PAT_MRT4530_45754C.1
atcttgaagatgcttctgatctccagccaagcactggggaagctgcaagtgcagacatacaccgtgtactggacctaagagcaccagttattgtcaaggttttgaatggaatgtgtatcatggacgctcagatattcaagaagcacatcagagagttctatccattaattacaaaacttatctgctgtgatcagatggatgttcgtggtgcccttgagagggttggccccgcgagcggttacaagctgcagaagtgcagaggccattccgttccgcgtgtgtgcgcgtccacccgcctccccctccccttcttcaccgagagtcgtcgcggtcactcgtccgtatctgcctcggtgggggcggcggtgcgtgcgtgcgtgcgcggccgctgtatttggcaggactcctcgtctcgtcgtctccctctcccccgagaaaaccccaccccactactcctctccaccgccatcattgtcggcgcgagcgagagcccaagcccaagccgacccccgagggaaggggaagacggggccgagatggcggggcgctacgacagcaaccccttcgaggaggacgacgtgaaccctttctcggaacaagcgcgtggtaaggctggagggcagcccagctatggcggcggcgcgttctacatgccgaatccacggaatgtgccttctgtgtcgtcgaattcgcggctttcgcctcttccccctgagcccgcagcttttggggctacggtggatatccctcttgactcttccaaggacctgaagaatagggaaaaggagctgcaagctagggaagcggaattgaacaagagggagaaggagctaaaaaggagggaggaggctgcagcgcgagctggtattgtcattgaggagaaaaactggcctccatttctgccactcatccatcatgatatcaccaatgagataccgagtcaccttcaaagaatgcaatatgttgcatttgcatcatttcttggattggcttgctgtctcttctggaacgtcatagcagttacttcagcttgggtcaagggggaaggcgtgaagatatggttgctggcaatcatctacttcatctctggggttcctggtgcatatgttttatggtatcgacctctgtataatgctatgaggactgatagtgccttgaagtttggattgttcttcttggtttacctgttccatattcttttctgtgtattttctgctgtggctcctcctgttgtcttcgaggggaaatcattggcggggattttaccagcaattgatctcatcagcaagaatgctttggtggggatcttctactttgttggatttggattgttctgcgtcgaatcattgctcagcatctgggttatccagcaagtgtacatgtacttccgaggaagtggaaaagctgctgagatgaagcgtgatgcaactagggccgcactgcaccatgtcactggggtgaccctcgtacacacgtctcccgccgcggttgaagacgcagccaaccccacctacgtcttcgcggcagaggtagcggtcgtcatcgacgttggtccgcgggcgaacaggaataaaaggttggagttggaacacaagcgaggcgccgaggcaaacctcattggcgagtag

SEQ ID NO: 42510 - DNA, 1008 bp, Oryza sativa
  Clone ID: PAT_MRT4530_45755C.1
atgaagcaagttctggcccccataatagccttggtcattggaattggaacactagctttcatggccattagtcctcaggtttgccatgctgctgcaggaggaagtgctactgtggcgagaagcatcttcgtcagcaagaagggtagtggtgctgatttcacaaggatacaagacgccatcaactccgtcccattcgccaaccggcggtggatccggattcacatcgccgccggcgtctacaaggagaaggtgagcataccggcgaacaagagcttcatcttgctggaaggcgaggggaggcagcagacgtcgatcgagtgggcggaccacgccggcggcggcggcggggactccggcacggccgactcgccgacgttcgcctcgtacgccgccgacttcatggcccgcgacatcaccttcaagaacacgtacgggaggatggcgccggcggtggcggcgctggtggccggagaccggtcggcgttctaccggtgcggcttcgtggggctgcaggacacgctgagcgacctgctggggaggcactactacgagcgctgctacgtcgagggcgccgtcgacttcatcttcggggaagcccagtccatcttccaccgctgccacatctccaccgcggcggcggcggcgcccgggttcatcacggcgcagggccggagcagcgcgtccgacgcgagcgggttcgtgttcacctcgtgcaccgtcggcggcgccgccccggcgtacctgggccgcgcgtggcgtgcctacgcgcgcgtcgtgttctaccggacagccatgtccgccgccgtcgtcggcctcggctgggacgcctgggactacaagggcaaagaggagacgctggagatggtggagtcggggtgcacggggccggggtcgaacaggacggggagggtgccatgggagaagacgctgagcggggaggagctcgccaagctcgtcgacatctcgtacgtctcccgcgacggctggctcgccgctcagccacggtag

SEQ ID NO: 42511 - DNA, 1674 bp, Oryza sativa
  Clone ID: PAT_MRT4530_45756C.1
atggatcgcgagcggcggcggctgcgcggccgcggcgggaacaacaaccacccacggcgcgtcctggccgacgtcgtcatccgcttcgaccccacatggctggtgacgatcctcctgttgtcgcttctgctactggggaaggcgacggggaccacggcgacggtggtcgtctccggcagcatggagccagggatccggcggggcgacatgctcatcgtacgggagcggcgcaacgacggcgacggcgacgacaacatccgcgccggggacatcgtcctcttcagcaccgaactccaccccgtccccatcgttcatcgcgtcatcgagctccacgagcgacacgacggcggcgcgaggcagatgctaacgaaaggtgctaatatactgcactctctgtcaactctgcaccgaagcaagtgtgcgcaattcaccaacttggagattagtaacaatttgagcataggctctacagtctcgctgatcaaatccgcgccgaaaggcggtggtcggcagcaacgccgggcgaaggggatggagaaggtcgcggttggcttgttgccgccgctgcggttcatcgccgtcctcgccgtcgtgtcgtggacgtcgttcatctactgccatttctccttgctcagcggcgggttgctgctgggccacggcggcggcgacgacggcgccgacccgtgccgggggaggtacatctacgtgcacgacctgccgcgccggttcaacgacgacatcctccgcgactgccggaagacgagagaccactggccggacatgtgcgggttcgtcagcaacgccggcctcggccggccgctcgtcgaccgggccgacggcgtgctgacgggcgaggccgggtggtacggcacgcaccagttcgcgctggacgccatcttccacaaccggatgaagcagtacgagtgcctgaccaaccaatcggcggtggctgacgcggtgttcgtcccgttctacgccggcttcgacttcgtccgctaccactggggttacgacaacgcgacgagggacgccgcgtcggtcgacctcacgcagtggctcatgcggcggccggagtggaggcgcatgggcggccgcgaccacttcctcgtcgccgggaggacggggtgggacttccggagggacaccaacatcaaggcagacaagggtgcgcggcatgcaggcagccagtgccactccccgggcaacatcatgcggctgttccagaaggccaccttctgcctgcagccgccgggggactcctacacgcggcggtcggtgttcgactcgatggtcgccgggtgcatcccggtgttcttccacaacgcgacggcgtacctgcagtatgcgtggcacctcccccgggagcacgccaagtactcggtgttcatctccgagcacgacgtgcgcgccggcaacgtgagcatcgaggcgacgctccgggcgatccccgccgccaccgtggagcggatgcgggaggaggtgatccggctcatcccgtcggtgatctacgccgacccgaggtcgaagctggagacggtgagggacgccttcgacgtcgccgtcgaggggatcatcgacagaatcgccatgaccaggggaggctacgcgagatcgtggctccggcctaaacaatctaggcaagcactagacgctcgacgacgcagactaagttaa

SEQ ID NO: 42512 - DNA, 199 bp, Oryza sativa
  Clone ID: PAT_MRT4530_45757C.1
ctgcatcgtctaccagctgtagatctcaggaggaatctctgtgtcactgccactgatgatcattattgacacttatggtcactagtagacacaacttctcatagagactactatgagagtgatcgaaacaaagacaactgtaccggcacatacaacactaggtagcttgtccacagcatccaatctacagaggttggtt

SEQ ID NO: 42513 - DNA, 558 bp, Oryza sativa
  Clone ID: PAT_MRT4530_45758C.1
atggcagggcccccgcacggccacgtcgccgccagccgccgccccccgctccggcgccgggcgccacgggccgccaacacctccggctaccttccgctgctgaccggcggcgctaagaggcccgtcataaaaaatcaggttttcggtggcgtccgattttcgctggcggcagcgcgaggcaacggaggactgcacggtgaaggcagcgacgagctcgggcgcaggcgacggctggctctcgagcacatgggcgcgggtggcggctctcgggagcgggcggcagcgctcagacgtgggcgggaaggccggatccaccgccgccggaccatggggagggtggcattgacctcgacgccttcaaccgtgctctcggctccctcctctctgaccgttctgccctgtgctcccatctccctcctccccgactatgacaccgtcctgatcgcggcggcggcggttcccggcgaccgtgggcttgtgacggaggacaccggaggggcgagccgacgacctgattctgcgtcccctgaagggcttgctccgacgacgccggactga

SEQ ID NO: 42514 - DNA, 562 bp, Oryza sativa
  Clone ID: PAT_MRT4530_45759C.1
gcacgagggtctaatcctcgaatctctcgtggtgcccgtctaatctcgcgattttgatgctcgggggggaaagcgtaggaggatcccgtgcgagttagtctcaatctctcagggtttcgtgcgattttagggtgatccacctcttaatcgagttacggtttcgtgcgattttagggtaatcctcttaatctctcattgatttagggtttcgggagaatcgaggtagggatctgtgttatttatatcgatctaatagatggattggttttgagattgttctgtcagatggggattgtttcgatatattaccctaatgatgtgtcagatggggattgtttcgatatattaccctaatgatggataataagagtagttcacagttatgttttgatcctgccacatagtttgagttttgtgatcagatttagttttacttatttgtgcttagttcggatgggattgttctgatattgttccaatagatgaatagctcgttaggttaaaatctttaggttgagttaggcgacacatagtttatttcctctggatttggattggaatt

SEQ ID NO: 42515 - DNA, 257 bp, Oryza sativa
  Clone ID: PAT_MRT4530_4575C.1
gtagaacagcaatgacagcagcatggacaggggtatcagtagtgttagtagcacttccaatggaagtgaacatgcagttgctgcttaaggtggtgtcctttcagctgatgcatactcttgggtgtgccattattttgatttgccattctacattgttcggattatgaatgaattcattctttatacttccttccttctatcagctcttttttttttttttcaagtcttctcttatatactttatttttactaatttt

SEQ ID NO: 42516 - DNA, 327 bp, Oryza sativa
  Clone ID: PAT_MRT4530_45760C.1
accggcgggagcacggcggtcagaccggcggcggtgacaggcgcagcaagcgatctcggtggtcagaccggagattcaactcggtcagaccggcagaacatcttcggtgtgtgcctgcacatatcctcgagcaaagcgaaaggcgccggtgccttcgacgatcggcatctcacggacatcgtccactatgtggttgctgccgagcacggcatcctcgacggcacggacaaagcctactcctcggagaaaccttcatctgacacatactcgtactctgggaggccgtcgcagggcctgccccgctccatcacgcccacccttgcctag

SEQ ID NO: 42517 - DNA, 273 bp, Oryza sativa
  Clone ID: PAT_MRT4530_45761C.1
tgtcttctcttgagggcgaagtcgaagcaacacaccagcatcgcgtcggcaagggagggggtggaggccagccacgacagggagcacgacgaggtcggctgcctcggcaaggatggttgtgatgaggggtgccggatccgtgcaccactgctgctcccaacaacgggggagccagatccggccaaccccgaggctgcctccgcctccgctaaggctgcggtcatcgctctcaagggcgggagtgttggatctgcgcaccaccgccgctcctga

SEQ ID NO: 42518 - DNA, 221 bp, Oryza sativa
  Clone ID: PAT_MRT4530_45762C.1
gcaatgctccaccagaaaatggcttcatccacgctgaacgcatcgtacaagggcttcctagagatcgtctttcagaacaatgacactggtgttcagacctaccatctggatggatggataatggtgattggactccagattgcaggagtaggtacaacaaataggaggatgtctgtgcggtttcgtcttgtccgggcggcctatttaagggcggagcggtg

SEQ ID NO: 42519 - DNA, 579 bp, Oryza sativa
  unsure (1)..(579): unsure at all n locations
  Clone ID: PAT_MRT4530_45763C.1
atggcaatggcggacggcggcggcggtagcaaggcgcaggcggtgagggaggtgtgcgcggcgtcggcggcgttctccgcgtgcacgcaccggcgccggcagcgatccccgcccttcgtcgactggtacctcgtcctcgccgtcgccgacgccgccaccgaggacgccgtcaggcgccgctaccgccagctcgcgctgcagcttcacccggacaagaacacgcacgcaaaggcggaggtcgcattcaagatcgtctccgaggcgctgcgggaggtgcanaaccggctccgggacgagtgccgcgtcatcgacagctgcctcaaggccaacgccggcggtggcgcccggcggcgccagtcgttcccgctcttcgacccctccgaccggctgcggttccccggctacccggacacccgcccgcccccgccgccggcgttcgccgcggagttctgccggttcgaggagaacctcgccgccgatcggaaccagagatggtgcggcagcggcgccggcgagtcgccggtgtatcagatcagaaccgcgccggagcgcgccgcaagaacaaagcgtcattggtga

SEQ ID NO: 42520 - DNA, 570 bp, Oryza sativa
  Clone ID: PAT_MRT4530_45764C.1
atggccggcatcaactgctccattgtcccctgcagcgcgctcatggaggggaaagaattcaacttctccaacctctaccttcaccacacctatggcggcccgaagccgaaccagtcgacgatcataaacaataatggttctaccgggctgggaatgacggctgtcaacaattgggcggtgcttaagggatccaccctccaggtgatgggagtacctgttgaatgtggtgagtgggctattgttgggggaacaggggagttcattatggcatctggtgtcatctacaagaagtgccttcccaccaaggttgggccatggggtggaaatggagggacacctcaagatatcacagagactccaaagcgtctagaatccatcacaatacgcagtggcgaggttgttgattcaatctcatttagctactttgatcaagctggtcagaagcgcgtggctggcccatggggcggtcctggtgggaatctcaacacgaacaacagcagtgttgtaggtttctttgggcgcggcgggaagtacctcgacgcagttggcgtctacgtgcatccgctctaa

SEQ ID NO: 42521 - DNA, 783 bp, Oryza sativa
  Clone ID: PAT_MRT4530_45765C.1
atggcaatggcggacggcggcggcggtagcaaggcgcaggcggtgagggaggtgtgcgcggcgtcggcggcgttctccgcgtgcacgcaccggcgccggcagcgatccccgcccttcgtcgactggtacctcgtcctcgccgtcgccgacgccgccaccgaggacgccgtcaggcgccgctaccgccagctcgcgctgcagcttcacccggacaagaacacgcacgcaaaggcggaggtcgcattcaagatcgtctccgaggcgcacgcgtgcctcactgacggggctcgccggcgagccttcgacgacgagcgggcggcgagctactgcgccgcgtgccacgacaggttcaggcaccgcgcggagaggaggacgccggcggcggcgacggccaccggcggcgcgcagcacgggaagcaccgcggcggcggcggcggggggaggaggatgcccgtcgcggcgcaggcgctgcgggaggtgcagaaccggctccgggacgagtgccgcgtcatcgacagctgcctcaaggccaacggcggcggtggcgcgcggcggcggcagtcgttcccgctcttcgacccctccgaccggctgcggttccccggctacccgcacacccgcccgcccccgccgccgccgttcgccgcggagttctgccggttcgaggagaacctcgccgccgatcggaaccagagatggtgcggcagcggcgccggcgagtcgccggtgtatcagatcagaaccgcgccggagcgcgccgcaagaacaaagcgtcattggtga

SEQ ID NO: 42522 - DNA, 311 bp, Oryza sativa
  Clone ID: PAT_MRT4530_45766C.1
tcgttcacgcgtccggcaaagcttacgctttcttcataaaaatgtcacgagggacttatgttgtgtcacatagaggagcatgtccttgttttgtgacattggatctgccgcatggtgagcatctgctcggagagacttgctaggtccgcattgctgtcaagctcactagcagagcatggtcctgctccaatgatagatggcaaggatatagggagaattgatagcgctctagtcaggctacggtgatagcagctattgacaatatgctggatgagaagtgagtggcttccggattgaacaacacatgaggc

SEQ ID NO: 42523 - DNA, 1423 bp, Oryza sativa
  Clone ID: PAT_MRT4530_45767C.1
cacgcgtacgcgcacgtacgccgcatcgcatgcgcgcgctttccctcgccagagcaagtagcccgccgcctcttcttcttcacctccgacgagcccttgcacccgcgtcgtcgtcttctccggcgccggtgctgttgctgcgtcctgcggtttcttgttcttctttgtttgttagcgacagggcggcggcggctcgccggagcagcggcagcagcaggagaagcatggcgtcgcagcagttcccgccgcagaatcaggagacgcagccggggaaggagcacgccatggatccccgccccgaggccatcatccagagctacaagccagccaacaagctgaaggacaaggtggcgatcgtgaccggcggcgactccggcatcgggcgggcggtgtgcctgtgcttcgcgctggagggcgcgacggtggcgttcacgtacgtgaaggggcaggaggagaaggacgcggaggagacgctccgcgcgctgcgcgacatcagggcgcgcaccggcgccaaggaccccatggcgatccccgccgacctcgggtacgacgacaactgccgcaaggtggtcgacgaggtcgccggcgcgtacggcggcgccatcgacatcctcgtcaacaacgccgccgagcagtacgagcgcccctccatcaccgacatcaccgaggacgacctggaacgcgtgttccgcaccaacatcttctcctacttcttcatgtcgaagcacgccgtgaagcggatgcgcgatcgccgcggcggcgccggcgccggcgggtgcagcatcatcaacacgtcgtcgatcaacgcgtacaaggggaacaagacgctgctggactacacggcgaccaagggcgccatcgtggcgttcacgagggcgctggcgctgcagctggcggaggaggggatccgggtgaacggcgtcgcgccggggccgatctggacgccgctgatcccggcgtcgttcgcggaggagaaggtgaggcagttcggctcccaggtgcccatgggccgcgccggccagccgtcggaggtggcgcccagcttcgtcttcctcgccagcgacgacgcctcctacatgtccggccagatgctgcacgtcaacggcggcgtcatcgtcaacggctagtttttcacttgtcccatctcgccgccggcgggcgagctcgccgtcgccggccgccgtgtctgtcttggcttttgctgtgggcatgtgcccacgtgtttgcagtgcgagtccaccacgtgtcagtcagtagtagcttgtgatcctgtgatactgtgatgagtagagttgcagttgttgtctgtgtactaagcttgcaactcaatctgcaaggaagaagatgaataaaaacgtcccatctcatcgctaaaaaaaaaaaaaaagcaacaagaaagcccaaaaaaaaacaaaaaaaaacg

SEQ ID NO: 42524 - DNA, 323 bp, Oryza sativa
  Clone ID: PAT_MRT4530_45768C.1
atatgggtccatatttttaattcggatataatggcattggacctttaggcctacagagataatttagagagcggaggagcacgccgagaatacataccggtatccaaggggtatccaagatatctctacaggagaaaataacaaaaaggggaaaaacgcgacacaaaacagtctacgtgagaaaattttaataagataacaaactcacaaaaaacacgtaacactaaataagaaacgaaactcccggggaaccaatggaggactccaaaccaaaaaagtgggcaaagcaccagggcaggtgccaaataaggaaaactatagga

SEQ ID NO: 42525 - DNA, 732 bp, Oryza sativa
  Clone ID: PAT_MRT4530_45769C.1
ggcgaattcgagctcggtacccggggatcctctagagtcgacctgcaggcatgcaagcttccccagctgccgcagctggtccacgaccacgccgccgccaccgggacgaaccatggcgtgatgttctcgtcggaccatggctgcctgtacccgctgctcccggggatcccgttctgcctcgactccggctgcggcgccgccgcctgcgacgacgacaagcccgccggtttcgcgcacttgggctccgccgaggcggacacatcggcggcggcggcgagagtggatagcgagattgctgcagctgccaccgcaaccacttgccatgggcctaattcatggtggaaggggacggagaaggggaagatgaaggtgaggaggaagatgagggagccgaggttctgcttccagaccaggagcgatgtggatgtgctggacgacggctacaagtggaggaagtatggccagaaggttgtcaagaacagcctccacccaagattgcaatatttttcttcagagatacttagtacccgtaagaaggggaagcccctgagctactacaggtgcacccacaacaactgccgcgtgaagaagcgggtggagcggctgtcggaggattgccgcatggtgatcaccacctacgagggccgccacacccacaccccctgcagcgacgacgccaccaccggcgccgccggcgaccacaccgccagctgcgccttcacctccttctga

SEQ ID NO: 42526 - DNA, 930 bp, Oryza sativa
  Clone ID: PAT_MRT4530_4576C.1
actcctaagtcatagtaagattaaattcctgtttctgaagttactgctgcaatacataagctaggaacaaaataagcagccagattaaattcctatttctgaagcacatccagatctacagacaaccatatatagcagcagcagccatagaaaacgtagaagcagctcgcaaaacaaagcacgacgatgcagatttcgatccctgatactgtaagtataagcagcatgactagatgaggtctgctccagcaccacaagacgtctgcctccaatccttccattccagtgctgacgaagatgtcaggttcttgacaacctcctcttgattgcagtcgagcactcctccaaatcatcacgatccctcttgggtggaactggattctgaatgtgtttgggaaattctacacccaaaggctgtgttgggcaggaggagagcctggtggaggacatgatgttcttggtgtgcatgttgaggctgaccatgtacaccccttcttcagcagcattgagcatgaaacagatgacaccgttttcctccatgctcaggacggggctagtcggcttgaccttaggcaacccggccttcttgaagccctccagctcccacaggcttgccacacggagttccccatccttgtgccactgcgtggtggccagggtcagagtccaagtcgtcatcatagcttcatcagggggcaccatgtcaatagaagcgaacttgatggagtccttaacgcagttcattgtccggcataaccgcagctgattcttcatggggtcaagatggcactcaggcggcagcgggatgtagcggaacggcacatcgtagccaccggtgagcacgtcgtggcagctgcagtagaggacaccttgcgcgaggttggcccagaaagcctgacctccggacgagaacaccatatgcccggccgg

SEQ ID NO: 42527 - DNA, 377 bp, Oryza sativa
  Clone ID: PAT_MRT4530_45770C.1
ttttttttttttttttttttttttttttttttttttttttttttttttttttttttttttttttttggggggaacaaaactagctaatggttccagcatggcactatttttgccgcaagggctttaaaaaaactttacccattatttttccaacaaacatcacaggggggcgagcttaattgccccgcccaaaagccatattgtaagaggggaaaccagaaaagaaggcaaaagacctggcccgggaaaacgccaatctcctttttttccaggaaaaagcccccgctgttttgacactggcccgagcgggtcaaccttatccaaactggcgcgaaccccagggacttggatcggggtaggggggcacaattccttgg

SEQ ID NO: 42528 - DNA, 636 bp, Oryza sativa
  Clone ID: PAT_MRT4530_45771C.1
atggcgaccgagattgaagcatactacgacgatggcagtggcacctacctgttgtcgttcgacgaggacttcttcgacgcaacgctcaccaagtccggcggcaaggtggagtcttggctgggcgagacgtaccgcatccaccgcagctgcggccacccgctcgtcgtcggcctcgacgtggagtggcgccccgccgcccccgtgccgggccccgtcgccgtgctgcaactctgcgtcgaccgccgctgcctcgtcttccagatcctccacgccgactacgtgcccgacgcgctgtcccgcttcctcgccgatcccaggttcaccttcgtcggcgtcggggtccgcgacgacgccgccaggctgcgggtcgggtacgggctggaggtgccgcgcgccgtggacctgcgcgccctcgccgccgacacgctcgggaggcccgacctccgccgcgcggggctgcgggcgctggtgcgggaggtgatgggcgtgcagatggacaagccgcaccacgtgcgagtcagcgcctgggacaagcgcaacctctccgaggaccagttcaagtacgcctgcgccgacgcgttcgcgtccagggaggtcggccggaggctctacacctgcaactgcgacggcgcatga

SEQ ID NO: 42529 - DNA, 1098 bp, Oryza sativa
  Clone ID: PAT_MRT4530_45772C.1
atggggacgggatccaagaagaagaagacggtgtcgtggtgcacgacggaggtatcggagggcacgcacgcgttcaagatcgtcggctacagcctcaacaagggcatcggcgtcgggaccttcatccggtcgggcaccttcgccgtcggcggccacgattgggccatccgcctctaccccgacggagtcaccgaggattccatggactacgtgtcggtgtatctggagctgatgaccgagaacgccaaggccatggcgttctacacgctgggcctggttgatccggtcaccggagggatccgctgcaattggtcccgatcatcgccgaggctgttcgattcctccgattcgagccgtttcgggccaagatccccactcttcataccgagaagtgatctggagatggaggaatctggctacattgtgaatgatcgcctcacggttgaatgcgaggttactgtcaccaaggggccgcaggtgtcaagaaccattggttgctctgaaatcggcgtgccaccttcagagctatctgaacattttgggaagctgttggaggaggaagaggatgtagggagggatgtggttttcagtgtcgagggagagtccttcgccgcgcacaagctcgtgctcgccgcgcgatcgcccgtcttcaaggcggagttttacggggagatgattgaaaggggcacattttccatagatatcaaggacatgcagccttctgtcttcagggctctcctgcatttcatctacactgatgtgttgcctgctgacattggcgatcttgagggagatgattatgtcgaatttatccggcatctagtcgtggcggcggatagatatgccatggataggttgaagttgatgtgccaaagcatccttggaaagtatgttgatgtgaagaacgtggcgactacgctggctttagctgaccagcataactgtgataagcttaaggatgtttgcattcagtacatttgctctctggatgaggttgatgctatggtcaggaccaaaggctatgcaaatctcaaaagaagttgcccttctgtgttggcagatttatttgagaagacaagcaagttccgtgcttcttga

SEQ ID NO: 42530 - DNA, 366 bp, Oryza sativa
  Clone ID: PAT_MRT4530_45773C.1
atgtcgctccgccacgccgtgctgatgcagtcgcggatgcttctccgcagccgtcgacccttctccaccatcagcgccacggacgaggccaacatcctcaaagaacttgatgaattgaagacgaagacgaagaaggcaattattgaagatgtggagaaggtaaaaaggctggagaatgaagatagaaatgcgctcaaccggctgttgacttcctgcgggatgcccaggggtgcatttcgagataagctagtgtttggatgtcatgtagttgagttatttgctgcattcagtgcagttgggatatggaaagctggaagagatgctccacataaggatgcaaagtttgctactgatgcttctatttag

SEQ ID NO: 42531 - DNA, 360 bp, Oryza sativa
  Clone ID: PAT_MRT4530_45774C.1
atgggggctgaagtcgcgatcacgtcggcctacgtgtcgatcccggtctgcgtcgcgtcgcacgcaggccgcgtttgccagctccaagtcacgccgctcctcctcagctcgcaaagtagcagcagcagctgcagcctgcctggccgcctccgcggtgcgtgctgcttcagcgtctgccgccacgagacgtgccgccctcgtggctgcctgcagccgcgcctccgcttcctcacacgccgcgcgcgcttcctgcgcagccgctcacgcctcctgcgcaacccgcgcagcagcagtcgcatagccatcgccctcagcgtcgaccgccgaccgcctgctgcctcgtccgctggaagtgcttga

SEQ ID NO: 42532 - DNA, 279 bp, Oryza sativa
  Clone ID: PAT_MRT4530_45775C.1
atgatgcctgaacttggcactgtagattttgcgatcgacaattcaggcacccaaaatttcggtccggtcttcggtcataaccgaagtaaccgcatgttgttgagaaagggcccggagcatggtctagtggaggatgggaggcaaagacgggagatagcatctgtggatgacgacttgtcgaagatgaagggcgctggtctagacttgctgaggattagagaaggtgcacgcgggcgccgcccagtggggctgggggcggcgagcggcacggacccgtga

SEQ ID NO: 42533 - DNA, 667 bp, Oryza sativa
  unsure (1)..(667): unsure at all n locations
  Clone ID: PAT_MRT4530_45776C.1
ggatcccaactaaacaaatcacacaatatccccagttttttctctctttttcttttctacaattcaggagtagtaaccgatttttgaaatcgaaatacagggagcccctccctaaaaaaaaaattgatttatttatcttattattaatcaagaattttgtatatagctagaacggccctcacaaattgcgaatactaatttgttaagaatgaatcgaattgaagctatagcgtcatcatttgcgggaatagaaatatccgcgagatcgggattacaatttgtatcgattaaagaaatggttggaattcccaaagtgatacattctctaagagccgtatattcttcttgctgatcgaggatgattacaatatcaggcaatcccgtcatatatttaatcccgcctagatatgtttccaagcgagataattgtctcttcaacacagctgcatcccttttcggaagacggttgaatccctctgtcttttgttcagttctcaagtccctaaacttatgaagtctttnttcggtagtggaccaatttgttaacatgccggcgagccattttttattaacataatgacaccgagcccgtattgcagcccggcgacactaaatcagctgctttatttttntggtccaaccattaagaaattggttttccccctac

SEQ ID NO: 42534 - DNA, 494 bp, Oryza sativa
  Clone ID: PAT_MRT4530_45777C.1
cctcgcctcatccctttcagggaccaatcggtttttagccctacgcgcccctgcgatcgcgacgcccacgatagctaaatcccgaaagcaaataagcagtaatcggacagcgactcgaccgggattagttaaacaatggcttgattaattagatgctggaatttggagccttctgataagtttagggcctgtttggcacagctccagctccagcttcaccccttctggagctggagctcagccaaacagtttcggctccaccaaaacggggagtggagctgggtggagctctctcacaaaatgaactagagttgtggagttgggtttaggcagctccacaactccactccagactcaactcctggagttaaatttaggagttggagctgtaccaaacaggcccttagttttgcacttggtactttaatttttttttgagtgagtgtaaatttgtttctaaactttgtttatgaatttgttttgtattggtgcag

SEQ ID NO: 42535 - DNA, 173 bp, Oryza sativa
  unsure (1)..(173): unsure at all n locations
  Clone ID: PAT_MRT4530_45778C.1
ggccgcttttttttttttttttttcgcaagcattttaagataatgccacatacagaaaggctttgaacaaaagtattctagtacaggctgaacgtgcattcacgtacattcatagtatgttaactaactatgcatgtttcatcacaacgantttcaatagttgacctagtttg

SEQ ID NO: 42536 - DNA, 371 bp, Oryza sativa
  Clone ID: PAT_MRT4530_45779C.1
aaaaacgggggaatttccccccgggggaaaaaaaccctttcccaaggcggtccggatgatcccatcccctgcctgtttagtttacaatctagggctcctaaaattcccttccccggaaaaaacctgcccaacattgggcatgctctcatggggcccattgaaaagggcactgttccccctggaaatcttccccaggaaagcctccctgtggttgaagacaatttttttggccaaccctgaatccctgggagctttgaccaccgggttcccgggggtgggcccccccccggggtcccttcacccgtttaggaacccgattttttcgccccaccctttggaaccccctttgcccccacccccggataacctgg

SEQ ID NO: 42537 - DNA, 1128 bp, Oryza sativa
  Clone ID: PAT_MRT4530_4577C.1
ctagggatcaagccgcacgccgccatcggagtggccgggtctgtggcttagtgaagaaggaaacgagagaagaggtggcgtgcacgcagcagcacctgatgcgacacaagtcacgacgacctcggctcgagcccgcgccccgtctcgtcttccccgcgcggatttctcgtcggtttctcttgctggcgccgcttcttcctcttccactccaccggccaccacaacgccgccacgaaatcgctgccgttgtctaaaagaaagatctctccttctcgcttgacaggttgtcgtctcctctttgtcccctcgcctcttctttccgctctcgtctttctcctaggtggatttctctgcctgtgtctagatggtgcggagacggcggcaagcggtggggcagtgacggggacgatatgggcttgtgattccgatccggttgggaggtgacgacgatgacaccggtgaggtcgtcggtcgtcttgagaatgtgtgacaagatcggtaattttgtccatcttcttgtcacattcctgagcagcttcgcagtggccttcgcgcagcagaacagtaaacattcagtcttcccttcagttaactttgtgtacatgtcgccatgtctctgaacattcggtccgacaaatgcaggttgcgtcatgaagagcacgtacagctccaacgttccggagaacgtcgcagccggcatggccatgggcacggtcatagtgctcctcttctgtggctactccctggggatttcttatgatgccaagctgatcctggagaagggatatacatgcaccggagcacaagtgatgaatgtcatattcgtcgtgctcatcggcttgctagcttcaggtcaggcatctccaagcatgagagagtttgcaggaggccaggctgcagtatacaagatattggaaacaatcaacagggaacctaagatcgatgcatacagcaccacaggtaggaagctagatgacattcaaggggatattgagttcataagtgtttacttttcgtacctggcactaccatggtccaatgagaaaatattcagtgttctcgcttgccatacaaagtggtacaactgttgcatgcatttgttgttcgtcgagctcacctctttgcttg

SEQ ID NO: 42538 - DNA, 189 bp, Oryza sativa
  Clone ID: PAT_MRT4530_45780C.1
atgctgattgccaggtgcgagacggggaggcgattcccgtccggccagtccagcctagactctggcccgcagcccccgcagccagcggtagcccccgcctgccagtggccgcgcatgtgcccggtcgcctactgggacagtcctttctcggaaggcattttagggtggcctttgtcatctgttccatag

SEQ ID NO: 42539 - DNA, 2454 bp, Oryza sativa
  Clone ID: PAT_MRT4530_45781C.1
atgaggcgccgaaacctaatcatcacctccgactccgactccgacgacggcggcggcggcggcggcgcggccaccgcctccacccccgcgtccgcctcggcgtccgcctccttcccgagcgtaagcggcggcggctgcggcgatggctggccctcgccgcaaaaccctaggtcagtccccgttcagttcccctccccgtcctcgcctcccccttcccctcccatagagatttccgatgaggaggaggcggaggcggaggtggtggtggaggaggaggaggtggtggtggtggaggacgaggaggaggagtatgaggaggtggaggagatcgaggaccccgatggggactcccccttcgtcgacgcccccgagcacatctcccctccgccgccccctccgcctccggcgcgaacgccgatgccgacgccgacgccgaccccgaccccgaccccgacccgaccccccgttcccgtgtgggctgcccctcttccggcccgaaccccaactcctactccatctgcgccgccccgagccgcggcgccatcccctgcgggaaccccgtcgccgtccccgattccgccgtcgagcaccccggtgtctgcgctgagcgggccgctgcggcaggtggacgagttcctgagggggctcgggctgcggctgcgcccggagtggctcgagtcctgcgccgccggggtacccgggttctacggcctcggcggcgtggaggcgatggccaggcggtgcttcgagcagttcctcttcgccgacatgaacgcgtgcggcgcgggcgtgctcccggagggcgttgggagcatgcacaacgccgtcctcgatggccccctcgtgctgcaggttgatgagattgtcaacctgtcagctcctttaagggaaagatatcgtgatgcacatgcggggcccaaaagatgtttaaagttatcaatgacagatgggatccaacgcatatatggaatggaatacaggccgatcaaagacctggaagttcttgcccctgctggttttaagattgttataagaaatgtgcacataaggagaggcctttttatgctggtgcccgaggtcattgagattcttgggggtgttgatgatgaactggatgaagcacgtaataggcttgtttctgaagtaaacaaaccgccacgtggcaaaaggaaacaaggtggattaccattgtcttcgagagccactctagcagcctggccaacaaatgccaatgctacaaatgatgccgagcaaggagcctcagtgccaagaacagtgaatacccctcatccaaccagattaggtaatgcttcccatgcttctcaggttggtagaactacacaacctatggtggacaatcttatccctcatgttgtagtaagcaatgcccaagagcaaagccgacatatccaagaaatcaccatgcagggccaacctacttctcttaataggcacaataaagaagcttctgcatcatatagatataatgcccaatgcagcattagtggaactacacgagctatggcagacgaacatgttttagtaagcaatgcccaagagcaaagcccgcatatccaggaaatcaccatgcaggaccaatctacttctcttaatgggcgcaataaagaagcttctgcatctacttcttatagatataatgcccaatgcagcattagtggaactacacgagctatggcagatgaacgtgttgacccttcctttgttggtaataacgtacatgaacaaatgcaacgtgttcaaggtatcaccatgcaggaccacattagtgcttctagtgagagcaaaagggaactttctgtgactaccccttctggatatgattcccgacttgcgccacatggtgttggcaatactggcacaagaagtggggaagccacacgatcttcaaatgtggatgatgggatcaataacattgggcatccgatcagtctatgtggcgaaaatgaaaagccttttacttacatattcaacatgttagctgattggggtgttcaacaggatacagtaccttatattcaaggaaaaattaagggtttgatcacttctgtcaaacggtttcaatacaagcaatccatgcaatacgatctttatgtctacatagatgatggtagttttattacagaggcctttgttgaccgtgatattgtacagaacatgattggcctttccgctgaggagcttgcagctgctctttcttctggtggcccagcacaagccaatataagaaaaactatgaaagcatttgagcatttcctggtgaactttgagggcacaatccttattgagctcaacagagattcttctgttcctattgtacgtgagatgaataaaggttgttcaagttcggatgcgtggcagctgcttcggagggtgaaaacattttctggtcagggctacatgcggagcctggattttatggacaccactccatga

SEQ ID NO: 42540 - DNA, 205 bp, Oryza sativa
  Clone ID: PAT_MRT4530_45782C.1
gcccttgactgaaaattttccacggtaacaatatattaattgaattaacttcatctcatcgttgttacacaaagcatcatagctttcacagtgcacgcgctgaacacgtgctaaacaatacaccgaaacctgcgttttttttttcgtatttcttttcctggtgccttctcacgctacttactactcacaggctcactgctcataa

SEQ ID NO: 42541 - DNA, 615 bp, Oryza sativa
  unsure (1)..(615): unsure at all n locations
  Clone ID: PAT_MRT4530_45783C.1
cccaagtcgtagtggtttccagtctcaaacaaccgcgtcaggcgccccncagtgtgggtccccaaagcggntcagaccgtgtagaggcgaccagtcagcagtcgnaagtggcgtgcaagttcagagtggttnggaacggtgtntgtcaggtgtgtcgtgtagtgaaaacgcgtcggcatcacaccnagggcgtcagtagccccagtagggtagtgtacgtccaagtcgaccagtgtcantacgtgnggtaccagcgtcgtgttagtcagtgntggtagtagtagaaggtagacagagtcacgagaaaaccggtcaggtgagtcgtcctttgccgtggggaaaaagtgtaaggcgtgttgccgtgttgagcgtcgaaggaaagtgtgtcccacccgtaaagtagtgtggtaccgtaggtgtagaagtaggtgtgtccgcaagtaagtcccgtgtagtgtgtagtgtccgtcagtggtaaaaaaagtgcaggtgcgttggtagtacagaaatgtcgttgtgcccacgtaccgtggtaagttaaagatccatcagtggttagttaagtataggtacaaatcaagtaccctcccagtagttaaaaaaaaaaaaaaaaaa

SEQ ID NO: 42542 - DNA, 1563 bp, Oryza sativa
  Clone ID: PAT_MRT4530_45784C.1
atgccccagttcttcttcttcctcgcactaataccacaagagcttgccgacagcaacggctacctccactgtcgtgccaccggttccaccttgccggtggcgataggggtgctaccctacccgtcgtccctgcctttcatcttacccaccgcgatgggaggaggcctgccaacgtcgtccatgttgatggggacaaactcgccggtgacggaggtggagatactcggcatcgtcatagcccctggcggcaccgccgcctccatgtggcagtccatcgagaacctcttccgctacaacaagaccacacaggcgatccatctacaggctgaattctccaacctgccaccaccactacctcgcctgatgaaacatatgactttctttgacatcccagcagtacctgcaccgctagttgcaacccagccaacagcagccactgccatgccgccgaccgcgccgatcgcaccaaacaccgccactgcaccatctgcgccgatcgcaccatatgcttctacagctgccactgcaccatatgctcttacagctgccgcagcacttcgcatgcaaacccggtctcactctggcattcaccgcagcccgcgcgagcggctcaacctccatgcttcggccactactttgtcacctattcccaagtctattcgttcagccctaaatgatccgaattggcatgcagccatggccggtgttgattttggcgaaacatttagccccgtcatcaaacctaccattattcgggctatcctctccctagcccttacgtccaaatggccaatacaccaactggacgttaaaaatgcctttctccatggtcacctctcagaaacggtctaccgtcgccaacctaccggcttcatcgatgccaagcaccccgacgccgtatgttgcatgaacccttctctttacagcctcaaacaggctctccgggcctggttcgagcgcttcaaagcgtttgtccttggacttggcttcacggcggcaaaatcggactcctcactgttcatcttccggagctctctcggcactgcgtaccttctactatacgttgatgacataatattgacagcatcaagtgcctccttgctgcaacgcatcatcaaagccctcagctcggaattttcgatgaaggacatgggccctctacaccacttcctcagcgtccaagtccatcgcagtggcactacaatgctcctgcatcaggagaaatatgccaccgatctccttgatcgcgccgacatgacgtcgtgcaagccatgctcaactccggtcgacacttcgtccaagttgtctgccgccacaggcgttgccattgcagacccgacagcatatcgcagcatggctggagctctccaatacctgatattcacaaggccagacatagcatatgcagtacaacaaatatgtctacacatgcatgatccatgtgaaggtcacttgaacctggtgaagcgagttctctgctatatcaaaggtacactgcgtcacggcatacttctatcggcttcgttgccaaacaagttcaccgcttactcggacgccaactag

SEQ ID NO: 42543 - DNA, 3901 bp, Oryza sativa
  Clone ID: PAT_MRT4530_45785C.1
gcggccgcggccgcggccaccgccgctgctgaagcagccgctgcagccaagacagcccgtgcccagctttggtcccaagccgtcgccgtccacatcaagtctcttgtcccggtcgtcctcgacctctccaagtccaactacacccactagtgtactctgttcgaggttgccgtcggcaagttctagctgtctcaccacctctctccggcaagcccctccgcgccacccgtcgacgccgactagcgacggatggactacactatcctctcctggatctacggctccatctcccaggagatactcagcatcgtcatgacccccggcggcaccgccgcttccatgtggcaatccatcgagaacctcttccgcgacaacaagaccacacgggcgatccatctacaggccgaattctccaacctggtgcaaggcgatctctccgccaccgagttctgccacaagctgaagaccttgtccgactcccttcgggatgtcagccaaccagtgcctgaccaaactctcgttctcacgatgatcaagggcatgaatcccaagcacaagcacctgtcggctcttcttcccatgatgtcgccgttcccctccttcatccaggcgcggtcactccttctcctcgacgagatgaacgacgacgccggtgatccggcagctaaggccaccgcgctcgtcgctgactcccgctctacgccaacaccggccatcgacaacgggggtggctctcgtggcaacggcaatggcggcaagaaaggcaagggcaaaggcaagcagggcggcaacaagggctccaacaccaactccagcccgtcgcccctcccagtccagccgcactggaacccgtggaccagctagattcaactctggcccaccgcaggtcttcttgggccacgtcctggcgctgtcccacggcctgctgcaccccagtcctacatgaacacaccagggcatgcagcccatgccgttcccccagtgcacgccggcactccgtctactccgacatgggacgccaacagcatcgccaactccctcaatgccatgacgctgcagcagccgtccgaccagtggtacatggacaccagcgccaccgcgcatatgtcatccggctctggtaatatatccatctctgacaagccccctccacacacatgaattgttgttggtaatggtgcttctcttcctgttactgccactggttcccataaaatatccaccctctcccagcctttccacctccacaatatcttggtcacacctcacatcatcaagaacctcatctctggcaccgtcacctcggacatcccggacatcacacacaacatcacctagctggccactccattatttcgtctagctcaaataaagatagcatgctttgccatgcttgtcaattagggcgacaagttcgcctctcattttcgttgtcttcttcaaagaccactgttgcttttgaaataattcattgtgatgtctggacctcgccagtttccagtgtttctgggttcaaatattatcttctacttttagttgattttactcatcacctatggacgttccccttgcgtttaaaatccgaagtttttcagattctgtccaatttccactctcttgtacgcacccagttctccactgtcctgcgtgccattcagtgtgacaatggtagggaatttgataactcatccatgcaccaatttgctgctactcacggcatccaacttcggttttcctgcccctacacatcgcagcaaaacggcaaggctgaacggatgatacgcaccaccaatgaggtcgtccgttccctgctgttccaagcacatctaccaccaagcttttgggttgaggcactcaccacagctacacacgttctgaacataaactttctccccgttcgacggcttgcgtcttccttggctacccgcccaaccaccgtggttaccgctgcatggatctcgcctctcgccgcgtcatcatctctcggcatgtcgtctttgacgaaaacatgttcccttttgcagctaccaccactgcctcgcctgatgaaacatatgactttcttgatatcctagcagtacctgcaccgccagttgcaacccagccagcagcagccactgccatgctgccgaccgcgccgatcgcacccaacaccaccgctgcatctaccgctgcaccatctgcgctgatcgcacccaacaccactgctgcaccatctactcctacagctgccgcagcacctcgcatgcaaacccggtctcactctggcattcaccgcagcccgcgcgagcggctcaacctccacacttcggtcactgctttgtctcttattcccaagtctgttcgttcaatgttgaatgatcccaattggtatgcagccatggttgaggaatttcaggctctcacctccaacaatacctaggaacttgtctctccaccaccccgagggaatataatcactgggaaatgggttttcaaacacaaattccatcctgatggtttccttgaacgctacaaagcacgatgagttcttcgtggtttctcccaaaaggccggtgttgattttggagaaacttttagccccgtcatcaaacctgccactattcgggccgtcctctctctagcccttacatccaaatggccaatacaccaactggacgttaaaaatgcctttctccatggccatctctcagaaacggtctactgtcgccaacctaccggcttcgtcgacgccaagcaccccgacgtcgtatgttgcctgaatcgttctctctacggcctcaaacaggctccccgggcctggttcgagcgcttcaaagcgtttgttcttggacttggcttcacggcggcaaaatcggattcttcactgttcatctttcggagctctctcggtactgcgtaccttctactgtacgttgatgacataatattgacagcatcaagcgcctctttgctgcaacgcatcatcacagccctcagctcggaattttcaatgaaggacatgggccctctacaccacttcctcggcgtccaagtccaccgcagtggttatacaatgctcctgcatcaggagaaatatgccaccgatgacccgacagcatatcgcagcatggccggagctctccaatatctgacattcacaaggccagacatagcatatgcagtacaacaaatatgtctacacatgcatgatccacgtgaaggtcacttgaacctggtgaagcgagttcttcgctatatcgaaggtacactttgtcacggcatacttctgtcggcttcgtcgccacacgagctcaccgcttactcggatgccgactgggctgggtgccctgacactcgccgatcgatgtcgggcttctgcgtcttcctcggctccaatttgctgtcttggtctgccaagcgccagcctaccgtctcgcgatcaagtgccgaagctgagtaccgcgccgtcgctaacgcggtcgccgaaacaacctggattcgacaactcctccgcgagcttcatcaaccgcttcaccgagctacggtcgtcttctgcgacagcatctctgccgtctacatgtcagctaatcctgtgcagcaccaacaaacaaaacacattaaacttgatctgcactttgtccgtgagcgcgttgctctcggccaagttcgagttcttcatgtcccgtcgtccgcctagttcgtcgacgtcttcaccaaaggactgccgtcgtcgctcttcctcgacttcaggtccagcctcaacgtccgtgaactcccggctgagtctgcgggggtgtgttagcgtactgtacatcttgtatagcatagtagtctgtttgcatggatagatagcagcccaatcaacctaaactacttgtttctagtcatacgtaccgtaccgagtctctcgttcggttgt

SEQ ID NO: 42544 - DNA, 2723 bp, Oryza sativa
  Clone ID: PAT_MRT4530_45786C.1
atggcaggtcctcccggagcagtgccggcaatcaagatccgacagtggcggccgggagaagggcggtggccggcggggagaaagggcggcgtgcagcgatggtcgccggaggaggagaagatgcggccatgctgggaggcgtggcggtggcagctggaggaggacgtccgccacgcgctgctcccccccggtagtggcggcggcgcgggggtcctgggagtcgccgaggatgccgaggtcgacgtcgacgtcgtccgcggccacggccatggtgtccccgtccgcatccgcgtgcgccacagaagtggcggcatggggagcggcgcctcagctactgcagcggcggcgtcaatgggaggaaggggaagcggaagcttctcgctccagtgggctgctgctgacgagctcagtggcggtgaagcgcgacggatcgagcggcatgtcaccctcactcccctcttcttccacctctcaaccttttgtcggtggggagccggcgtggtgactgggcatcggcggtgcgcgggaacacaaggtaacgacggcgtgaaggagggcggcgtcgttggcgcggcaagggaggtgctggcgacgacgggggcggtgggagatgaggagagcatcggcagcgcgggagagggagagaagctaggcggcgaccgccgccggggagggcgtcgcgacgggcggcagagagatgggcggctgccggctgccggcgggaagaaggtgcagtgccccgcttcttgccactgccgctccgcccgccgccgctccacctgccccgctccgctccgcccgcggcccaccgccgccctgctctgctccggccgccccgctccgccggcccgctctggccaccaccgttccgcccccggacctgctccgctccggccgtctcgtccatcgcccgctctagtcgccgccgccccggtccaccgatcctctggttgtcggagcctcatcaatctcactcattctcactcgctccttgcccacgacgcgcacggccacgccgccatggccgcggccgcgctgctcctcctcgccgcggccgccgccgccgtcgtggttgccatggcgctcagatggctcctcctcctcgggggccccgccgccgggaggctggggaagagggcgcggatgccgccggggagcacgggcctgcctctgattggcgagacgctgcggctcatctcggcgtacaagacgcccaacccggagccgttcatcgacgagcgcgtggcgcgccacggcggcgtgttcaccacccacgtcttcggcgagcgcaccgtgttctccgccgacccggccttcaaccgcctcctcctcgccgccgagggccgcgccgtccactccagctacccgtcctccatcgccacgctcctcggcgcgcgctccctgctcctcacccgcggcgccgcgcacaagcggctccactccctcaccctcacccgcctcggccgccccgcgtcgccgcccctcctcgcgcacatcgaccgcctcgtgctcgccaccatgcgccagtgggagcccgccgccaccgtgcgcctcatggacgaggccaagaagatcaccttcaacctcaccgtcaagcagctcgtcagcatcgagccgggaccgtggaccgagagcctccgccgcgagtacgtcaagctcatcgacggcttcttctccatcccctttcctctcgccaacctcctcccttttaccacctacggccaggccctcaaggcgaggaagaaggtggccggtgcactgcgggaggtgataaagaagaggatggaggagaaagcggagaatggtggctccattggggatgatgaggggaagaaggagaagaaggacatggtggaggagcttcttgaggcggagggtggcagcttctcggaggaagagatggtggatttctgcctttctctgctggtggctgggtatgagactacgtccgtgctcatgacgctcgcggtcaagttcctcactgagacgcctgctgcgctagctgagctcaaggaagagcatgccaatatcagggatatgaaagggaaaaaccaaccactagagtggagcgattacaagtccacgccaaacacccgaagggggaagaatgagacactccgtgtgggtaacattattagtggagtattcaggcgaggacacactgttactctgtttatagattacacaattccaaagggatgcaagatttttgcttcattccgagctgtgcaccttaataatgaacactacgagaatgctcggacatttaacccttggagatggcagatcaacaataaacttcagaatgcggtaggggccaatatatttactccatttggtggtggacctcggttgtgtcctggctatgagcttgcccgggttgtcgtttctatcttcctccatcatcttgtaacgcgctttagctgggaagaaaccgaagaagatagacttgtcttcttccccaccacacgaactctcaaaggataccctatcaatcttcggctgctttcagaatcaatttgctgacgttagattgttttgcagctgctcttatcttggaagaaagactaaacatagataaatttatagaaaaatagttctcgcataggtagtgcatttccctcttttttgttgatctgtaacctggtatgtaaacagtaggcagcagagttgtgctgcttgtaaaatgacctaaaatgctgtggataccggttacaagcaac

SEQ ID NO: 42545 - DNA, 2826 bp, Oryza sativa
  Clone ID: PAT_MRT4530_45787C.1
gactactatgctatacaagatgtacagtacgctaacacacccccgcagactcagccgggagttcacggacgttgaggctggacctgaagtcgaggaagagcgacgacggcagtcctttggtgaagacgtcgacgaactaggcggacgacgggacatgaagaactcgaacttggccgagagcaacgcgctcacggacaaagtgcagatcaagtttaatgtgttttgtttgttggtgctgcacaggattagctgacatgtagacggcagagatgctgtcgcagaagacgaccgtagctcggtgaagcggttgatgaagctcgcggaggagttgtcgaatccaggttgtttcggcgaccgcgttagcgacggcgcggtactcagcttcggcacttgatcgcgagacggtaggctggcgcttggcagaccaagacagcaaattggagccgaggaagacgcagaagcccgacatcgatcggcgagtgtcagggcacccagcccagtcggcatccgagtaagcggtgagctcgtgtggcgacgaagccgacagaagtatgccgtgacaaagtgtaccttcgatatagcgaagaactcgcttcaccaggttcaagtgaccttcacgtggatcatgcatgtgtagacatatttgttgtactgcatatgctatgtctggccttgtgaatgtcagatattggagagctccggccatgctgcgatatgctgtcgggtctgcaacggcagcgccgacggcggaagacaacttggacgaagtgtcgaccggagttgagcatggcttgcacgacgtcatgccggcgcgatcaaggagatcggtggcatatttctcctgatgcaggagcattgtataaccactgcggtggacttggacgccgaggaagtggtgtagagggcccatgtccttcattgaaaattccgagctgagggctgtgatgatgcgttgcagcaaagaggcgcttgatgctgtcaatattatgtcatcaacgtacagtagaaggtacgcagtaccgagagagctccgaaagatgaacagtgaagaatccgattttgccgccgtgaagccaagtccaagaacaaacgctttgaagcgctcgaaccaggcccggggagcctgtttgaggccgtagagagaacgattcaggcaacatacgacgtcggggtgcttggcgtcgacgaagccggtaggttggcgacagtagaccgtttctgagagatggccatggagaaaggcatttttaacgtccagttggtgtattggccatttggatgtaagggctagagagaggacggcccgaatagtggcaggtttgatgacggggctaaaagtttctccaaaatcaacaccggccttttgggagaaaccacgaagaactcatcgtgctttgtagcgttcaaggaaaccatcaggatggaatttgtgtttgaaaacccatttcccagtgattatattccctcggggtggtggagagacaagttcctaggtattgttggaggtgagagcctgaaattcctcaaccatggctgcataccaattgggatcattcaacattgaacgaacagacttgggaataagagacaaagcagtgaccgaagtgtggaggttgagccgctcgcgcgggctgcggtgaatgccagagtgagaccgggtttgcatgcgaggtgctgcggcagctgtaggagtagatggtgcagcagtggtgttgggtgcgatcagcgcagatggtgcagcggtacctataggagagagaccgtcagactcagaactcagacgcgactcgcgagttggaggcggagcggcggctgcggcgtccagatcgcggcatcgcggcgccggcgtgccctcacgcccaccgcccgtggcgccggcgccccaccgcccactatgcagcggtggtgttgggtgcgatcggcgcggtcggcagcatggcagtggctgctgctggctgggttgcaactggcggtgcaggtactgctaggatatcaagaaagtcatatgtttcatcaggcgaggcagtggtggtagctgcaaaagggaacatgttttcgtcaaagacgacatgccgagagatgatgacgcggcgagaggcgagatccatgcagcggtaaccacggtggttgggcgggtagccaaggaagacgcaagccgtcgaacggggagaaagtttatgttcagaacgtgtgtagctgtggtgagtgcctcaacccaaaagcttggtggtagatgtgcttggaacagcagggaacggacgacctcattggtggtgcgtatcatccgttcagccttgccgttttgctgcgatgtgtaggggcaggaaaaccgaagttggatgccgtgagtagcagcaaattggtgcatggatgagttatcaaattccctaccattgtcacactgaatggcacgcaggacagtggagaactgggtgcgtacaagagagtggaaattggacagaatctgaaaaacttcggattttaaacgcaaggggaacgtccataggtgatgagtaaaatcaactaaaagtagaagataatatttgaacccagaaacactggaaacggcgaggtccagacatcacaatgaattatttcaaaagcaacagtggtctttgaagaagacaacgaaaatgagaggcgaacttgtcgccctaattgacaagcatggcaaagcatgctatctttatttgagctagacgcaatactggagtggccagctaggtgatgttgtgtgtgatgtccgggatgtccgaggtgacggtgccagagatgaggttcttgatgatgtgaggtgtgacgggctggagttggtgttggagccct

SEQ ID NO: 42546 - DNA, 426 bp, Oryza sativa
  Clone ID: PAT_MRT4530_45788C.1
atgacggcaagttatggtggtgggttccggatcgagctagatgtggtagcaaagcacggaggtggagcagactgtggccctgacggggttgccgtggaagggtcagtgcctcgtgacaaccgcaatggatcggcggcgtccacatcgaggcaggcgtcgcgggtccagaggggatcccgcaggcgaggcggcaagggaggagatcgcgcgaccggcggcgcgattagggttaggggaggcaatggcatggtgagagggatgcgggaaggggcgccgtcgcgctggcagcgtcgatcggtggggcgtcgtgagagcgcgagggaggaggagcaatctgagaggcgtgattttcggctgacggggatgggtgcgggaggtaaggctgagggggagacttcgggtgatcagagccgtttgattcaatga

SEQ ID NO: 42547 - DNA, 2178 bp, Oryza sativa
  Clone ID: PAT_MRT4530_45789C.1
atgtcgcacagctccggcgcttccgacgcctcgtccacctctgacgaagagcctgtgccggcgccctccacctctgttcttcaaaccgtcaacatccgctcccacgtcccggtcgccctcgatctcgacgtctccaactacagccagtggcgctgcagcttcgaatcggtcctcggcaagttcggccttgaggcccatgttcaggagccgcccgctctcgacctccgcactgccgagtggcgccgtgcggatcactgcgtggtcaattggctgcacaactccatcgccaagaacatcttcgacgtcgtctacaagccccgcgcctctgccttcaccgtgtggagcgacatcgaaggcgtcttccgcgacaacgccgtccaacggtctgtctaccttgagaccgagttccgctcgatcaatcaaggtgacatgaccatcacgcagtacaccgccaagctgaagcaactcgccgacggcctccgcgacatcaacatgcccgtgtctgagcccagccaggtgctcaacctcctgcgcggcctcaacaccaagttccgctccctccgtgccagcatcgccgaccggaatccgccgcacactttcatgaccgcgcgctcctacctgctgctggcggagcatcccggcaagtgggtcttcaagaccaagcttcatgctgacggctcactcgacaagtacaaggcacgttgggtggttcgcgggtttaaccagtgcccgggcgtcgactttggcgagacattctcgcccgtcgtcaaaccagcgaccattcgcaccgtgctgacgctgatttcctccaagcaatggccggtgcatcaactggacgtttcaaacgcgttcctgcacggccatcttcaggaacgtgtcctgtgccagcagcccacaggctttgaggatgctgctcgcccggcggacgtgtgcctcctctcccgctcgctgtacggtcttcgtcaagccccgcgcgcttggttcaagcgcttcgccgatcatgtgaccagcctcggcttcgtccagtcccgcgccgacccctccctgttcgtgctgcgccgcggctccgacacggcctacctcctcctctacgtcgacgacatgatcctctccgcgtcctcgtcgagcttgctgcagcgcatcatcgatcgccttcaagcggagttcaaggtcaaggacatggggcccctgaagtacttcctcggcatcgaagttcagcgcactgccgacgggttcgtcctcagccagtccaagtacgccaccaatgtcctcgaacgtgcaggcatggcgaactgcaaggccgtggccactccggcggacgctaaacccaagctgtcaagcgacgaggggcctctcttccaggactcctcctggtaccgcagcattaccggcgctctccagtacctgaccttgacgcggcccgacatcgcctacgccgtccagcaggtgtgcttgcacatgcatgctccgcgcgaagctcacgtcaccctgctgaagcggatcctgcgctacatcaagggaacggccgcgtttggcttacaccttcgcgcctcgacgtcgccgacgctcaccgccttcagcgacgcagattgggccggctgccccgacacccggcgttccacgtccggcttttgcatcttcctcggcgactccctcatctcctggtcgtccaagcggcagacgaccgtctcgaggtcaagtgcggaagccgagtacagaggtgtggcgaacgcggtggcggagtgcacttggttgcgccagctgctcggtgaactccactgccgcgttccacaggcgacgatcgcttactgtgacaacatctccagcgtctacatgtccaagaatccggtgcaccacaagcggatcaaacacatcgagctcgacatccacttcgtcagggagaaggtcgcgctcggtgaacttcgcgtcctaccgatatcgagtgcccatcagttcgcggatgtgttcacaaaagggcttccttcaagcatgttcaacgagttccgagccagtctctgcgtcggtgatacgacggctgcgactgcgggggggtgttggcgaacggcttcgtcagactctcgcggcgcgctccacgcgcacgacgcgcaccccgcgcatgacgcgcagcgctcctcgctccgctcgcaccgctgcacgtccgttagaccaggggattag

SEQ ID NO: 42548 - DNA, 2411 bp, Oryza sativa
  Clone ID: PAT_MRT4530_4578C.1
aacaaagatgtcctcaaactagaccaaatttctggtcaggtcaaagtccatcaatcaaaactcctatattattacttcctttttatgcagtacaatcagggtcgtgtactgatgaaaaatctagcaacctgaaaatatcaacgaggaattcttcttagtcctactaatcttcatattaacctcttacctctacaagagtcaagaaacatcccctgttgtataagcacgaactgaatatatattttttttaaaggaaggcaaaagctttgccttgtatatattaatagagcaggagaaaattatagcaagatatatacagggatagatgaaaaaaagcgaaacaaataacccgcaaaaagatgaggcaaaaagcagggcacgaactgaatatatacgtgggcaggaatgtcaagtcgctatcctagtttgcttcagtcatcctctgagattgcacttgactttgatgaagaattgcagcaatcatccatctcagagatgtgatcatccacaccaaagaaaggtctcggaggtacctgcaggttatcaggatcatcagattcgagcatctccacaacctcgctcatcgaaggccgttcagctggtttcatctgaatgcaccagaacccaacaatgcacaacttcctttctacccagtggataccaatatcctctgaaatctcgctcacttcttgttgagttaggcaatcatacaccaaagctgggtaataaagatgggctgagttggatgtatgctgctccctgttcctcctaccaccagcaatgtccagcaataacatcccaaagctgtaaacatcagccttgcatgaaatggtgccaaagcttcgagatatcatctcaggagcgatgtaccctatcgttccccgtgcagcactcaccggcaccaagctgtcgtcccttgggtatagcttggccagcccaaagtcggcgacttttggagtgaagttgctatccagaaggatgttgtgtggcttgatgtcaaagtgcatgatctgcatatcacaaccatgatgcaagtagtcgatccctctagcaattcctagagcaatctcattgagcttgtcccaagatagactcttctcgggtgagaaaatgtacttgtctagagatccacagggcatgtactcatatacaagagccctcctaagttcctccgagcaaaatccaacaaggcgcaccacattcacatggtgtatcctgctaatggtggaaacctcgctgatgaattcttctccattgcacatggagttgctcagcatcttgatagcaacatgaccatcgccaggaaggaaacctttgtacacagaaccatagcccccctggcctagcttctccctgaaatggcctgtgattgcagtgatttctgtgtacgcatacctctttggaccatgagcttgctgcattcggagaaacttctctactgcgtcgatagatatccttgttccccggtatttgtaaccgaggaaggtcaaaacagtcaacggcgccaagatgaacctgcatagtactataatgcacttaacaatctctacggcaaataccagaacgagagtaacccaaacttgcgtggcactagagtaataattaattacacatcctaaaaattgtagctcggtcccaataatggcagaagtccagttttgaatgttcctactatacatttgctccttaaagttttggaatgtatctctcgcacaggctttgatgactggagaatgacttggggattcaactcgaggaaacgaaacaggaaaaccattcctcatgaatttcacaacatctgcatagcttgcatagtctggtacattctttgtacgatcatccacaggaatcacagccaagtatccacaagaaggctcgatgttttgaacatagtaagagctcgatgtagtcaagacataaacaaaagaagtattcccactcaagcaagcaacaggcatgtacatgccattgtttatcgcccgtgagcaatttagaaatgtagcccaccgaactgcagaagtgtacagcttagtgcccatgtcattgaagtagggaagattattccacagtggaagagggcaactgctgttgtctaaattagcatcaacaacccaaaatctagactcgttataggagatgtctttcacaaaatattttcctgtgttgatgtgaattatagctctgccatctctacagactagctcataagcttcatcaccacagccaagtggatcaccttgtaaacggaaagggtacctgataccttcaagatgtccacaggagaaaggaacgcaagctggttgttcttgaaaatcagcagctccactcttagtaacaagaaccccaagaacagctagtatactcaagctttgaaagataccagggagaaagagtgcaccagaaatggccat

SEQ ID NO: 42549 - DNA, 2619 bp, Oryza sativa
  Clone ID: PAT_MRT4530_45790C.1
atgtcgcacagctccggcgcttccgacgcctcgtccacctctgacgaagagcctgtgccggcgccttccacctctgttcttcaaaccgtcaacatccgctcccacgtcccggtcgtcctcgatctcgacgtctccaactacagccagtggcgctgcagcttcgaatcggtcctcggcaagttcggccttgaggcccatgttcaggagccgcccgctctcgacctccgcactgccgagtggcgccgtgcggatcactgcgtggtcaattggctgcacaactccatcgccaagaacgtcttcgacgtcgtctacaagccccgcgcctctgccttcaccgtgtggagcgacatcgaaggcgtcttccgtgacaacgccgtccaacggtctgtctaccttgagaccgagttccgctcgatcaatcaaggtgacatgaccatcacgcagtacaccgccaagctgaagcaactcgccgacggcctccgcgacatcaacatgcccgtgtctgagcccagccaggtgctcaacctcctgcgcggcctcaacaccaagttccgctccctccgcgccagcatcgccgaccggaatccgccacacactttcatgaccgcgcgctcctacctgctgctggcggagctccagatgcagcacgacgccaaggctgaagccggggaggccctctacgccggcaccgggtcttcctccggcacctccgacaccaccggccagcctcgtcccaagggacggggcaagcgtcgtggccggggcggcggcgccccacctggcggcgctccttcgactcctggcggcggcgctggtgccgggcacgacggccagcctcgccctcctgcgccttggggctacaacccctggacaggctttgtccaggcctggcctttcccgttccgggctcccggcgcgggtgtgttgggccctcgcccgccgttccaggcccaacaggccatgaccgcgcagcacctgcttccggctcttcctccggcatctgaggtgtttcatactgttcgttccttctttgcttatgcacacacacagcaaacccaacccgcggctgagtttgacgccctgctcgcgaacaggacgtggactctggttccccggcctcccggtgctcggatcatcaccggcaagtgggtcttcaagaccaagcttcatgctgacggctcactcgacaagtacaaggcacgttgggtggttcgcgggtttaaccagcgcccgggcgtcgactttggcgagacattctcgcccgtcgtcaaaccagcgaccattcgcaccgtgctgacgctgatttcctccaagcaatggccggcgcatcaactggacgtttcaaacgcgttcctgcacggccatcttcaggaacgtgtcctgtgccagcagcccacaggctttgaggatgctgctcgcccggcggacgtgtgcctcctctcccgttcgctcctcggcttcgtccagtcccgcgccgacccctccctgttcgtgctgcgccgtggctccgacacggcctacctcctcctctacgtcgacgacatgatcctctccgcgtcctcgtcgagcttgctgcagcgcatcatcgatcgccttcaagcggagttcaaggtcaaggacatggggcccctgaagtacttcctcggcatcgaagttcagcgcactgccgacgggttcgtcctcagccagtccaagtacgccaccgatgtcctcgaacgtgcaggcatggcgaactgcaaggccgtggccactccggcggacgctaaacccaagctgtcaagcgacgaggggcctctcttccaggactcctcctggtaccgcagcattgccggcgctctccagtacctgaccttgacgcggcccgacatcgcctacgccgtccagcaggtgtgcttgcacatgcatgctccgcgcgaagctcacgtcaccctgctgaagcggatcctgcgctacatcaagggaacggccgcgtttggcttacaccttcgcgcctcgacgtcgccgacgctcaccgccttcagcgacgcagattgggccggctgccccgacacccggcgttccacgtccggcttttgcatcttcctcggcgactccctcatctcctggtcgtccaagcggcagacgaccgtctcgaggtcaagtgcggaagccgagtacagaggtgtggcgaacgcggtggcggagtgcacttggttgcgccagctgctcggtgaactccactgccgcgttccacaggcgacgatcgcttactgtgacaacatctccagcgtctacatgtccaagaatccggtgcaccacaagcggaccaaacacatcgagctcgacatccacttcgtcagggagaaggtcgcgctcggtgaactccgcgtcctaccgataccgagtgcccatcagttcgcggatgtgttcacaaaagggcttccttcaagcatgttcaacgagttccgagccagtctctgcgtcggtgatacgacggctgcgactgcgggggggtgttggcgaacggcttcgtcagactctcgcggcgcgctccacgcgcacgacgcgcaccccgcgcacgacgccgcgctcctctcgcaccgctcgcaccgctgcacgtcccttagatcaggggattag

SEQ ID NO: 42550 - DNA, 4245 bp, Oryza sativa
  Clone ID: PAT_MRT4530_45791C.1
atgtcgcacagctccggcgcttccgacgcctcgtccacctctgacgaagagcctgtgccggcgccttccacctctgttcttcaaaccgtcaacatccgctcccacgtcccggtcgtcctcgatctcgacgtctccaactacagccagtggcgctgcagcttcgaatcggtcctcggcaagttcggccttgaggcccatgttcaggagccgcccgctctcgacctccgcactgccgagtggcgccgtgcggatcactgcgtggtcaattggctgcacaactccatcgccaagaacgtcttcgacgtcgtctacaagccccgcgcctctgccttcaccgtgtggagcgacatcgaaggcgtcttccgcgacaacgccgtccaacggtctgtctaccttgagaccgagttccgctcgatcaatcaaggtgacatgaccatcacgcagtacaccgccaagctgaagcaactcgccgacggcctccgcgacatcaacatgcccgtgtctgagcccagccaggtgctcaacctcctgcgcggcctcaacaccaagttccgctccctccgcgccagcatcgccgaccggaatccgccacacactttcatgaccgcgcgctcctacctgctgctggcggagctccagatgcagcacgacgccaaggctgaagccggggaggccctctacgccggcaccgggtcttcctccggcacctccgacaccaccggccagcctcgtcccaagggacggggcaagcgtcgtggccggggcggcggcgccccacctggcggcgctccttcgactcctggcggcggcgctggtgccgggcacgacggccagcctcgccctcctgcgccttggggctacaacccctggacaggctttgtccaggcctggcctttcccgttccgggctcccggcgcgggtgtgttgggccctcgcccgccgttccaggcccaacaggccatgaccgcgcagcacctgcttccggctcttcctccggcatctccaggagttcactccaccggcgcctgggacaacagtgcgctctacagcgccttgcagtccgccggcgtcgccaccaccactcctccgagcgctgcggattggttcctcgacaccggtgcgtcagcacatatgtcctccacccctggtattcttgctcatccccgtcctcttcctttctcctcttgtatcactgtcggcaatggtgccaagctgcctgtcacgcatacagcttccacccacattcccacatcctccactgatctacaccttcataacgtgcttgtttctcctcccttgattaagaatttgatctctgtgaaaaagctaactcgtgataataatgtctccattgaatttgatccaactggtttctccatcaaggatcttcaaactcaggtggtgaagctccgctgtgacagcccgggtgacctgtaccccctgcgtctgccatcgccacacgccctctctgcgacttcctcgccgtcggtggagcattggcatctgcggctcgggcaccctggctctgcttccctgtccaaggttcttggttcctttgatttccaatgtaataaatcagccccccatcactgttctgcttgtcatgtaggcacgaatgtgcggcttcctttccactcttcatctagtcagactctatttccctttcagttagtgcatacagatgtttggacctctcccatttatagcaattccggttacaagtattatgtggtatttcttgatgattttacacactatatttggacctttcctgttcgcaataaatctgaggtgtttcatactgttcgttccttctttgcttatgcacacacacagttcgggctccccgttttagctctgcaaactgacaatggcaaggaatacgattcttatgcacttcgctcactcctgtctctccacggagctgttcttcgcctctcctgcccctattcctctcaacagaatggcaaggcggaacgtatcctccggacgatcaatgactacgtgcgcacaatgcttgttcacagcgctgctcctttgtctttttgggctgaagccttgcagacggcgacgcatctgatcaaccgacggccatgccgcgccacgggctccctcacgccgtaccagctgctgctcggcgctcccccgacgtacgatcatcttcgcgtgttcggctgcctctgctaccccaacaccatcgcgacagcgccgcacaagctcagcccgcgatccctggcgtgcgtcttcatcggctacccggctgaccatcgtggctatcgctgctacgacatggtctcccgccgggtgttcacgtcgcgccacgtcacgttcgtcgaggacgtgttccccttccgcgacgcgccatcgcctcgcccgtcagctcctccgccaccggaccacggcgatgacactattgtgctgctgcctgctccagcacagcacgtcgtcacacctgtcggcaccgccccagctcacgacgccgcatcgcctccgtcgcccgcgtcgtccacgcccagcagtgctgctccggcccacgacgtcgcgccgcctccatcacccgagacgtcgtcgccagcgtccgcctctccacctcgacacgccatgacgacgcgtgcgcgggctgggatcagcaaacccaacccgcggtacgccatgactgccacgtcgaccctgtcgccgacaccttcgtctgttcgcgcggcgctccgggatcccaactggcgcgcggcgatgcaggctgagttcgacgccctgctcgcgaacaggacgtggactctggttccccggcctcccggtgctcggatcatcaccggcaagtgggtcttcaagaccaagcttcatgctgacggctcactcgacaagtacaaggcacgttgggtggttcgcgggtttaaccagcgcccgggcgtcgactttggcgagacattctcgcccgtcgtcaaaccagcgaccattcgcaccgtgctgacgctgatttcctccaagcaatggccggcgcatcaactggatgtttcaaacgcgttcctgcacggccatcttcaggaacgtgtcctgtgccagcagcccacaggctttgaggatgctgctcgcccggcggacgtgtgcctcctctcccgttcgctgtacggtcttcgtcaagccccgcgcgcttggttcaagcgcttcgccgatcatgcaaccagcctcggcttcgtccagtcccgcgccgacccctccctgttcgtgctgcgccgtggctccgacacggcctacctcctcctctacgtcgacgacatgatcctctccgcgtcctcgtcgagcttgctgcagcgcatcatcgatcgccttcaagcggagttcaaggtcaaggacatggggcccctgaagtacttcctcggcatcgaagttcagcgcactgccgacgggttcgtcctcagccagtccaagtacgccaccgatgtcctcgaacgtgcaggcatggcgaactgcaaggccgtggccactccggcggacgctaaacccaagctgtcaagcaacgagggcctctcttccaggactcctcctgctcacgtcaccctgctgaagcggatcctgcgctacatcaagggaacggccgcgtttggcttacaccttcgcgcctcgacgtcgccgacgctcaccgccttcagcgacgcagattgggccggctgccccgacacccggcgttccacgtccggcttttgcatcttcctcggcgactccctcatctcctggtcgtccaagcggcagacgaccgtctcgaggtcaagtgcggaagccgagtacagaggtgtggcgaacgcggtggcggagtgcacttggttgcgccagctgctcggtgaactccactgccgcgttccacaggcgacgatcgcttactgtgacaacatctccagcgtctacatgtccaagaatccggtgcaccacaagcggaccaaacacatcgagctcgacatccacttcgtcagggagaaggtcgcgctcggtgaactccgcgtcctaccgataccgagtgcccatcagttcgcggatgtgttcacaaaagggcttccttcaagcatgttcaacgagttccgagccagtctctgcgtcggtgatacgacggctgcgactgcgggggggtgttggcgaacggcttcgtcagactctcgcggcgcgctccacgcgcacgacgcgcaccccgcgcacgacgcgcagcgctcctcgctccgctcgcaccgctgcacgtcccttagatcaggggattag

SEQ ID NO: 42551 - DNA, 252 bp, Oryza sativa
  Clone ID: PAT_MRT4530_45792C.1
atggccccatccaccatcgctgctaccatgccacacgctccatctgcagcacaagctcttgcaacatccccatccgtcctcatcaccatctacttccatccttgttgccgccacggagggtcgaggtcagcggagaaggatttagttgtcctcgtcgccctcatcgccatctgcgtcttctgccattggggattggggtcaggaaagaaggatctcgttaggtacagcatggacattatcctaacgttataa

SEQ ID NO: 42552 - DNA, 5358 bp, Oryza sativa
  Clone ID: PAT_MRT4530_45793C.1
atgtcgcacagctccggcgcttccgacgcctcgtccacctctgacgaagagcctgtgccggcgccttccacctctgttcttcaaaccgtcaacatccgctcccacgtcccggtcgtcctcgatctcgacgtctccaactacagccagtggcgctgcagcttcgaatcggtcctcggcaagttcggccttgaggcccatgttcaggagccgcccgctctcgacctccgcactgccgagtggcgccgtgcggatcactgcgtgccccgcgcctctgccttcaccgtgtggagcgacatcgaaggcgtcttccgcgacaacgccgtccaacggtctgtctaccttgagaccgagttccgctcgatcaatcaaggtgacatgaccatcacgcagtacaccgccaagctgaagcaactcgccgacggcctccgtgacatcaacatgcccgtgtctgagcccagccaggtgctcaacctcctgcgcggcctcaacaccaagttccgctccctccgcgccagcatcgccgaccggaatccgccacacactttcatgaccgcgcgctcctacctgctgctggcggagctccagatgcagcacgacgccaaggctgaagccggggaggccctctacgccggcaccgggtcttcctccggcacctccgacaccaccggccagcctcgtcccaagggacggggcaagcgtcgtggccggggcggcggcgccccacctggcggcgctccttcgactcctggcggcggcgctggtgccgggcacgacggccagcctcgccctcctgcgccttggggctacaacccctggacaggctttgtccaggcctggcctttcccgttccgggctcccggcgcgggtgtgttgggccctcgcccgccgttccaggcccaacaggccatgaccgcgcagcacctgcttccggctcttcctccggcatctccaggagttcactccaccggcgcctgggacaacagtgcgctctacagcgccttgcagtccgccggcgtcgccaccaccactcctccgagcgctgcggattggttcctcgacaccggtgcgtcagcacatatgtcctccacccctggtattcttgctcatccccgtcctcttcctttctcctcttgtatcactgtcggcaatggtgccaagctgcctgtcacgcatacagcttccacccacattcccacatcctccactgatctacaccttcataacgtgcttgtttctcctcccttgattaagaatttgatctctgtgaaaaagctaactcgtgataataatgtctccattgaatttgatccaactggtttctccatcaaggatcttcaaactcaggtggtgaagctccgctgtgacagcccgggtgacctgtaccccctgcgtctgccatcgccacacgccctctctgcgacttcctcgccgtcggtggagcattggcatctgcggctcgggcaccctggctctgcttccctgtccaaggttcttggttcctttgatttccaatgtaataaatcagccccccatcactgttctgcttgtcatgtaggcacgaatgtgcggcttcctttccactcttcatctagtcagactctatttccctttcagttagtgcatacagatgtttggacctctcccatttatagcaattccggttacaagtattatgtggtatttcttgatgattttacacactatatttggacctttcctgttcgcaataaatctgaggtgtttcatactgttcgttccttctttgcttatgcacacacacagttcgggctccccgttttagctctgcaaactgacaatggcaaggaatacgattcttatgcacttcgctcactcctgtctctccacggagctgttcttcgcctctcctgcccctattcctctcaacagaatggcaaggcggaacgtatcctccggacgatcaatgactgcgtgcgcacaatgcttgttcacagcgctgctcctttgtctttttgggctgaagccttgcagacggcgatgcatctgatcaaccgacggccatgccgcgccacgggctccctcaagccgtaccagttgctgctcggcgctcccccgacgtacgatcatcttcgcgtgttcggctgcctctgctaccccaacaccatcgcgacagcgccgcacaagctcagcccgcgatccctggcgtgcgtcttcatcggctacccggctgaccatcgtggttatcgctgctacgacatggtctcccgccgggtgttcacgtcgcgccacgtcacgttcgtcgaggacgtgttccccttccgcgacgcgccatcgcctcgcccgtcagctcctccgccaccggaccacggcgatgacactattgtgctgctgcctgctccagcacagcacgtcgtcacacctgtcggcaccgccccagctcacgacgccgcatcgcctccgtcgcccgcgtcgtccacgcccagcagtgctgctccggcccacgacgtcgcgccgcctccatcacccgagacgtcgtcgccagcgtccgcctctccacctcgacacgccatgacgacgcgtgcgcgggctgggatcagcaaacccaacccgcggtacgccatgactgccacgtcgaccctgtcgccgacaccttcgtctgttcgcgtggcgctccgggatcccaactggcgcgcggcgatgcaggctgagttcgacgccctgctcgcgaacaggacgtggactctggttccccggcctcccggtgctcggatcatcaccggcaagtgggtcttcaagaccaagcttcatgctgacggctcactcgacaagtacaaggcacgttgggtggttcgcgggtttaaccagcgcccgggcgtcgactttggcgagacattctcgcccgtcgtcaaaccagcgaccattcgcaccgtgctgacgctgatttcctccaagcaatggccggcgcatcaactggatgtttcaaacgcgttcctgcacggccatcttcaggaacgtgtcctgtgccagcagcccacaggctttgaggatgctgctcgcccggcggacgtgtgcctcctctcccgttcgctgtacggtcttcgtcaagccccgcgcgcttggttcaagcgcttcgccgatcatgcaaccagcctcggcttcgtccagtcccgcgccgacccctccctgttcgtgctgcgccgtggctccgacacggcctacctcctcctctacgtcgacgacatgatcctctccgcgtcctcgtcgagcttgctgcagcgcatcatcgatcgccttcaagcggagttcaaggtcaaggacatggggcccctgaagtacttcctcggcatcgaagttcagcgcactgccgacgggttcgtcctcagccagtccaagtacgccaccgatgtcctcgaacgtgcaggcatggcgaactgcaaggccgtggccactccggcggacgctaaacccaagctgtcaagcgacgaggggcctctcttccaggactcctcctggtaccgcagcattgccggcgctctccagtacctgaccttgacgcggcccgacatcgcctacgccgtccagcaggtgtgcttgcacatgcatgctccgcgcgaagctcacgtcaccctgctgaagcggatcctgcgctacatcaagggaacggccgcgtttggcttacaccttcgcgcctcgacgtcgccgacgctcaccgccttcagcgacgcagattgggccggctgccccgacacccggcgttccacgtccggcttttgcatcttcctcggcgactccctcatctcctggtcgtccaagcggcagacgaccgtctcgaggtcaagtgcggaagccgagtacagaggtgtggcgaacgcggtggcggagtgcacttggttgcgccagctgctcggtgaactccactgccgcgttccacaggcgacgatcgcttactgtgacaacatctccagcgtctacatgtccaagaatccggtgcaccacaagcggaccaaacacatcgagctcgacatccacttcgtcagggagaaggtcgcgctcggtgaactccgcgtcctaccgataccgagtgcccatcagttcgcggatgtgttcacaaaagggcttccttcaagcatgttcaacgagttccgagccagtctctgcgtcgctccccacgcgcaccacctgttcgacgaaatgcccctgcgtgctcggccgccaatggaggacgccgccggcagggacaggctcagcgacctccccgatgaaatcctccaccgcatcatgtccttcctgaacgcgcgccaggccgtgcagacgtgcgtgctgtcgcggcggtggcgcaacctctggcacaccgtgccgtgcatcaacgccgacttcgttgagtttgattccatcggataccaagggcccgtggtgccgttcaagaggtttgttaaccggctgctggagttccgtgatcctgcctccgtgatagacacattcttgctcaaatacgccatgccggacagattggatggatacaaggcttctaatgaagaagctaacaggtggattggccatgctttgcagaagcaggccaggattctagaggttgccgtgttcttcttcccattggatcttgatcactcagtgtttacttcattctacctgagaagaattgagttctcccatgtgtacttacgcaaaggtttcttcgagcaaattgagacgggctgtccattactggaagatctcttattacatcaatgcttcatttgggatggtgagatctcctcccagacactgaaggttttgaccgtcgatgcaactgaattatacacggtgaaggagatgtctatttctactccaaatcttacttctctgaccttgtctggtcttgagtatcccaaagctgtactaaaggacatgccattactagtgactgcatcagtatcggttacatttgatgcattaaacttcgacggttattatgatgctaatgacctccgccagtatctctggggcctttctgctgttagaaatctggagttccattatgagggtgcagagctgatgattgcaaacaattcgcaatggtgtccggaatttgtcgatgttgtcaacctgactcttggtgaatggtgcctggatgcaaacttccatgcactaattgtattccttcagaactcaccgaggctagtgaagctaactctgaaactcgcgaaggatcgttggacaacaccacaaagaatcattggtgagcttgaagaaagatcatttacatgtgagcaccttaagattgttgaagtgatatgcttggagaatgatccccaggtcatcggtgttgaagatttctttgttcgtagtgtgacaagaatgaatgatgagagtcaaggttga

SEQ ID NO: 42553 - DNA, 5412 bp, Oryza sativa
  Clone ID: PAT_MRT4530_45794C.1
atgtcgcacagctccggcgcttccgacgcctcgtccacctctgacgaagagcctgtgccggcgccttccacctctgttcttcaaaccgtcaacatccgctcccacgtcccggtcgtcctcgatctcgacgtctccaactacagccagtggcgctgcagcttcgaatcggtcctcggcaagttcggccttgaggcccatgttcaggagccgcccgctctcgacctccgcactgccgagtggcgccgtgcggatcactgcgtggtcaattggctgcacaactccatcgccaagaacgtcttcgacgtcgtctacaagccccgcgcctctgccttcaccgtgtggagcgacatcgaaggcgtcttccgcgacaacgccgtccaacggtctgtctaccttgagaccgagttccgctcgatcaatcaaggtgacatgaccatcacgcagtacaccgccaagctgaagcaactcgccgacggcctccgtgacatcaacatgcccgtgtctgagcccagccaggtgctcaacctcctgcgcggcctcaacaccaagttccgctccctccgcgccagcatcgccgaccggaatccgccacacactttcatgaccgcgcgctcctacctgctgctggcggagctccagatgcagcacgacgccaaggctgaagccggggaggccctctacgccggcaccgggtcttcctccggcacctccgacaccaccggccagcctcgtcccaagggacggggcaagcgtcgtggccggggcggcggcgccccacctggcggcgctccttcgactcctggcggcggcgctggtgccgggcacgacggccagcctcgccctcctgcgccttggggctacaacccctggacaggctttgtccaggcctggcctttcccgttccgggctcccggcgcgggtgtgttgggccctcgcccgccgttccaggcccaacaggccatgaccgcgcagcacctgcttccggctcttcctccggcatctccaggagttcactccaccggcgcctgggacaacagtgcgctctacagcgccttgcagtccgccggcgtcgccaccaccactcctccgagcgctgcggattggttcctcgacaccggtgcgtcagcacatatgtcctccacccctggtattcttgctcatccccgtcctcttcctttctcctcttgtatcactgtcggcaatggtgccaagctgcctgtcacgcatacagcttccacccacattcccacatcctccactgatctacaccttcataacgtgcttgtttctcctcccttgattaagaatttgatctctgtgaaaaagctaactcgtgataataatgtctccattgaatttgatccaactggtttctccatcaaggatcttcaaactcaggtggtgaagctccgctgtgacagcccgggtgacctgtaccccctgcgtctgccatcgccacacgccctctctgcgacttcctcgccgtcggtggagcattggcatctgcggctcgggcaccctggctctgcttccctgtccaaggttcttggttcctttgatttccaatgtaataaatcagccccccatcactgttctgcttgtcatgtaggcacgaatgtgcggcttcctttccactcttcatctagtcagactctatttccctttcagttagtgcatacagatgtttggacctctcccatttatagcaattccggttacaagtattatgtggtatttcttgatgattttacacactatatttggacctttcctgttcgcaataaatctgaggtgtttcatactgttcgttccttctttgcttatgcacacacacagttcgggctccccgttttagctctgcaaactgacaatggcaaggaatacgattcttatgcacttcgctcactcctgtctctccacggagctgttcttcgcctctcctgcccctattcctctcaacagaatggcaaggcggaacgtatcctccggacgatcaatgactgcgtgcgcacaatgcttgttcacagcgctgctcctttgtctttttgggctgaagccttgcagacggcgatgcatctgatcaaccgacggccatgccgcgccacgggctccctcaagccgtaccagttgctgctcggcgctcccccgacgtacgatcatcttcgcgtgttcggctgcctctgctaccccaacaccatcgcgacagcgccgcacaagctcagcccgcgatccctggcgtgcgtcttcatcggctacccggctgaccatcgtggttatcgctgctacgacatggtctcccgccgggtgttcacgtcgcgccacgtcacgttcgtcgaggacgtgttccccttccgcgacgcgccatcgcctcgcccgtcagctcctccgccaccggaccacggcgatgacactattgtgctgctgcctgctccagcacagcacgtcgtcacacctgtcggcaccgccccagctcacgacgccgcatcgcctccgtcgcccgcgtcgtccacgcccagcagtgctgctccggcccacgacgtcgcgccgcctccatcacccgagacgtcgtcgccagcgtccgcctctccacctcgacacgccatgacgacgcgtgcgcgggctgggatcagcaaacccaacccgcggtacgccatgactgccacgtcgaccctgtcgccgacaccttcgtctgttcgcgtggcgctccgggatcccaactggcgcgcggcgatgcaggctgagttcgacgccctgctcgcgaacaggacgtggactctggttccccggcctcccggtgctcggatcatcaccggcaagtgggtcttcaagaccaagcttcatgctgacggctcactcgacaagtacaaggcacgttgggtggttcgcgggtttaaccagcgcccgggcgtcgactttggcgagacattctcgcccgtcgtcaaaccagcgaccattcgcaccgtgctgacgctgatttcctccaagcaatggccggcgcatcaactggatgtttcaaacgcgttcctgcacggccatcttcaggaacgtgtcctgtgccagcagcccacaggctttgaggatgctgctcgcccggcggacgtgtgcctcctctcccgttcgctgtacggtcttcgtcaagccccgcgcgcttggttcaagcgcttcgccgatcatgcaaccagcctcggcttcgtccagtcccgcgccgacccctccctgttcgtgctgcgccgtggctccgacacggcctacctcctcctctacgtcgacgacatgatcctctccgcgtcctcgtcgagcttgctgcagcgcatcatcgatcgccttcaagcggagttcaaggtcaaggacatggggcccctgaagtacttcctcggcatcgaagttcagcgcactgccgacgggttcgtcctcagccagtccaagtacgccaccgatgtcctcgaacgtgcaggcatggcgaactgcaaggccgtggccactccggcggacgctaaacccaagctgtcaagcgacgaggggcctctcttccaggactcctcctggtaccgcagcattgccggcgctctccagtacctgaccttgacgcggcccgacatcgcctacgccgtccagcaggtgtgcttgcacatgcatgctccgcgcgaagctcacgtcaccctgctgaagcggatcctgcgctacatcaagggaacggccgcgtttggcttacaccttcgcgcctcgacgtcgccgacgctcaccgccttcagcgacgcagattgggccggctgccccgacacccggcgttccacgtccggcttttgcatcttcctcggcgactccctcatctcctggtcgtccaagcggcagacgaccgtctcgaggtcaagtgcggaagccgagtacagaggtgtggcgaacgcggtggcggagtgcacttggttgcgccagctgctcggtgaactccactgccgcgttccacaggcgacgatcgcttactgtgacaacatctccagcgtctacatgtccaagaatccggtgcaccacaagcggaccaaacacatcgagctcgacatccacttcgtcagggagaaggtcgcgctcggtgaactccgcgtcctaccgataccgagtgcccatcagttcgcggatgtgttcacaaaagggcttccttcaagcatgttcaacgagttccgagccagtctctgcgtcgctccccacgcgcaccacctgttcgacgaaatgcccctgcgtgctcggccgccaatggaggacgccgccggcagggacaggctcagcgacctccccgatgaaatcctccaccgcatcatgtccttcctgaacgcgcgccaggccgtgcagacgtgcgtgctgtcgcggcggtggcgcaacctctggcacaccgtgccgtgcatcaacgccgacttcgttgagtttgattccatcggataccaagggcccgtggtgccgttcaagaggtttgttaaccggctgctggagttccgtgatcctgcctccgtgatagacacattcttgctcaaatacgccatgccggacagattggatggatacaaggcttctaatgaagaagctaacaggtggattggccatgctttgcagaagcaggccaggattctagaggttgccgtgttcttcttcccattggatcttgatcactcagtgtttacttcattctacctgagaagaattgagttctcccatgtgtacttacgcaaaggtttcttcgagcaaattgagacgggctgtccattactggaagatctcttattacatcaatgcttcatttgggatggtgagatctcctcccagacactgaaggttttgaccgtcgatgcaactgaattatacacggtgaaggagatgtctatttctactccaaatcttacttctctgaccttgtctggtcttgagtatcccaaagctgtactaaaggacatgccattactagtgactgcatcagtatcggttacatttgatgcattaaacttcgacggttattatgatgctaatgacctccgccagtatctctggggcctttctgctgttagaaatctggagttccattatgagggtgcagagctgatgattgcaaacaattcgcaatggtgtccggaatttgtcgatgttgtcaacctgactcttggtgaatggtgcctggatgcaaacttccatgcactaattgtattccttcagaactcaccgaggctagtgaagctaactctgaaactcgcgaaggatcgttggacaacaccacaaagaatcattggtgagcttgaagaaagatcatttacatgtgagcaccttaagattgttgaagtgatatgcttggagaatgatccccaggtcatcggtgttgaagatttctttgttcgtagtgtgacaagaatgaatgatgagagtcaaggttga

SEQ ID NO: 42554 - DNA, 1731 bp, Oryza sativa
  Clone ID: PAT_MRT4530_45795C.1
atggaatggggagacacagcaggatggctagcggaagaagataatgccatcgaaccatcgctgagcggcggcggcgggcgagtgcagggtacacggatcgcgctcggccaggctgcatccggagctgtgtgtctcggcgcaggaaaagatcgcgtcccggaggcctacgtcgtcgtcgtccatggaagaagaaggggaagaaggcttcgggtaagggcaatgttgaagttgaacaatgggcgaaccgcggtctcgccgctgcggggctctggagccgtgggggcagaggcgtacctggaaggaatcgactcctcccgctgggcgacggcggtggcggcggcggcctcgatggggacggtcagcaggttgtctttgaaacatttactcaggtgttttgacttctactctattgataggaagttttgcaacggtaccaacctcaatacactgtatcagtaccactggtctatgagactctctacaggttcttggcacagttggtacccagtaaagcacacggaaatcaaggtagtgagcatagagaatagtgaggttctcgcagatggttcaaagggggttgtgaaagtcagaggacctcaagtgatgaagggatattacaaggatcattttttccagtttactgatgccaagatgatgggttgctccttccaaatcagccctattctaattgttaacgaatcatttacggtggataatggtttgctaacatccactttgaaaataaggagggacaagtttcgctcagcaaatgaaacagtagatcacttgtttgtgtcttgtccactggctagatttgcttgcaatgtgattgcaagtgcttttggacttgaaaagatcaatagcattcaacacttgttggaagcttggttaaatgaatttgacaaaaagaagaaacaactagttgcagtggggattgcagccacactaggtcggtggaaggccaaagaagtctacaatgtgggttcgacacttcgacttgctaaagcaggttgcaaaagagattatataattccaagtatggctggaactttgatagaagacggctggagcttgtgggcatatattctgccgtttatgcctggcgcattacatgtctcgaggacctgcaatcttattggttgcgtgatttcaatcctgcaccctggtaagggaaatgcagatgaagttgacgggatcagatcggaagatgtggcttgtctcatttgccaggaacttttgtttgacccatcggtcctgaattgtggccatgtttactgcatgccatgtttaacatctgtgggtggagaggaacttgaatgccaattttgtggagctccacatcccgctgaacctacagtatgctcaaatctgaagaactttctgaaacatcgcttcgaagaactgtataactcaaggcaagagaaaagttcaggtgttccaagcaggaaggaaggcactcgcaaagggaaaccttcagagatattgcatacccacgttggggtgggctgtgatggttgcggggtcttcccaatccaagggagaagatactcatgcaaggagtgtgaggcaccaggtttagatctgtgcgagaaatgcttcatgacaggatctactgcagagggacgctttgatcagaagcatactgcagatcatgacatggaactggatgactcattccttttccccaacttagtggattacatggatgacctatatatcgatatgacttga

SEQ ID NO: 42555 - DNA, 280 bp, Oryza sativa
  Clone ID: PAT_MRT4530_45796C.1
gccggaaaatttcatctgtgtatctagtactactatcagattaaattctcttaatcctttcgaggagaaaaaaaagggggcatgtacaagctgattgatcaatcgatcaagaagcagactcatacgagctgcttccaaaaagaaaaaaaaaagaagaaaaacatatcgatatctgtctcgctctgtgaaagagaaagggctcaggaattaggtaggtacggttcatctggagttacatgactccctgatggccatggacgccacggccttcgcccaggcg

SEQ ID NO: 42556 - DNA, 465 bp, Oryza sativa
  Clone ID: PAT_MRT4530_45797C.1
tgtacatgcacaagacgatggcgtccggcggggggaggagggcctgctcggggagcctgcacgcaatgcacatcaagtgcgccgacgatacgcgcttcgcgcaggagttcacgcggaggctgacggactgtgacgaggagacaggtggacaccgggcagctgagcgcctacaaggtccacccgtttcatgtccactctacgcccacaggaaggatgtgaaccattatattcattggaagctgtaggtcgttgaataatgatatatatttatctttgagatgtaggtactattagccaaatctccatgcttagatctggataggagaaaacatactataatatatcattgactatatttgttttatcaaatatggctgtatataacctgccacttgtttacttattcttatgtatggaacggagacaacatatattatcatatatcggatactattaatggtttat

SEQ ID NO: 42557 - DNA, 555 bp, Oryza sativa
  Clone ID: PAT_MRT4530_45798C.1
atggcacttaaggaccgatgtatggtcgtgtggggttactctctatgtcatgcttgtgggggcctactcattgaagacaaggatgatcccaagaatattatgaagaccgtcaagctaataaaagcaattcaatatgagataccacagcaagtccacatatctactgattgcagagaactcatatcacgaatctttgtcagtgatccatcgaagagaatcaccatgcaggaaataaagaaccatccatggttcttgaagaatttcccgagggagctcacagaagaggcacaatctatctacttcacaaagaatgactatttccctactttctcagcccaaactagtggagaaatcatgactttcatggaagaagcgcagaaaatacccaaatcattcggcgatggctatattgattacagatcagatgaagaggaaatgcaggaagaggaggaggggccagaagagaacgaggaagaggaagatgaatgtgacaagattctaagggaggtccaagagaaggaaactccgaatatgaaagcacttagcatcggctag

SEQ ID NO: 42558 - DNA, 1121 bp, Oryza sativa
  Clone ID: PAT_MRT4530_45799C.1
tttcctttcctttgctctcctcgctcctcttatcatctcctcctacccgccctgctcccgggctgccaccaacaacgcgatcaccagttcaccaccaccgccacgcgcgcgctgtctccaaacacagacgcataaaccctagcaagccaacacggaggaagagcgatcgatcgagcagcggagaaagcttcgcctcgccaccatgcggcgatcggagtgggaggaccggtggtgcaagcggcacccggagcaccggctgtccaagggcgtgtgcccctactgcctccgcgaccgcctcgcccacctctccgcctcctcctcggccaccaccacgacgcgcgcctcctcctccgccgaatccagcggctactcctccggctcgcctccctgctacggggccctctcggccgacgtcagctccgtacacgtggtcggcgccgccggctcgtccttcgccaacgtcgccgccttctcgcagccgctgatgccgagctcggttagtcggaaaccagccggaggggggcaagaagagccgggaagggaggcatctggtaaggggaagcagcaggaggtgaagaggaagaagagcgggaagaagaagaagattgggaggttcctgtcgaggctcgtcggagcggagaagcggcggcaatcaggggacgccgatggcggcgatctcttccattccaagaccatgaaggagaagacggcgcacaagtgggtatttttctgatcaaacgttgccgccaccgcatgcaaactatggatcgtaaattccatgcttggttgttattcttgcctacctttttttttaaaatttttagggggctttcactctaaactattctcaagtatttttgtgtttgattttgactttttttaaaaaaaaaaaccagaagaattttgggatcctgtatgtatacgagcagaagtttataattattaacctgtcaatgatttgtacttgaccacaaccgggggattgcaaatcgttactctgtaaagctagaaaaatataaggagacagtgtatacgggtgtaaaattaggcatctgtacagtatcttgtatagtttcaattataagtttcatttctcgaaaaaaaaaaaaaaaaaaaaaaaa

SEQ ID NO: 42559 - DNA, 539 bp, Oryza sativa
  Clone ID: PAT_MRT4530_4579C.1
cccgggctgcaggaatcggcacgagggaaacatccaatttggtattttggttgtccaaatttgaaataaaaacaattggtgttttcttgggagtaattttgtcaaatttgattgaatttggtgtagccggtgaccagatttgaatcataacattcgggtaggatgtccattcatttgggattgttttgctaaatgacaattgttgtacagagacattgttatgactttcatttagcagatggccctttggcatttgatttatttgtatgcatattttatacatcctttatattgcaaaagactaagataaattcagtcttagttagatagtatattccttaataaaaggatagctgctagtgtatttctcgaaagaaggacagtggctagccctttcagcctttgtaatgctaaagcagataagtcttcacttatgttcctccattatgccgaagaagctgaagtaactagattttgtgctaacagcattcttaataggacatattcatggttaaaaagttttacggacttggtactac

SEQ ID NO: 42560 - DNA, 162 bp, Oryza sativa
  Clone ID: PAT_MRT4530_457C.1
atggaagcgctagaatacatgccgggtgtattttgtcggtccagccgatgtcgtaggcggaggtctgggcagttgattctccgcggtgttgacgtcttgaagtttggtcgatctcgagagaacgagttgttgacgacgatggttccgatctcgtcgggagac

SEQ ID NO: 42561 - DNA, 331 bp, Oryza sativa
  Clone ID: PAT_MRT4530_45800C.1
atctgaagctcacattgggctttatatatcagaacacgagagatagacctcaaccacaacgaggtataatacgatgacataggtctcaaaattcagtactatgacggacaaagatagcaatgctgtgaaggatggcagacgagttttacggacacctgaaagtaaaacctagcgcgcacactaaggagtggttgtcgaagacttgagtatacgacatacagggcagaggccacaactggaaatgccgaaatggtcaaatggaagccatttcaagggtgtcttgggctcagaaatggtgggaccagtctgcggcgctgtcgacccgggggat

SEQ ID NO: 42562 - DNA, 422 bp, Oryza sativa
  unsure (1)..(422): unsure at all n locations
  Clone ID: PAT_MRT4530_45801C.1
tccccctcgttccgaaaaccctcaagtcccactggaagccagttcgaagaagaggttggccgcctggagtttccaagtttacaacccctgcagccacaagattgttggaggggtgctcacccaccaccatccccctgttaacgtacccacattgatttcaggactgcagctctctgtaccggttgagcctgtaggtttcttgatgatcacccattcacctgtacagattaaggtagttgatcagacatttgattgcacaatttagatgtaactgagaacnccatcccatgatgtcagcaaataggcgaagattgttgcgctcgtgagtgctttgcattggtagcttgtgtgtatatgtacaggatgggacattgcacattatctaataaaaaggacggtacattgcaaagaggcaaaaaaaa

SEQ ID NO: 42563 - DNA, 786 bp, Oryza sativa
  Clone ID: PAT_MRT4530_45802C.1
atggccgcgccgcatggcatgcatggcgtcgccgcggcggcgccggacgccaccatccgcctcttcggccgcgacgtcgtctccaacgacgacgctgtcgtcgtcgtcgtcgacggccagctgcccaaggaggaggcggaggaggaggcaggcggcggcgcggcggcggcggcgggggagacgaggaggttcgagtgccactactgccgccgcaacttcccgacgtcgcaggcgctgggcggccaccagaacgcgcacaagcgggagcgccagcacgcgcggcgcgcgcacctcgaggcctccctcgccgccgcgcactacctcggccagtccgcccacctcgtctacggcggcgccgccctcttcggctacggcggccacgccgccgccgtgtcgccgcagtacggcccggtgtgggcgagctccgccgtggcgccgccggggctgtacgccacctccatgggcatggcgcggcctgcagcctacggcgccggcgtggacgtgtccgcgctgtggagagcctcgtcgtcgtcgtcgtcgtcgccgccgatgatggggagtggtggtggtggtgcttttggtacggtggccggcggcggtcggcacggcgaggcagcggcggcggcgttggtggggtgtcgagccggtaaggatgagaacgtggtgatgagcgttgtgacgtcactgccttcgctgccgtcgtggcagctgccggcgccggagaagatgggtaggtctgagctgggtcaggaggccggggttgtgagcttggaactccgtttgtag

SEQ ID NO: 42564 - DNA, 1484 bp, Oryza sativa
  Clone ID: PAT_MRT4530_45803C.1
atggagtgggaggaggagagcgaggcggcgcgtcagaaggcggcggcggcgtcggcgtcggtggtgcccgcgccgttcctgaccaagacgtaccagctcgtcgacgaccccgcgaccgaccacgtcgtgtcgtgggaggacgacgacggcggcgagtccgcctccagcttcgtcgtgtggcggccaccggagttcgccagggacatcctccccaactacttcaagcacagcaacttctcctccttcgtccgccagctcaacacatatgggtttaggaaggtcgtgccggagaggtgggagttcgccaacgagttcttcaggaagggcgagaagcagctgctgtgcgagatccaccggcgtaagtccgcggcggcaacgtggccaccgttcccgccgccgccgccgcctttctttgccccgcgccatttcgcggccggtgccttcttccgccacggggatggcatgctccatggccgcttgggcgcgttggtgacgacgacggagcggcgccattggtttgagagcgcggcgttgccggtggcgccgtcgtcgcggctgctctcgcagctggggccggtgatcgcaccggcgcgccgcgcggcggcgacgccggaggaggaggcgctgatgcaggagaaccaccggctgctacgcggcaacgcggcgctggtgcaggagctggcgcacatgcgcaagctctacagcgacatcatctacttcgtgcagaaccacgtgcgtcccgtggcgcccagcccggccgcggcggccgcgctgcacggcctcggcgttctacggccgccgccggcgggcgggaaggcgcccgcgtccgaggtgcgcggcgcctccggccggagcgccacgtccagtagctcgctcacggtggccgaagaccagcccacgctgctggctctgcggctgccgcggacgacggagaagatcatcaacgaggtgtccggcggcaacggcggcggcagcaccaagctgttcggcgtgcacctgagcagcgccgacgagcagacgtcatcaggcgcgagccgcaagagatcaccgccgcaagagcagcctcctacgtcgccggcgccgaagcggacgctggtggtggagcacagcgagctgagattgagcatcgtgtcgccaccgtaggaggatcaggccgagcacggcggcgcggacgtgaagccggaggcggcggatccgcatcccgccggcggcggcggcggaagcagcacggaggcgtcgccggagtcgcacccgtggcccatataccggccaacccccatgtaccacgcggacaggcccacttgcaacgggccggacagggccgggtccgaccaagacgggtccagctccaggtgagttggcccccccaaccctgtagaagcttttagacccctatattacttaattgcccctaccctacactattatacgcaactaattatgattagtacgtaattagcggcgaaataatattactaccacta

SEQ ID NO: 42565 - DNA, 453 bp, Oryza sativa
  Clone ID: PAT_MRT4530_45804C.1
atggggggcggcgcgaggttggatgcggaggaagcgagcgctgcaatggagaccgggagtcggggaggagatggccgaggaggaggttgccggagcagagggcgccggcgttggtcgctggggctcgccatcgatctggatctggccacagaagggggatgcggaggagatcaacgcgggatcgctggcggcgatggggtcgccggggcggcggtggtggcagttgaggcggaggctgaggaggaagtcgctgaagcatcttccgacgaagtagggaagggcgctgggtgcggtttccggcgtcgcgggaagagggcggtgcggtttttggcgtcgaaggacgcccgtgatccgggagggcgtgcgccggcgaggcgacgacggcggagttcggtgtgcgagagtgacgaaaggagtgggacggcggcagggcggctccggtttagggtctag

SEQ ID NO: 42566 - DNA, 658 bp, Oryza sativa
  Clone ID: PAT_MRT4530_45805C.1
atggccgactccgccgccgccgccgctgggccccaccaccaccaccgcctcccctcctcctcctccgcctcgccgccgccgccgcagccggaccccggcggcaagcgccagcgccgccccagcgtccgcctctccggctccatccccctcccctcccacctcccccaccctcgccgcattcccatcacccccgcctcccgctcccgcaaacccctccacctccaaccccaccaccccaagcccgagcacgaggaagacgacaacgaccacaacccctccaaccccgcctccgccgacgccgacgccgacgacctcgtcctcgccgccgccttcccccgcaagccgaggtccctggaggccgtgcagggagagagcgttgcgcgccgccgcggcggcggcggaggaggaggaggccgcggctgaaggggaggtggtggacgtggtcgagtggctgtgggggatcgggatggggaggtacgcggcggcgttcgaggcgcacgaggtggacggggaggtgctgccctgcctcaccatggacgacctccgcgacatgggcatcggcgccgtcggggcccgccgcaagctctactgcgccatccagaggctgccccctcctcccgctctgcctccgcctcccccgccgccgccacggaggtga

SEQ ID NO: 42567 - DNA, 1441 bp, Oryza sativa
  Clone ID: PAT_MRT4530_45806C.1
cttgcagcacgtcgccgtcaaacgttggccttgcgatgaaccctgtcgctcgccgccgccgtcgaagccagggccggacaacgcaggccgcacgccactccgaaccctcgaaccccgcagctcgttgctgccgctatcaacgccggccccgaacctcgccgtccgctgatgccgccgtcaacaatggccccaccacacaccccagaggccagcgtctcgcccttacatgtgaaaagtctatattacccttccacctctctttaaaagacggtatcaccatatgggctaaaatgcccacctccaccgaacgcgtcatctcccctaatcccgcgcggccgcgccgcagcccctcccatcctctctctgtttcgttgtctcgtattgcctaccccaaacaccgccaccgtcgcctcggccaccctctcccttcttcactctcgcgcctcgccaccccaccgccgttgccccgtcgccggccgccgcaccctaaaccctaaaccggagccgtcccgccgcatccctctcccttcctctctctctctcacatcgcctaccccagacgccgccgccgtcgctaccccaagacatcgtcgcctccccgccctatcatgcccaccctctcccttcctcactctcgcgccttgccgctccgccgccgcaccctagaccctaaaccggagccgccctgccgccgtcccactcctttcgtcactctcgcacaccgaactccgccgtcgtcgcctcgccggcgcacgccctcccggatcacgggcgtccttcgacgccaaaaaccgcaccgccctcttcccgcgacgccggaaaccgcacccagcgcccttccctacttcgtcggaagatgcttcagcgacttcctcctcagcctccgcctcaactgccaccaccgccgctgccgcctcctccgacaatatttggtaatgcagtctattattactcggccccaatccatcctcacgcatccccacatcgccgcgcccgctccactcttccacccccggcgaccccatcgccgccagcgatcccgcgttgatctcctccgcatcccccttctgtggccagatccagatcgatggcgagccccagcgaccaacgccggcgccctctgctccggcaacctcctcctcggccatctcctccccgactcccggtctccattgcagcgctcgcttcctccgcatccaacctcgcgccgccccccatcgccgcacgacgcctcgatcgacggcgccccccatcgtccccgtcgaccgtcgctgcccacggcgcctccaaaccgtcgccgcatgcccagctgatccccgtcgcccacgaccacgcagcccacctatcctccgtcgccacctccacgagtcacctcacgtcgatatcctccgcgccaccagcgatcccgcgtcgatctcctccacgtcccccttccgttggc

SEQ ID NO: 42568 - DNA, 350 bp, Oryza sativa
  Clone ID: PAT_MRT4530_45807C.1
ggggagaaacaacccatttgatcgacgaaacaagggaaaaattactaaatcaagtcaagaaaggctataaactgaaaaaatgggggacaaaaaaaaaaaacagagggggagaactttcccacaaacaaacaaacaaagctgttcatgcataaattaaccctgacatgggctggtgctttacgcccccagtaaaaaaaataaagggttcacggggtcgggcctgccgggggcgtccccctagaccgggccttgttttcctccctggttgtccccccggggccggtgccggatctcctttattattttaaccaccctcgggggggtcccgggggggcgctcccggcgcgggg

SEQ ID NO: 42569 - DNA, 1350 bp, Oryza sativa
  Clone ID: PAT_MRT4530_45808C.1
atggatccaccccagcggatcttcggcgccgcctcctcaccgccgatcggtatcccgcccacctccatcgccgctccggtggatccaccccatccgatcttcggcgccgcctcctcgtcgccgatcgcccaccgcagtctccttcccaccccctccgtcgccaccgccgtcgccgttcaggtggatccacccccaccccattcggagagtgagcttgttcaagcgctatctgacaagtatagattgcccgtgagatttttactgagttccattcctccaacttatttgtctgcttgggagttatctgatggcaaagcacaggggctggtttggtctcatagtgatgcacttgatataacacatcattatcaatctctaggcttacatgagattagatttctctactctgagttcatttctctgagatgtgtccaggacatggagtatatgattgctcgtactccattctctatgcgggtacttaaccctgatgtggctaaagagaaaagccgaatgctgtccaagctgaacggctactgctgtagccttcgggaagcccttcggcaggtccaggctggggggaatctggtggagatgtttaacctgagatccaaatttgctcaggaacatgagctctgcacatgcaggacagagctgctgcggcagatgaaggtggacgctcttaacagagtcttggtgcttggattgggtgaaggggcatcatctgctcactccgctgacatgatttggatccttaaacaccacagaccagatgagtatgctgtggcagttaatgatgatgggaccgtctcatggcccattattcatggcctcgtgcagaacatcaggaacatgatgggcaacaagcttacgtcgaacgataccttggctaactcccgcacttccttgcttggtgtgatcggccgcttccaatttgagcataaagtccaggaagtccttgagaagacacgcagccattcaacagttcatgacagatcctacttcaagatcccagctgctgccccatcttctgccccagctgccgtcccatgtactgccccacctgctgctccagctgctgcctcaactgctgctccagctgctgcctcaactgctgctccagctgctgcctctactgctgctccagctgctgcctctactgctgctccagctgctgcctcaactgctgtaccagatgatgctaccccagctgaagcatctgatgcttcttcagatgatgctggtgaggaagtggcgatcatgaaatttatggagatggaaggggaacctgaagaacagagggcaaagcgcttccaaagatactgtgcatcccttgacttctgtttatag

SEQ ID NO: 42570 - DNA, 972 bp, Oryza sativa
  Clone ID: PAT_MRT4530_45809C.1
atgagaaatctggttccgcctaaggtgaaaatctttgcgtggaaactcgctttggatcgacttcctacacaagaaaataagcatcgaagacatcttgctccatgggccatttgtgttatctgtggttttgaagctgaaagcagctatcatgctgttcttcgctgccccaaggcacgagagttaaggaaggaaatgaaagcctactggcacatcccaagtgagaagaagttggagtatactggtacagattggctgcttgttttgcttgattccctgtcacctactcacaaagcacaactcctgttgcttttctggcgagcgtggcacattaggaatgatgctgttcatgcacaaggtagagaagaggttgctggctcctgttgttttcttcgtacttactgcgacattctttttcctatccagcaaaatgatatagtcaacaagggtaaaggaattataggagttaacaatctaaatgttcttggtaaggataagtcagttagggttgcttgggagaaacctgaacctggctgggcaaagatcaatgttgatggggcctttatagctgagtcaggacaagctaggataggtgttataattcgggatagcgcaggtttacctctgttatcgtcctggagaacagtgacccgagtatgctcagctgaagaggttgaattgctagcctgtaatgaaggcttgaagcttgctttagaatggattagaatgccagatatcctcgaatcggattgtgttactgctattaacatgctttctgttaagtcttctgataaatctaggtggcattctttgatcacggaagttaaggggatgatgtgtcttctccaagatgtgaagctccgtaaagttggaagagggtgtaatatggtggatcatgaattagctcagctagctaggagattaaatagttgtgcagtttggcggtttgatgctgctctctgtattagaacttag

SEQ ID NO: 42571 - DNA, 186 bp, Oryza sativa
  Clone ID: PAT_MRT4530_4580C.1
atggtcggcatctgctcccgccgcgacctgcaccacctcgtgtacagggtgttcgacgcaatgcccgaccggagtactgggccaccctctcgttgtctcctcgcgccgctgtcgccggacgccggccagatggaaccggaaaataattcagttccgttcccgtgctcgattcatttccactggtga

SEQ ID NO: 42572 - DNA, 120 bp, Oryza sativa
  Clone ID: PAT_MRT4530_45810C.1
atggaggtcatgcccgatccctatcaacccagagaacaacttgcagtttccttttcggtcgcaggtcgctgccgcagctgtgagcacgagcagcgccgtcgctgcgcggagagcggctga

SEQ ID NO: 42573 - DNA, 466 bp, Oryza sativa
  unsure (1)..(466): unsure at all n locations
  Clone ID: PAT_MRT4530_45811C.1
nnntnnnnnttttttttttttttttttttttttttttttttttttttgtgttttttttaaaaggcactgaatcatttttatttcctcatcctttttattcattcctcccaaaaagaccgatccatggaagtttttttgcccttattaggcaagcagagcacacccccccgggggcagtggaagtgcttttaacaaaacccttattaacatccaaagcttaaacaaacaaggggatcaatgcaaatcccgaaaaaaaaacacaggggaaagtccacattttttttttgtccccaacttcttcgggttaccaccacgttttggggatttttttttacccttttttttttgcttaagggtccacaattttgccgttgtcctttaaacccaagattaatttcgggtggccccccccccccccccccttttttattctgccctcaattgggtttgggccgcccaacccctt

SEQ ID NO: 42574 - DNA, 135 bp, Oryza sativa
  Clone ID: PAT_MRT4530_45812C.1
atgacggcgagcaacactgcggtgaacagcaacatcgtcgcggcattcggcaagaagggcgacggcctcccctactactccgtcgccgccacgaggctgctcggcggcgccatcggcagcgacgatgacctctag

SEQ ID NO: 42575 - DNA, 610 bp, Oryza sativa
  unsure (1)..(610): unsure at all n locations
  Clone ID: PAT_MRT4530_45813C.1
angtttgggttcaccaagnttccgtgcatncnnattttgcaggcccgatgncccnggataactgttggaggctaatgagnatctcgntctncccggtttgatttcacgagantaccggtattggtgcncagattactacgagatccttgntgtccgaaccatgaggcttntgnctnacaatcctncgnaatatactggactgaaggnctatggtttgagtgtcttggcgcagagtnccactgttgacnccaatanccaatgngaatcggcgttacatggaaacnaagagattaaagatggggcatgtntatggancccggcctagtggtnanacaagcnccttggctgatggcggcanaaaaaaggngcaagatcagattgacagtgctagcgagcaagagtaaactccaggagattaactatattcattttncttaaggcggtggaatataatccncgaatttgattttaagcgcactcgtcgtgctccagttttggttttatgtatctccagttttttgcacttgtcatcctgccaaaagtttttacgctccttgatcttccgttatccnaaatatatgatgcatgtttatgcaaaaaaaaaaaaaaa

SEQ ID NO: 42576 - DNA, 317 bp, Oryza sativa
  Clone ID: PAT_MRT4530_45814C.1
atgcaaagcttttactttttgtgatttttttttttacatttttgcttaaaaaacacgcgtagtaattcctggcattttcccttgggagttggattttttttgaaatcattttcctccagccctttgattggggggggcgctaaaaactttgtttgccgccgacacaccactgaaccaaaacctgcgggcttgtatgtggtgggctgctttatctatgccaccttgtcccggtcctctgaaaatgtgtgaaaccccccaccgattggggactatgccatccgtcaaagaatcacgggagcccccgggggcatgattgg

SEQ ID NO: 42577 - DNA, 904 bp, Oryza sativa
  Clone ID: PAT_MRT4530_45815C.1
atggatcccaccaaatccagcacgccgccgccggtgatgggcgcgcccgtcggcttcccgcctggcgcgtaccctccgcctccccccgccggcgccgccgccgccgcctacgcgcagcagctctacgcgccccccgccgccgcggcggcgcagcaggcggcggcggcgcagcagcagctgcagatgttctgggcggagcagtaccgcgagatcgaggccaccaccgacttcaagaaccacaacctccccctggcccgcatcaagaagatcatgaaggccgacgaggacgtccgcatgatcgccgccgaggcccccgtcgtgttcgcccgcgcctgcgagatgttcatcctcgagctcacccaccgcggctgggcgcacgccgaggagaacaagcgccgtacgctgcagaagtccgacattgccgccgccatcgcgcgcaccgaggtgttcgacttcctcgtcgacatcgtgccccgcgacgacgccaaggacgccgacgccgccgcggccgcggcggcggccggcatcccccgccccgccgccggtgtgccggccaccgatccgctcgcctactactatgtgccccagcaggacatctccacggccgccgtcgtctgggcgctcacgcacgtcgtccagcacggcgacaccatcctgctcctcgccgtcatgctgctgccgcacagggcacaactctggcaagaagtcctgggagtttccgctctttgcagggggttgtgcgagcggccacaggagcgtgttgattcagaattcggatgtcgcttatttgtcacaagcacaagcacaacaaaagcacgatggcagtggtgggagacggcggggcggtggccgtcatcgagcggcggcgcctgggcttgttttggacgggggagggccggcgcgg

SEQ ID NO: 42578 - DNA, 618 bp, Oryza sativa
  Clone ID: PAT_MRT4530_45816C.1
ttactgcggctggacatagtagtaggccatggggtcggtggcgggcaaaccggcggcggggtgggggatcccggcggcaacggcggcggcggcctcggcgtccttggcctcgtcgcggggcacgatgtcgacgaggaagtcgaagacctcggtgcgggcgatggcggcggcgatgtcggacttctggagcgtgcggcgcttgttctcctcggcgtgcgcccagccgcggtgggtgagctcgaggatgaacatctcgcacgccctggcgaacacgacgggggcctcggcggcgatcatgcggacgtcctcgtcggccttcatgatcttcttgatgcgggcgagggggaggttgtggttcttgaagtcggtggtgtgctcgatctcgcggtactgctccgcccagaagttctggagctgcgcggcggcggcctgctgcgaggcggcggtggcggcggcggaggcggcggcggcggcggggggaggcggggcgtagagcggcggcgcgtgggcgtagggcccgacgggtggggggtaggctcccgccggcgggtaagggacgggggcgcccagcacggggggcggaggaggcggaggaggggtggtggatttgggctccat

SEQ ID NO: 42579 - DNA, 1104 bp, Oryza sativa
  Clone ID: PAT_MRT4530_45817C.1
atggatcccaccaaatccagcacgccgccgccggtgatgggcgcgcccgtcggcttcccgcctggcgcgtaccctccgcctccccccgccggcgccgccgccgccgcctacgcgcagcagctctacgcgccccccgccgccgcggcggcgcagcaggcggcggcggcgcagcagcagctgcagatgttctgggcggagcagtaccgcgagatcgaggccaccaccgacttcaagaaccacaacctccccctggcccgcatcaagaagatcatgaaggccgacgaggacgtccgcatgatcgccgccgagggcccccgtcgtgttcgcccgcgcctgcgagatgttcatcctcgagctcacccacgcggggttggggcgcacgccgaggagaacaagcgccgtacgctgcagaagtcggacattgccgccgccatcgcgcgcaccgaggtgttcgacttcctcgtcgacatcgtgccccgcgacgacgccaaggacgccgacgccgccgcggccgcggcggcggccggcatcccccgccccgccgccggtgtgccggccaccgatccgctcgcctactactatgtgccccagcagccagccggcggggcgaaaggtcgccggggcgagaagggagaggagaaggcccgacggctggcgacaggcgacgaggcggcggcggcgacgcgggagcaggccggttggggaggaggccggcgacacagaggccataggccgtgcgggccgccgccagggacatctccacggccgccgtcgtctgggcgctcacgcacgtcgtccagcacggcgacaccatcctgctcctcgccgtcatgctgctgccgcacagggcacaactctggcaagaagtcctgggagtttccgctctttgcagggggttgtgcgagcggccacaggagcgtgttgattcagaattcggatgtcgcttatttgtgtaatcaaatgatgctaaaacttcgtgatttttatgatccgagcaagtggtgggagacggcggggcggtggccgtcatcaagcggcggcgcctgggcttgttttggacgggggagggccggcgcgggtaaccggtcggagggacgcacgtga

SEQ ID NO: 42580 - DNA, 477 bp, Oryza sativa
  Clone ID: PAT_MRT4530_45818C.1
atggcctgcagctggcttgttctcacggccgccatggctgggctagcctcttggttgatccgtttggtttcactaaaatggaacagcagccacccatgcaaagctgatgaaggcagcaggctgccgccagggtcgaggggccttcctcttctcggcgagtcgctcgagttcttcacttcgagcacctctcttgagctgcccgtcttctttaagcgccgtcttaatagaggtcgcagggtgctggccaacggatccattggctgcaaattcgaccggcacgaatctagcggtggttgcgatggcacgcacgagggctacggcaagctcgggcggtggcatgctcggcctcgtacggtggagagcgcagcggtgtcggatcgggtgatggggaggactgctacagcagttaggaggtgtggtgacaacagatccgatggtgttgagggcggcaacggttcggacgcgcagcgacggtga

SEQ ID NO: 42581 - DNA, 566 bp, Oryza sativa
  unsure (1)..(566): unsure at all n locations
  Clone ID: PAT_MRT4530_45819C.1
tcaaaacatatcttatgacanttgcaggcctctggttcgtttctataattgggagctgcttcagcttcttgactttgtcttacaccattttcctgatggcatacacactgccaatgctgtatgagaaatacgaagatgaagtcgatgtcgtgggcgagaaggccctaatcgagctcaagaagcaatatgcagtgcttgatcacaagcttctctcaaagatcccaatgttagctgagaagaaacagcactaactgatgctttgaagaccaaagccccttaatttgcatgtttcatcttcagctcagcacatcaccaaagtagtctatttgggtttcctctgtcatcttatagcaatatttgggatgacatcagatagaaatggttttgattctcgagcatccgaaaaccgggtttttttttggagcactagtacggagaacactgtcgacggtcacatggagtagttgcttatgttccagtaactttcagttcatatttttgagcttctgtttggtcacaagatacatatgacacacaatttactatgattattatttgcatgtatt

SEQ ID NO: 42582 - DNA, 984 bp, Oryza sativa
  Clone ID: PAT_MRT4530_4581C.1
atgtcgtcgaaggccaccggagaggacgacgcggacgacagctcgtcgccggaggtcgaggcgagctcgctcatcaccctcagggtgaaggacagcgaaggcgtcaggatcacccgcacgatgcgcacgacggacgcgctggacgacctgatggacttctacctcggcatggtgccggccgacatggacgccgccgagggtgtcttcatgcactacggccgtcgtgtgaccggcgaccgtacgccggcggactacgacatggaggacggcgacgaggtcagcttcttccccgacggaacctggaccacgcccgtcaccctcaccgtgacggacaacaatggccgccgggtcacgcataccatgcgtaggttgcacatcctggacatcctgttcgatctctacttcgccatgctgccgtcgaccgcgcccagggagggtgctttcatctaccattgcagggagctcagccctaagcagacgccggaggaatgcaacatgaaggacggcgacgagatcgccttctctccgttcagcaagccgagtgccttcgtcacccttacgatcaggggcaacaacaacaatggcggcggcagcgtcgtcgtcacccgcaccatgctcaggacccaagaacgactgcaggacttgatcgatctctacttcgccatggtgcccactgacgatgagcgcggcgaattcgacgtcacgtactgtggcaggaaggtcgacatcgagaagacgccggcggattacgggatggaggacggcgaccagctccgccttgctccggcgaccgaacggagcaggttcgtgacgatcaatctggtgaccatggtgggagtcaagcgcgcatacaccctgcgaaggacagacgagctgcagggtctgatggatttatgcttaagcagggagcctgcaagcatgtaccaaaatggttgtattttcctttacaacggcctgtgttcaaggctcggaaactccggatga

SEQ ID NO: 42583 - DNA, 255 bp, Oryza sativa
  Clone ID: PAT_MRT4530_45820C.1
atggcggagctcaccggcgcgcggtgcgaacggggttcccgtggcggaaagcggcggcggagaggcggacggcgtggccctcgggcttgcgaacccgacagcagctcggcgcggctcggcgcggcggctagcggctaccggagcggcggcggtggcggcggagaggagggcgacgacgctagggcgatagaggtcacgggagagctcggcgaaatggagaaaaagagagaggggagagcggggatgcttaaatag

SEQ ID NO: 42584 - DNA, 245 bp, Oryza sativa
  Clone ID: PAT_MRT4530_45821C.1
aacgggggggaattaccccatccatttttattggaaaaagcccaatttattcagcgtcacccaagaaaagggacaatttatacccacacctatccaacaagggaataagggctcacaattttttcaacaggtccataaagggtttttcaacccatatgcttggcaaaggtttaactagacgagcacaatgttcgatggcacaaaccaaaatttcctctcaaaaaagcaccggaaacccttaaaac

SEQ ID NO: 42585 - DNA, 1542 bp, Oryza sativa
  Clone ID: PAT_MRT4530_45822C.1
atggagtacggcatcacgccggccggggggtttcggtggagaagctaccgcgacttgatccgggacgtgttcatcgccggcgacatgtactgcgggccggcgaagctgttgttcccgcagatcactggtagtgccggcgaggatcaagcgaggtgcggctggtcgagcgcgagctccgtggcttctagccccgtggtgtcgtcttcttacatgtcatcctctggatcccctgcttggtcctcggcgtcgtcttctcccgtccacaagctccgcgtcatcgctcaacagatggtcggcgacggctacatacaggaactcatccgggcgttcggccgccgccgccccgacgagctcatcttccagaggtggttctcgcagctggacgtggactttgtcctggtcctccacaccgacggcatggtgcgagctgacagcttctccgtggaagacctgatggccttgataaagcggtggatccgagctctcctgaccatggtgcaggtcctcaatatcacgctgctcgagctcccactcccggtcgccggaattcactgggttcgcggaggagagcatcctcaggatgctggccttgtcgacgccgtcactctttctgctctcaacgtcaacgacgaccaccgccaccggacgccggagctactcccggggatgctgcagctgtacgcctgcgtctccgaggcatgcgatctcctcgtctcagctggcatgggcaaggacgagatcacgaagatgcaggccttggacgccatgaacaatggcatcctgatgcaaagcaggaggaagctgagcgatgctatctgggtcatgatggagaaggtccgggctctcttcttgatggacgcctgctggcaggtctcgcaggaggcagccgcatccgggacccatgagaccacggagctgacgatgaactacatcacgcttctctggcgcaaccataccatgctcgactacttcagcgtgttcgtctccgacgccgacagcttcagctcggtggcgagactcatcgccgagatgatcacctgcctcgagtgcaagctcgaggaaacctccctctccatcccggacctgggtttgcgcttcatattcttgctcaacaattggcaccgtgtcttgcagcgtgttgaatccttgcgagacttgccagcggccgtccggcaagaacgaatccttctcctccatgcctcggacagcaagattaagaggtacatagacgattatcttaatgcctcctggtcgcctctgttacgttgcctgctcatcgacaagccttttgttgctctcgggaggtctcatgaatctaaaattgagacacaactccaaacaacctacgcaacacaaaagttttggaaggttccgaaccctcagcttcggcagagactgcgtagagccatcatgagcaaagttattccagattatagtaaatacatagagcaaatggataggcagaataaaatcaatcgacacctcgtggtcactagtcccgagcagctcgagcagcaaatagaggaattatttgaaggatga

SEQ ID NO: 42586 - DNA, 234 bp, Oryza sativa
  Clone ID: PAT_MRT4530_45823C.1
atgggtcgcacgacctccggttcctcgcgcgcgtggtgggacaacctcaagggctcgtacgtggagacgaactactcgttctatgtgcaggacatcaaggtgagcactgagcaccccgcatccatgtcatccattacggtgacggggccagtgttccacgtggcattcgtggcccgtgtgaacgcgtccctgcaccccgcaccggtgggggcccagattcctcaccctcactga

SEQ ID NO: 42587 - DNA, 1581 bp, Oryza sativa
  Clone ID: PAT_MRT4530_45824C.1
atggagtacggcatcacgccggccggggggtttcggtggagaagctaccgcgacttgatccgggacgtgttcatcgccggcgacatgtactgcgggccggcgaagctgttgttcccgcagatcactggtagtgccggcgaggatcaagcgaggtgcggctggtcgagcgcgagctccgtggcttctagccccgtggtgtcgtcttcttacatgtcatcctctggatcccctgcttggtcctcggcgtcgtcttctcccgtccacaagctccgcgtcatcgctcaacagatggtcggcgacggctacatacaggaactcatccgggcgttcggccgccgccgccccgacgagctcatcttccagaggtggttctcgcagctggacgtggactttgtcctggtcctccacaccgacggcatggtgcgagctgacagcttctccgtggaagacctgatggccttgataaagcggtggatccgagctctcctgaccatggtgcaggtcctcaatatcacgctgctcgagctcccactcccggtcgccggaagtacggaacggatggcggcggcggcggaccacgcgcagttcactgggttcgcggaggagagcatcctcaggatgctggccttcgtcgacgccgtcactctttctgctctcaacgtcaacgacgaccaccgccaccggacgccggagctactcccggggatgctgcagctgtacgcctgcgtctccgaggcatgcgatctcctcgtctcagctggcatgggcaaggacgagatcacgaagatgcaggccttggacgccatgaacaatggcatcctgatgcaaagcaggaggaagctgagcgatgctatctgggtcatgatggagaaggtccgggctctcttcttgatggacgcctgctggcaggtctcgcaggaggcagccgcatccgggacccatgagaccacggagctgacgatgaactacatcacgcttctctggcgcaaccataccatgctcgactacttcagcgtgttcgtctccgacgccgacagcttcagctcggtggcgagactcatcgccgagatgatcacctgcctcgagtgcaagctcgaggaaacctccctctccatcccggacctgggtttgcgcttcatattcttgctcaacaattggcaccgtgtcttgcagcgtgttgaatccttgcgagacttgccagcggccgtccggcaagaacgaatccttctcctccatgcctcggacagcaagattaagaggtacatagacgattatcttaatgcctcctggtcgcctctgttacgttgcctgctcatcgacaagccttttgttgctctcgggaggtctcatgaatctaaaattgagacacaactccaaacaacctacgcaacacaaaagttttggaaggttccgaaccctcagcttcggcagagactgcgtagagccatcatgagcaaagttattccagattatagtaaatacatagagcaaatggataggcagaataaaatcaatcgacacctcgtggtcactagtcccgagcagctcgagcagcaaatagaggaattatttgaaggatga

SEQ ID NO: 42588 - DNA, 396 bp, Oryza sativa
  Clone ID: PAT_MRT4530_45825C.1
tttttgtttatttacttaattgttttttttatttctttatattaatactgttacatgcctattttacagtaaggggcacattcacccttcttttaatgtaccaagaaacaggcggggaggaaaaggaaagaaaaaaagggtctccttcgcggaccaaaactaaaaaatacaccggggggtggccatgcaacccaaaatcagcaccccccccgctgcctggaagaacctcaagcaaggggaccaaaataaaaaacatggggggggaagcgggagctggcaccccccgatggcctggcacagaggagctagcctaagtatagggagggcaccgcacacctgttcgaaaaaaggatggaggtgcatggcgcacaccgaaagggttggtttttttcggca

SEQ ID NO: 42589 - DNA, 501 bp, Oryza sativa
  Clone ID: PAT_MRT4530_45826C.1
atggcgacgaccatgactacgctcagtgaggagcaaaggtctggtacgggggagttgaggtccagaatgatcgacaacaaggttgagaacaagcccatgtgcaggtgtgtgcgtgcgcgggagtctgtatggcacgaggccgacgtggcagctccggatttgtcacgaaggcgtggtatcatgcgtggagaccaggaggagcgcgcgcacgggacatacggcagtcgacggttcgtgatcttcgtgaaaaagcgcgggagccgtaccgcgtgggacccacgatgtttcacaaccacgcagggcgaggcgcagttgagcgtgggatgcgtggctcgctcggattggtgcggaggaagtcaacgtgaatcgacggtctctcttcgcccgtggcacggttttggaactaggcgcaaaaccttaaaagtcttcatagtcggcaagctcctaaagatacccctcggcggttggatcatatcctccttcttcgtcttcaaagcctaa

SEQ ID NO: 42590 - DNA, 104 bp, Oryza sativa
  Clone ID: PAT_MRT4530_45827C.1
gcacgagggtactgacacggtggctgcacccctacgcaccgggcgcctacgacaatgaaggccccgcggggtactgtgcgcaactgtggtgtcctgacccctcc

SEQ ID NO: 42591 - DNA, 1203 bp, Oryza sativa
  unsure (1)..(1203): unsure at all n locations
  Clone ID: PAT_MRT4530_45828C.1
atgaagctgaatgttgatggctcctatcaggagaataacacagggggcatcggtgctatcttgcggaacagcactggagatgtaatatttgcagtctatggctttgttgagcagagccagagtgcgctggaagcagaaattttggcttgcaaggaaggtatcagactggctctccaatggacccttctaccgattatcattgaatctgactgtgcggaggcgatacagatgattctttctgaagggaagctgcgatcggcacatacgtttttagtcagggagatccaaggcatggtgaagggggccagggagatgaagctgaagaagaatgggggaggtggtggtggcggcggcggcagcaggcagcagtacgggttccgccccacggagcccgccggcttcggcgccggcaggggggacgccaccgtcgatgtcccgctcgacaccatgggcgatatcaaaaggagggaggaagcgctgaggaatgctggagtgccaatggaggataagaactggccaccattcttcccgatcattcaccatgacattgccaatgagataccggctaatttgcagaaattgcagtatctcgcgttcgcaagctggcttggtatcgtgctttgcctctcatggaacttcatcgctgtcatagtctgttggatcaaggagggagattcgaagctgtttttccttgccactatctatgccttgcttggaattcccctctcgtacttgatatggtataggcctctctaccgtgctatgaggactaacagtgcgttcagttttggatggttctttctctgttacttgatccacattggcttttgcattattgctgccattgccccgccaattgtgtttcatggaaaatcattaacgggcatactggctgccatagacaccttttctgagcatgtgataattgggatcttttactttgtggggttcgcgctgttttgcttggagacactgctgagcattggagttcttcagagattgtacatgtacttcagagggaacaagtgaagctattcatcatgatggaaagtttccggtgatcaccagtagcacacctcttcatgcatcgcttctgtgcatacaaatcagtacaccctgagaatgtctcttcatgtcagtttattgtgaaaccttttcaagcttgttatggnngtaggttgttagcattcgtatcatagcttt

SEQ ID NO: 42592 - DNA, 282 bp, Oryza sativa
  Clone ID: PAT_MRT4530_45829C.1
atgatggttgtgacggttggaatggtaggtaataccctccaaccgtcattggggcttcatctccaccgtacaaccaaaacctggatccaacggaggtaagggaggttcggccgaaccaggggctggcccaaccagcccacctttcggctggcggcctcctctgttgctcctttatatagacttgtgaattttagcccagtttgacgtgtcaactctgagttctaggcccattcatgcataagtctgattctcgacatcgtctcattgatttatcgtttgagt

SEQ ID NO: 42593 - DNA, 260 bp, Oryza sativa
  Clone ID: PAT_MRT4530_4582C.1
atgcccctagcgcgccgtgaagttgctctgtcgcaccaccaccatcttccgcaaaacatcaaactccccgccactcctaaagcgacacggagccgtctagcacgacatgcacctgcctttacagatgtgatgatctcaccggagatactcaactgcaccgtccacacctatccccaaggcccaaccttcgtgacgaaatttaatgtcacagatggctaccacgtggcggccaacatggcaggtgacgtggtcgttgacac

SEQ ID NO: 42594 - DNA, 384 bp, Oryza sativa
  Clone ID: PAT_MRT4530_45830C.1
atgaagctgaatgttgatggctcctatcaggagaataacacagggggcatcggtgctatcttgcggaacagcactggagatgtaatatttgcagtctatggctttgttgagcagagccagagtgcgctggaagcagaaattttggcttgcaaggaaggtatcagactggctctccaatggacccttctaccgattatcattgaatctgactgtgcggaggcgatacagatgattctttctgaagggaagctgcgatcggcacatacgtttttagtcagggagatccaaggcatggtgaagggggccagggagatgaagctgaagaaggtgaacaggaactgcaatcgcatcagccatgttttagctaataaaagctatggctaa

SEQ ID NO: 42595 - DNA, 450 bp, Oryza sativa
  unsure (1)..(450): unsure at all n locations
  Clone ID: PAT_MRT4530_45831C.1
acccaactacacactgtccctgtacattcccacctcggtggtatctgtattgaattgagcatatagtatacaggagagaaaaataaatcatgcatcatcgtgtgtgacaattttaaacatcgggggggtgcaaatctgaataaaaatggcatgcaagtttaaacaaaaaaaaaaaaaaaaaaaaaaaaaaaaaaaaaaaaaaaaaaaaaaaaaaaaaaaaaaaaaaaaaaaaaaaaaaaaaaaaaaaaaaaaaaaaaaaaaaaaaaaaaagggggtgccgttttaaagaacccaagcnaacgaccccgggcatgcaaattaaaagnnnnnnaaaagggnccccaaaatnaaannaacggggccgggnnnaaaaacgggggaactggaaaacccctgtctttcccaaactaaancccctggaaaaaaatccccntttttttttttggtttt

SEQ ID NO: 42596 - DNA, 5101 bp, Oryza sativa
  Clone ID: PAT_MRT4530_45832C.1
ctatccattgacgatcaacccatccacggtggcggcgagcgacttcggccggagcaccggcgtccggcaggagacgcggcgctcgctcatccgagtcgacgagatgctggttatccctggagtcgacaccgccaatcgagtcgccggtgatgcatccaccatgtcggagtcgtcgtgacgctgctctgctggggcacgccaggatcgccggaggcccggagccaccgtcgactgccaagactcctgcttccaccacgcacagcgtatcaaatcatggccgcagccctttcccccgacgcggccgatgttcggcgcgacgccgagccctaaagatgcccctgttgtgatcactattgtgtgaggacgtctcactgagactccactggccggcgacgccttcacactcgtcgcggtctctttagtcaccgtcaatgtcactgccatttcaggtgtatcctctctgccgactctgcgcaggagttggtcctctgcttctttcacgaaagaatcaagggtctttgggtcgctaccgccagcgataaccatgaagttctcagtatccgatatttctttcgcaacctcggacagtgattcaatcaattcctttgcgtcccgtatggcgtcgcggcttccatgtttaacagttagtattaataaatccgcgacaagcttcactgttttcagttcgttggccgtatttaaacaacttgatctctcgatcatcttctggagctggaccttacctagaatgctgaagccgccggcttcactggtaatagcatcgaacagaggaggtaaatctcgggcattcattaagttgcgtgatatcgtcacacttagagataaaactgctgtgagagtttctctattcacatattcgtcacgcggttttgcaagcacctttagcatcccaaactttatacgttctttgaggttctgggcacattcatcatcgtcagagtgatgaatacacaaatgctccagaatttgcgctgcgattataccgcacttggtgattttgtcttcaagcatgccggtgagatcaccgatcacatcttgttttgctcgcaggattttggtggtgttttctttgccatgggaacatagcttcgcaagcatttcaccagccagcaaatcgactctgtcatcttcagcagtggtatgttgagtgaagatgagcaccagtctcttgatgaaatgctctctcattgttgctatggtcgaaggtgcgtcgtccccacgccgcagtcggctgtagatctccagtgctccatctcgccggtggcgccaggagtagtcaccagattggcgcatcacttggatggacgcgccgatcatttctctgcagatcggcctctccgaatcactacaaacggagtggtacttagtgtggtgcatgtcagaacgtagtggcaccatgatcttggcgagcaggccttccttctcagcaatgacacggcaccattcctcgtcggagacgagtttcgcaaggagacgaaggccctccaccatcagctcttggaagtgttccaaggcgttgtactcgtcacccttctcatcgccggggggctccaccagcgaggcaatcgagtggatgccttgcgggaaattgagctgctcgcggcggagatcaccggcgaggtgtgcaaggatccgcgccgcggagatgcttgttatgtaatggtatcccctcgcgggatccaacgactgaaccagcttctggagcaagtcgccggcgccggagggcgaccaggccaggtgctccttgatgaggctgtgttgctcttccagcttggggttctcaagaagcgcaccgaggatgcttgccccgcagacgaagctccagcagtttggaaattcagactcaatcatggtgtccacggcatacttaaccaaattccttcgtttggcgaaggacgggtccttctcgcacccgatcctcgtttcatggatgtacctacgcaacgatacgaatgcataaaaatgacgccagtggtggaagttgtacgccttggccacgttgtttgtcagccttgattgccagaagtccgaggagaagcggtagtaggagagcacgccctggaggagtaccatggtgtagagcacgtccagcgccggccgcaggttgttgctgccgtcgccgtagtcgcgatgcagcaggcgccaagcggcgaggccggtggtgatgaccagcccgcaagcgtacagcaccgctacggcaagcgcgagaggccccgctacgacggcgaacaccagctgctgtaccagataagcgacaaatgccgccaatctacgcagccaccgtggccaatgcttgggtttttccttgctggtcctgcgcccaccatcaccatcttcatccttcatattttcagctctaatattcttgtcatccttgccgattgtctggacgagggtaattattgtgaaacaccaaaaatccttcttctctagcgctgatacaaaaccgccaaggaggataacggttgtccataaaaccacaagatagcccatcaccctgacggccatcgacatgtatcctataaacaaagcataattgttgacagtctttacttccgtcgccgggcggaaatctggaggagcggacggctgccaggagccggccagccacgggagcgacgagcgcgtgaactcggcagccggcggcaagcgcgtggcggccagacggccatccggccgatcgcgggagcggcgagcgcgcagcggccggccggctagagtcccgcaagctagcgcgcgggggacggacggccacggcaaggatgatatcagccagttcttccctttcccaaagacgcgctgggtgacgtatgatggcccaacgttttctggataaataccatcagctaaataatatcccatattatagtcagacccattaactgtaaactgaacagtaggtgctcttccttgtagtacctcagtgaacaatggtgactggtccaatacgttaatatcattgttagaaccagcaaccccaaaaaatgcatgccaaatccatatatcagcagaggcaactgcttctagcatgatagtcgatactccataatcaccacgggggaattgccctttccacgcaaccgggcaattttcccattgccaatgcatgcaatcaaggctacctaacattctagggaacccatgtgcctctccaaattgaagtaaacgttgagtatcctcttgagtaggcctcctaagatattgctgaccaaataaatgcctcacaccttgaacaaaattaatcatgctttccattgctgttgtttctgctactccaaaggtttcatccataaggtcagctggtgtaccatatgccaacattctgatggcagccgtgcatttctgcagtggcgatagacccatcttgccaaatgcatctcgtcttagacgaaaatatggggaccaaacaccaagagcttcaacaatgcgcaaaaatagatgctttctcatgcgaaatctccgacgaaattggtcatcagtgtacaaaggattgtcataatagtatttagcaaacaatctgttatgatcctcttcatgatccctgttgatgtacctgcgtgtgtagcccccacgctgagtagatggtccaactgatttgcgaagaaaatcatccctacatcttgtaagtatgggtttttctgtactgcaatgtattcatgaagattatcatgactcatgaatggaaaagaatattaagtgttgtgttgtgttgtaaaaaatgtgattgcttgcagaaaactagttaggatatattaggaacttttgcattaagccaacaatccgattgggtgcatgtctattatccaggtctgaatgcaattttgtgtctattttcccgagcgagaatagccttagctcatttaacggtaaccaacaggcaaaccggcgatctacccaatcacatacggactacagtttgccaagaatcaaaacacctcgttccagacacaaagctatgataacgatgctaacaacctaccccataacaagcttgaaaaggtttcacaataaactgacatgaagagacattctcagggtgtactgatttgtatgcacagaagcgatgcatgaagaggtgtgctactggtgatcaccggaaactttccatcatgatgaatagcttcacttgttccctctgaagtacatgtacactctctgaagaactccaatgctcagcagtgtctccaagcaaaacagcgcgaaccccacaaagtaaaagatcccaattatcacatgctcagaaaaggtctctatggctgccagtatgtccgttcatgattttgcatgaaccacatttggcggagcaatggcatctagcatctgggcctgtcttgcccaagtacatgcttcccagataccatctaaacctgaaggcactgtttgtcttcatagcgaggtagagaggcctataccatatcaagtacgagaggggaattccaagcaaggcatagatagtggcaaggaaaaacagcttcgaatctccctccttgatccaacagactatgacagcgatgaagttccatgagaggcaaagcacgataccaagccagcttgcgaacgcgagatactgcaatttctgcaaattagccggtatctcattggcaatgtcatggtgaatgatcgggaagaatggtggccagttcttatcctccattggcactccagcattcctcagcgcttcctccctccttttgatatccgcctcccgccgcttcagatctgtttcccacgatgagagctcccttgccttgctcttggagtcgcccatggtgtcgagcgggacatcgacggtggcgtcccccctgccggcgccgaagccggcgggctccgtggggcggaacccgtactgctgcctgctgccgccgccgccaccaccacctcccccattggagaaggggttgtcgtcggcgttgccctcgtcgaacgggttggggtcgtgatgcatgccgccgccgccgccggtgacgcgccgctccttcctagggcttggctccgcctcgccgccgcgcgtggaggaggaggaggaggcgtacgccacctttagcgactacaccttaatccaggaatgcaaccttgtcat

SEQ ID NO: 42597 - DNA, 534 bp, Oryza sativa
  Clone ID: PAT_MRT4530_45833C.1
atggccgaggaggacaacctggcgctctctgtcgtctgcgagcgctcgccggggacggccgtggaggcggcgtccgggcggccgccgaaggccggcagcgagcgcgcgcgccggcagaccatgtccaggctctacgacgagctgggcgcgctgctccccaacctccccccgcgggcgtcgacgacgcggatcgtggaggaggccatcgcgtgcgtgggggagctgcgggcgaggacggcggagctcgaggcgtacagcgcggtggcggcggcggccgggcgggccgcgcgcgacggaccagccgaggtggtcgcgtccgggaagacgtcgtgcttcgccgtccggctgcgggcggcccgcgcccggccgggggcgctgacgcgcgtgctcgaggtgttccagcgccacggcgtggccgtcctcgcggccaccgtggcgcgcgacggcgaggagacggcggtcacggtcaccacggcggcggtggcgccccgggtcctggagacgatcaaggcggagatcatctgcgccgcatga

SEQ ID NO: 42598 - DNA, 185 bp, Oryza sativa
  Clone ID: PAT_MRT4530_45834C.1
tgtttgttttttaacaagagacgttcttatcatatgcaacacacaagtcatcaactgttacgagggcctcgtagttggacccgttcgggccaatttacaacaacaggacgtgtgggcaagcaaggcagaacaagacaagcagcggcaaagatcccggctgcctttgcatccttgggccaaacggc

SEQ ID NO: 42599 - DNA, 337 bp, Oryza sativa
  unsure (1)..(337): unsure at all n locations
  Clone ID: PAT_MRT4530_45835C.1
cggaccggaanccgcggcgcgccagcgggcgcccacacacgcgagagagggcggccaaaaacggcgcgcaacgagaacgagacggagaagaggacagggacaggcagagccaagcgggaggagcaagacagcccgcnggacgcgagccggcaggagcacgaccggcagcncaccggccgggagaggaaccagacgaaggaccgccgcccgggcgcgcccggccagcagaagcagagcagccagcagcngcaggacgcgagccgcaagcgccgnngcgccgccaaccgccggagggggaggagccacgaggagagcangccgaggcccccggagcaag

SEQ ID NO: 42600 - DNA, 529 bp, Oryza sativa
  Clone ID: PAT_MRT4530_45836C.1
tcacgatgcacagattatctcgacaagcctggcgaagttcttcctgcagtttccatttggctcgataaacatcgttgccaccttcgcctgcaactcctgcgcccgcgccctcatccggcacccatccttcccgccaacaagcgacaccactactgtagccacgccgtcgcacgtcatcaccctgtcgaacgccatcccgaacccccaaacgtgggacaccaatagcgcgttcatcttctggttgccgaagaatgggcggcacaccatgggtacgccgcttgacacgccctccatcaccgacgcccaccagatgtgcgtcatgagcgcgcccaccgatgcgtggcacaaaacacctacctacagtgcccacgggacaacgagccccacggcgtgctgcttggtcctccctcaggaccagaggaacggcgcggcgctggcctcgagccccgtggctagctcgcacagctcgtggagacaggagacatggctggcgcaggactgcctcgaggagaagcatgctagagcctaa

SEQ ID NO: 42601 - DNA, 313 bp, Oryza sativa
  Clone ID: PAT_MRT4530_45837C.1
tcgctcacagcgttcgaacagataaaaaggcgaggaggcgtttccccggtttactctctgtgcgggtccaggccagcaccaactacgcccaccacgaacttttagctgcggttagcttaagccacccaccacttgcactcgggtacgtactggggggatgtgagttaactttgggcgccggcacggcgctcaacgaggtggcggccagcggcgaagacccgcaccaccacgagtacgcgaagctggtgcgggggatgaacccgccgagggaggaggaggacaacgtggcctgctaagaggcgacggtgatccc

SEQ ID NO: 42602 - DNA, 902 bp, Oryza sativa
  unsure (1)..(902): unsure at all n locations
  Clone ID: PAT_MRT4530_45838C.1
gaancgggnaaaaggggaaattttnnntgggnaattttccnccggcaaatgggaaagggnaaagggnaaaccnannnnaaaangggttnnnttcccgccccgtcccgcccccgccaaaagggnggcccctnctccttnncncccnaagggngncccnanggnttgnntttttggaantanngcccnnccccnaantttcctncccnccctttccccccccgnngnaaaaaaaccnantngggggnnttcttttattccccccccttnnaaaaaaaaaaaccccncnnggggaagggaattnnnttttaaaaacnaaaaaacaacnggggncccccgggggttttcccccctttnccttnntcaaaggggncccccattgggaattngtgggccccccccccccccccccngggaaaanggtgggaaacccccccnaanccnnccccnnnaaaaattncnaggggggnnaactgtttttacttntcgccttttgaaaaaaaaaanattttnttttgggggttcccccnncccntnggcngaanggnattaggggtttttncttttnaaaaccccccnagggaannnngngggaaaaattttttnntccanccnntttnttacaaanaannggaatngaaaaancncgnggtgncccttttttttgcccnaaaatttttcccncgggaaaaaaanttttttttccccctttcttttttttttcggaaaaanccngggattttttttaaaaaagggtttntcanaaaaccnnttttnggacnttttcncnccccnggggggcnttttttattaattttttcncaaancccccccccttctaaaannaagtttttttcncccccccntttccccnancccnnnaatnnganattttnncttttttt

SEQ ID NO: 42603 - DNA, 1100 bp, Oryza sativa
  Clone ID: PAT_MRT4530_45839C.1
gagagagagaggaagaagcaaagcacgggcaccggtggaagcgaagcgaaagtgaaagcatagagagaagagaagagccatgccccatctcgccgcctcccccacctccgccgccgccgccgcccctgcctccgcccgcgttgccttcctgcgccctggccgcgtcccccgcccgccgctgcagacagcgcgtggccttcgcccggacttgggcaccctgcgcacggcggagcagcccacgttgtacgacctactcgggatctcctcggagggcaccctcgacgaggtccgcgcggcctacaggcggatggcgcgcaagtaccatccggacgtctcgccgcccgacgccgccgccgagaacacccgccgcttcatcgaggtgcaggaggcctacgagacgctctccgaccccagccgccgggccacctacgaccgcgccctcgcgcgcggcgtctgccggcttgccttctcctcctcccgccgcgtcgccccctactactaccaggatcaggaagacaagtctggctggaggagaacttggggagaccaaattgaggagctgaagaggaggagcatgacgaaggattcagaggagaacctctcctggggagctcggatgcgaagaagaaccgaaacatcatcctctgagtaactgtgatcgtaatgcttccaaagtgtaaccctagtggtatatcttttgcatcagctaaattatcataagctgttaacgagtgcaaggttagaagggtgtgctgtgctggtattaagctgtgcattttgtatttactcctacaaaagatgatgcggcaaccctatgcacaaggaatgctaagcactcctctactatagatattagtggccattctagtggtggcatagttagaagcccgtatgggggtatttgtgtcagtatactgtatacccaacccaagctatgaatgaacgatgaagtgaccaagtatgatgtgtatatttgcgtaggaggctctgcgtttccttgtgtgctctagtgtaaatatgggatatgatatcatatgagcaacttgtcaaaataagcaaagctaaggtgtatcttcaaaaaaaaaaaaaaaaaaaaaaaa

SEQ ID NO: 42604 - DNA, 1128 bp, Oryza sativa
  Clone ID: PAT_MRT4530_4583C.1
atgtcggcccagtccgccgccgcgcgcgcgcgcgtccgcccgctgacaggtggggcccacctgtcaggcgccctagcgccgtgtgccctagcgccgccgtcgctccagccgtgcgccgccgccgttccagacgtcgccgtcgctcgggaagaccgccgtcgtggtcgccgtcccgtcgccgtcctcgtccgccccttcgccgtcgccgaagatcgccggagcaccatcgccgccgtcgacccgaagaccgccgtcgtttcttcgtcgtcgccgttgccgtccgttggtcttccgccgctcctttggtcaccggaccctgtcagtttcatggggcaactcagtgcaattctaatagtattccacatcagcctcttgaagatcagcctcaaccccaagtcatggctaatcaaactaagacagtggaagagttattacaacagatgcgacgtcgagtcaggagttcccaatatcggcaccgaagacccctgtcaaaatgctgtccagatccctgaagataacgacagccaagtgttcgccaggtcacctgaagaagacgagaagcagcaccccggaagtaaccaagctccaagtcagtctaccgacaagaaggatggtactttgcagcccaactctggagcgaacaggacagtgatatggaagatggataatggcaggaccatgatcatcaccggttcagaatttacacctgaagacgcagcaaggatacccaagcgtcagagaggaagaaataacttccgtggagcaccaaaggcagttcgtcgttattcgcaagttaccagcactgcccacgacaccaatcgacacctgaatgtgcaacctccgcctcaacgaatcatcgtcaagggcaccgtcagaggccgcattgttccaccggccatcgtttcaagcctacagcaccagcgccagcagggtcgcccgactgttgtcagttctagcaatgcacctcgtattgctccaattcggaggtccatcggcaaatcaccgcttggtaaccccacgggaaagaagatcctacctgttacagctgtcaagacagttgccactccaccatcaaagatcagcaagcagggcaacgttcccggtgagacttcagctagtaggagttaa

SEQ ID NO: 42605 - DNA, 772 bp, Oryza sativa
  Clone ID: PAT_MRT4530_45840C.1
ccgggctgcaggcgcaagcaagctgagctcgataagaaaagggctgaaaaagaggcagaagcagaaaagtctaaagcacagtgggctagtaaaaatgactctaaaccatcaaatccaagccggcaagtgaaacaaacgccagatactaaaacaagagctgcaagcagacgaggaaaagatgtaggttgatctccacgaccaactctgttgttgcgcttatgatctgcatgctgggcgaatgcatgacctgctcgatgcacggggagggcaagaaaagttgtgtaaatgatgcagccatcaatggaaacagcatggctgcaccatagcaactgtacatgacgccctttacgttcgcactagcgatggccggtttttttctcttcggccagcagggccgcccagtggcaacttctgactgctgtaaagaactaacactaacagcaaagctaacatcattcgttttttcctttgttttttatgttacttgtccattctttctaaccccagtggccaagtgcagccaatgcttcaggagtagagcctcgtagtatcgtagtaggtaggtagaaattgtacaaataggaacagggaaagggtagggaaaccatgtggggcggagaaattgtagctgggatctatacgagatgtaaacatgcgtgtgcttcacgaatatttttttttgtagtgaatgtaccaaggttttcataattagtgaatgcagcagcaaaaaaaaaaaaaaactcgagactagttctctctctctctcctgcag

SEQ ID NO: 42606 - DNA, 731 bp, Oryza sativa
  Clone ID: PAT_MRT4530_45841C.1
catacggtggagataaggaggatgatatacctgacgatcaagctggccacaagcttgctgaaatcaagctcgagcctgcccaagagatggaattatgcattatgctcctcgagtgttgctctcaagagagaacctaccttccatattacggattactagcacaaagattgtgcctaatcaacaaagtttaccaaaaaaacttcgagaaatgttttgcgaaacaatattcgatgatcgatcgtctcgacacaaataagctggggaatgttgccaactttttcgcgcatttgttggccaccgacgcgcttccatggcatgttttggcctacatccgtttgacagaggaggataccacgtcgtcttcaagaattttcataaaaatactgttccatgagttatcagatcaccttggaattcgccaactcaataagagactgagcgatcctaaaatgaaagattattttgattcaatctttctaatggatcatccgaagaacacaagattctggatcaatttcttcacctccatcggtcttggtggtatcactgagacgctgagagagtaccaatgcctgcaatgcaacaacagaagtcagaatcaagttctgatgagagtggcagaaacccaagtaagagaaggaagatgtaaagagacggatggaagaagagctccatgaaaattcaactgtgcttatgggggatgcaactgtcgtcacaatcggcatcgtcag

SEQ ID NO: 42607 - DNA, 568 bp, Oryza sativa
  Clone ID: PAT_MRT4530_45842C.1
gcggagtgtcaagtccacggggggggcggcggcggcggcgcgacacgagtgcacgacgacatgctccggcgggcgaccacctcgctgagccgccgcgccgcctgcgccaccctgctccgccgcctccctccccggccggcgacgacgcttgagcgccacccgccggtccaccccggcctccgccccgcggcggcggcggcggtgcagcttcggcgcctcagcgacttcggcgtgtcggtcccccggcgcatggcgcggcggagtcctcccaccaggcccgagggttactccacctccgacagcgaggcggacgggtggtccgttagcgaggatgacgaggaggaggtggaggaggttcagttggagcccatgtccgtcgatgacgtcgcggcggggaaggagtgggaggggttcacattggagtacgaccacgagcacgacctcgacgccgatgatgaggatgccgcggagtaggagaagaagaagtagcggcgctggaggtgggattctcttcctttttctgcgttgcacgccaggtgcttgcggaaatgcctgtgaggctttacgc

SEQ ID NO: 42608 - DNA, 753 bp, Oryza sativa
  Clone ID: PAT_MRT4530_45843C.1
atgcctatctctgaagtcgatatccggcgtcttgtcttagcgtatacaattcaaactgaagtaaatagtcaccgggcattaatcggcatccacaatgtgctcccaaaccaggtaataggcaatattttaatcttcataccaagtaaatctggccatcattcactactagtagttatggtctttcctgaagtggcacttttggcaagaaccggcgggattccatcacaaatcatgttctgtaacgatcttgtgataaaaaaaaacatcgtcgtagaactgtggaagctccgtacctattgtgacaaaaaaaacgagtcgtccgatacagatgttcatgataacaggcatcgtcataacatttgtgacgatccaaattgtcatgaaccagttgatgccacgccgccgcatggacaacataatggcatggaccctccgtggctggacgttgtgacgtggcaggtgctacgtgttggctcctcccctcctgtgagccaccggcaacgctgccctagatgtgagccgccgatgctgccattttcgattgggtctcctcagtgccgctccctgtcgtcatcccgctggcgccgcagtaggatggcgcggctttgcctcaattgtccccttgccgtgagcaccaacgccgagtccacggctgccttcaccgcccgcggctgcaacggcgcgcccctgtcgaggagagagggagagagaaaagggggagagagggaggaagaaggggtcaaagagagatgc

SEQ ID NO: 42609 - DNA, 409 bp, Oryza sativa
  Clone ID: PAT_MRT4530_45844C.1
ggcccaaaattttgggcctttttttggggaaaaacctgggccggaccccccctttgccttgaatttggccctcctcccttttgggcggttggcccccccccccgcatttttttaaaaaaccacccccccccccttttttcaactaaaaaatttttttttccgtgttttcagggggggaaaactccccctcaaaacttttttttttttccctgcccggaaaccccaaagctggccccccctttcggtagcccccaaaaaactcacccgggttcccctttattttttggggcccccttcccgggtcccaaaaggggggagctttttccaacccttgggtgtttcccaaaaatgccttattttgttcttttttgaaaattggtggggttggccaccgaaagggccctttttt

SEQ ID NO: 42610 - DNA, 237 bp, Oryza sativa
  Clone ID: PAT_MRT4530_45845C.1
gcaagtaagaaaaagattgatattttattcaatggggctaacttatagtgttagcacactctagtatgcaacaccttattactagagtacatgtcaccaacttttggtcaacaacaactacatgaacagagttcgcagttgaaaggggccatgttgcacatgtatggcatgtgcatcaacatcttcatcatttgctgctgacagcatacagcacaaataacttgttgcattctctgc

SEQ ID NO: 42611 - DNA, 1461 bp, Oryza sativa
  Clone ID: PAT_MRT4530_45846C.1
cagtatcattttggtgtcatggcgccggcgcatgccgttaccccgcacgtcgtcctgctcccgagccccggcgcggggcacgtcgccccggctgcccagctcgcggcgcgcctcgccacgcaccacggctgcacggccacgatcgtcacgtacaccaacctctccacggcaaggaactcctccgcgctcgcctccctcccgacgggcgtcaccgccacggcgctcccggaggtgtccctcgacgacctccccgccgacgcgcgcatcgagacgcgcatcttcgccgtcgtgcgccgcacgctcccgcacctccgtgagctcctgctctccttcctcggctcatcctcccccgccggcgtcacgacgttactcaccgacatgctctgccccgcggcgctcgccgtggcggccgagctcggcatcccgcgatacgtcttcttcacctcgaacctcctgtgcctgaccacgctgctctacaccccggagctcgccacgaccaccgcctgcgagtgccgcgacctcccggagccggtcgtcctcccgggatgcgtgccgctgcacggcgccgacctcatcgaccccgtgcaaaaccgcgccaaccccgtgtaccagctcatggtagagctggggctcgactacctcctcgctgacggcttcctcatcaacaccttcgacgccatggagcacgacacacttgtggcgttcaaggagctttcggacaaaggcgtgtaccctccggcctacgcggtcggcccgctcgtccggtcgcccaccagcgaggcggcgaacgacgtctgcatacggtggctcgacgaacagccggacggatctgtgctgtacgtgtgtttgggcagcggcggcacgctgtccgtcgcgcagacggcggagctggcggcggggctggaggcgagcgggcagaggttcctatgggtggtgcgcttccccagcgacaaggacgtcagtgcgagctacttcgggacgaacgaccgtggcgacaacgacgacccgatgagctacctacctgaggggttcgtcgagaggacgaagggcgccgggctcgccgtgccgctgtgggcgccgcaggtggaggtcctgaaccaccgcgccgtgggagggttcttgtcgcactgcgggtggaactcgacgctggaggccgcgtcggcgggcgtgccgacgctggcgtggccgctgttcgcggagcagaagatgaacgccgtgatgctgtcgtcggagagggttgggctggcggcgctgcgggtgcgaccggacgacgaccgcggggtggtgacgcgggaggaggtggcgtcggcggtgagggagctgatggccgggaagaagggcgcggcggcgtggaagaaggcccgcgagctgcgtgctgcggcggcggtggcatcggcgccgggtggaccgcagcaccaggcgctcgccgggatggtcggggagtggaaggggcgcggttga

SEQ ID NO: 42612 - DNA, 346 bp, Oryza sativa
  Clone ID: PAT_MRT4530_45847C.1
ataattcaatttatacacatcaagttgatcatacatccatgtctgttcttcttttttcttcaaaaagaaacaaccaaagaggtttgtccccgtactaacttctatatatcataaaaccatacatcttttgtttcaccttatgaaatatacaagctaatcttcttgatcttaaaagagatctacatacactttttattcatatttagcgaacccaattctttttttttccaaaatctaaaaccgttttataagcacccattaaaacatttccaaaaattcaaaaaggaccccctgtttgaagaatttttaacgccattaacccccttttccaaaccattttccctcc

SEQ ID NO: 42613 - DNA, 235 bp, Oryza sativa
  Clone ID: PAT_MRT4530_45848C.1
ctgcaggcgcgcgatagattttttggtgtgttgaggaggtgcacgatgggcaagctagggtcctttttatagacgaccaaaagctgtaaatgtgacgtacgcggtgacactgggctgggttgatttttactgctattgttatagatgtgttgtgaattatcatgttcatgatgcagccacaaagggccacagggatgtagtttacttgtgatcatatgaattgctatgttcatgc

SEQ ID NO: 42614 - DNA, 783 bp, Oryza sativa
  Clone ID: PAT_MRT4530_45849C.1
ccggccaggggaatggacggttaggaggtgaggtgaggccgtcgttgcagcccacaaaaaggcggaggagacccggagactgtggagacgcgacgcgaaatcgatcgagagattattggcgagtcgaggagagtgcgcgagagagatggcgatgagatcggcgctgacctcactcccgttgcgcctccgctcccctgctcctgtggcggcggcgtgcggcgggatgcggctgatgagcgacggcaaggggcgcgtgctgagcgaggaggagcgggccaaggagaacgtctacgtccaggtttatttgaagatggagagggagaggatggagaagcgcaagaagaagctcgagaaggagaaggcggaggcagacaagggcaatcccgccgcctccgacaagaatacggaggggggatccaactaggagtgatgtgcttctgtctgaagacggacttgtttcacatgcctatgttggacaccggtgttcatacatgtcctaggatgaaagaataaattctgtaaaacatttgacagagctagattcatctgctctggtttccggtgcttgttcatgattgaatgaggctctattgtgttggacaagtaaaaaaaaaaaaaaaaaccggtgttcatacatgtcctaggatgaaagaataaattctgtaaaacatttgacagagctagattcatctgctctggtttccggtgcttgttcatgattgaatgaggctctattgtgttggacaaaaaaaaaaaaaaaccctttcaaaaaaaaaaaaaaaa

SEQ ID NO: 42615 - DNA, 1626 bp, Oryza sativa
  Clone ID: PAT_MRT4530_4584C.1
atggctcaactaggccggctttgtgccgtgctgtgccccagccgcgccgcccctggccgcccgatcggcttgggccgattcggaccgtcggttcccgtggaccggtggtggaccgcctcggtggtcccgggatttaatacgcaaaatagtctggaaatttgggttaaatttctgggcgtgacaaagtggtatcagagccaactcgactgtaggttgagccaaatggtcaaaccttgtcaaacatggaggagaaaccgccagcttcatgcctgtccagaagtcaagtcgagtctcaagcttcgtgcagcaaagagtgagaagcaattggtcagcatgagggacaatttcaacggatcaggatcccgtcagtttcatggatcaactcagctcaattctataagcttcccacgtcaacctctcaaagatcagccacaatcccaagtcatggctaatcagactcagacagtggaagagttgttacggcagatgcgacatcgatccctgaagataactgcagccaagttaccgtcagaccaaagggaagtaagtgctacctgttatgattgtggtgagcaaggtcattatataaggaactgtccatggaaggtgttcaccaggtcacctgaaaaggacgagaagcagtgcccaggaagtaaccaagctccaagtcagtctactaacaagaaagatggtactctgcagcacagctctggagcgaataggaagggaactgatcatgtgcctaaggattatcagcggaactcggtcctagttatgaccaagaaagaacaagggacaaccgtgcaaccctttcatcaaccaatggcagtcgacgacatcagtcacaatccttctgctcttcctccaattctagccccggtggacgccaaccatggaagaagcaacgtcgctagggatgttcataaatcgctgcttgttccagtttcagctgccaaagtgcataatcagaagcctgcaccccaggaccaagcaagtcgattctgtcgcaactgtcgtaagccaggacattgtttcagtgattgtcctcttccaagagcagcaaaggcagttcgtcgtgattcacaagttatcagcactgcccacgaccccaatcgacacctgaatgtgcaacctccgcctcaacggatcatcgtcaagggcaccgtaagaggccgcattgttccaccggccatcgtttcaagcctacagcaccagcgccagcagggtaagcaatgcaaggagaacaacagctcgctacagttacaaagaggcagtatgctccttcatcagcacccgcagcaagtgtcgtcagcaccaggtcgctcgactgttgtcagttctagcaatgcacctcgtattgctccaatccggaggcccatcgacaaaccaccgctcggcaatcccgcgagtaagaagtcccacctgctacggcagtcaagagagttgttactccaccatcgaagaccaacaagcagagcaacgttcccggtgagacttcagctagtaggaactaaagggacaagtcagtcaggtttgaatgatggaagcaacaacagttccagtcaagacctctacttttcaggtctaaaaggcagttctaatcagcagcagtctacaatggtttga

SEQ ID NO: 42616 - DNA, 410 bp, Oryza sativa
  Clone ID: PAT_MRT4530_45850C.1
atttggcgatcaaataccactactattaccgctggttttggtgcacgttctgtcagtcgtccgctaaatcgaccgacaaagcatacatcgtggaatgacatgctacgaaccattgtacgagcctttgaagtcttcgtttgagtttatggtagaacatgaagcttaacatgatgcaaaagaatactcgagcgagtactagggcaacgtaaatggaagagagactgcaagagaggctgcactgcacgttgatcaaatcatgtgtcatataaacgaacagtaatacgaagagggatatgttggctgtattttgaggcttacgctgccgcatacgtctttatgtattttttatggcggcagttatggttatagttggctatattcccggttagtttgcatgtatatcagaaggg

SEQ ID NO: 42617 - DNA, 336 bp, Oryza sativa
  Clone ID: PAT_MRT4530_45851C.1
ctctgatgcgtctctctatggggagtgctggcccccctgcgggctccggcccggtgttccggggtgcgacctccttcttgcgggctgcgcgctggtctgctcgcgtggtgcgggcgcgctgggctgacccgttgggctgcgctcctggtgctctcggctaccccatcctccgtcccttgttctgttgcgctggtgctgctctccctggacggtgtcctctgctgggtctctgtctcggcctggaggtccctgtgggcggtgggcgttctcctgctcttggcttgcgcctacgtcgtcgccctgtgcctggcctgttgccttttgcttcttgtggtg

SEQ ID NO: 42618 - DNA, 141 bp, Oryza sativa
  Clone ID: PAT_MRT4530_45852C.1
caaattagttttttgctttcattgcaataacaaaaattcactgtttcaagaccgggcagaactgggcaaacaactccaatagaccggtacatcaacaagaggaggacactcgccagcacactcttgggaaaacagagcaaa

SEQ ID NO: 42619 - DNA, 164 bp, Oryza sativa
  Clone ID: PAT_MRT4530_45853C.1
ccggccgggaaacaacaaccatggaatcgttatctacaccagcataggatccatatcctaccccatagagtagattacaggatgggcgctccttgcgagcgatggatgcctagctcatgaacgattaggccctactcactctaggatgtcgacaatatcaacta

SEQ ID NO: 42620 - DNA, 101 bp, Oryza sativa
  Clone ID: PAT_MRT4530_45854C.1
gggaccaaaacagggtatattgcatctaaaggtacaaggtgtttgagcagtacatgtacgaggtagagcatgcagggccgtattgtatagatggtacatga

SEQ ID NO: 42621 - DNA, 1347 bp, Oryza sativa
  Clone ID: PAT_MRT4530_45855C.1
atgccagcggccttggtggcgtgcagcggcaagcgccggcggcggacggccaccactcatgctgctcgggactcatcgtcgtgggcttctctggcggaggatctggtgagcctgataggctggcgggtgctggctggagatgtgcgagactacatctgcttccgcgccgcgtgccaccactggcgctcctgcaccgccagcccgtgcggccgcggcgttgtggacccacgcttccacccgcggcggtggatgatgctccctgaggggaacggtctctacccgggccacggcatgctgcgtggcttcgttcgcttcttcaacctctccaccggcgctttcgtccgtctcaagctgcccatcgtccgcgaccaccgcatccttgactccgtcgacggaatcctcctcctgcagcggaaccgtgacaccgcggtccgtcttctccaccccttcaccggcgacatcgtcgacttcccgccgctggacaccttgctgccgtacatgggccgccggtcggaggaatatctcagagatgtcgctgctgcctccataacatcatcagctgatgacgatcaagccgtcttgcttatgatatggttattccgcacggtgcgcgtagccttcgccgcctctggggataagcagtggagggtgtcgagctggtccatgtaccaagcctatactccattgccattccaaggcaagctatacatattggatcaagccacggcttatggtggacctgaggtcttgcagatagacccacccctgcaactgcaactggaagggacgacggagctctcgctaccaccaccaaaatcaattgctaaatgtccagcaaggacacctgactcattctttctctaccatttggtagaatgtgactctgacattctgttggtcacctttggtgttagtgtgtatgcacaaatttcagtttacagactagctgatcttatttcgggaacaactgtcccggaccaagggacatttattgtttcaaagggagaacagggcatggcagatgaaacggaagtagggatagacgggttcgaagaggatggtggcatcttcctccttcgtcctggaggtgtctggccatggatggaattgctggagctcgctctggcatatatcgtccggttgaagacctctgggttaatcacctacgtcctactcctctggtactttccgcaaactggatctactcccagttcctatgttccctcgtgtaccatgtacttaagctcactaaagagtataagtgcatgctgggacacgccgcgcacagaaattggctcgaacaaaattaccatgaagcacaagcacatgctaaatattgttgactga

SEQ ID NO: 42622 - DNA, 786 bp, Oryza sativa
  Clone ID: PAT_MRT4530_45856C.1
atattctcctgtattggaaaaaagcaaaaaagaacatttgaaaaaaacatgaaaaaaacgcgcgagaaaatgattgttagaaaaaacatgcaaaaaaaaacacacgagaaaataaaagcaaaaaaaagagaaaaatatggttttcatcgtcagtaaaaaaagaaaaaaaaaaaaaaagcgaaaaaaaacaaaacaaaaagagtccgattcccctggaaaaaaaagatccgatccctaaaagggaaaaaataccgtttaaataataaaagcaaaaaaaacaaaaaaaagtctgatcccccgggcaaaaaagttccgatctcttaaaaaggggaaaaagacggagaaaaatagcaaaaaaaaaactaacaaaaatagtccgattcaaaagtggcaaaaaaaaaaaaaacaaaaaataaaaccgtagatcgtttcccttaaaaaaggaaaaaaaagtacaatacctgtaaaaggcggaataaaaaagaaaagtggccgaaaaacaaaaaaaatccgaaaaagaattaaaaaaccaaaaaaacatctaaagatccgtccgattccctcaaaaagtggcaacaaaaagctgtttgtaaaaaataaaaaaaaagtaaaaagggcaaaaaaaaaaaaaaatgaaaataaaacaagcaaaaaaaatgcacgagaaaaaaatgacgcgcgagaaaaaaatgtcagaaacaaaaaagtaaaaaaaaaacacgagagaaaaaaaaagcaaaaaaaaacatgctaggaaaaaactgtcagaaagaaatgcgccatttc

SEQ ID NO: 42623 - DNA, 421 bp, Oryza sativa
  Clone ID: PAT_MRT4530_45857C.1
tttagacacgaatcttacggcctcataggctcctttattctttgctccaaaatggaggtcaccttcattctgaatgaactaaaccctacgaaaatttcctattgtcattcccagacttgacggataagacgttctaaagaactctaagttcaccttacgtgcctaaacaatcaggattgtttatttgcttgtaatcaaaccattgccgcccactcagattcatcctttaaatccccatctgtgaaacagaatgttcttgctaacctctacacgagctgatcatggatcaccttcttgggagggagctccacctgcctctctggcctcagagaggtgacctccttgaccgggatgccctaaggcacaaggtgctctaagaaaccccactcaagatcgatgttgaacgccaaaccctcttgcc

SEQ ID NO: 42624 - DNA, 2779 bp, Oryza sativa
  Clone ID: PAT_MRT4530_45858C.1
gctatgaacctgtttacgattcggcctcggtacccgttttggaaatttgcagctgtagtgcatgcacttaaaatttgggagcacactacttgatcggcaataaatgtgagatttatacggaccataagagcctgaaatacatcttcacccaatcagatttgaacttaaggcaaaggaggtggttagaactggtcaaggattataatgtggaaatacattaccaccctggtaaagctaatgtggtagcagatgccttaagccaaaagccctttgagcctaaggatgcccatctacaggaagaaatggcacgattgaatgtgcacatcatccctcaaagttccagccataagctgagtgttcgacccactctggaggatcatatcagaaaagcccaaagttcggataaggatctaatgaaaatccgaacatatactggagaagataaagcaccggactttagagtggacgataaggataccctatggcataaagatagaatatgcgtaccaaaggaaggagacttctgacagatcatcatgaacgaagcacataactcagcatattccatccacccaggatctaccaagatgtatatggatataaagcagaaatattggtggaatgggatgaaagccgacattgcgcagtttgtcgctcattgagatacttgtcaaaggattaaagcggaacatcggaagctagctggattattacaacctctacccatcccagtgtggaaatgggatgagattggtatggactttgtagttggcttacccaggacgcagaaaggacatgattccatatgggtaattgtggatcagctcactaaatcggctcattttatacccgtgcgaactaattatggtggagagaagctagccaagctctatgtggaaaacatagtaacgttgcatggtgtgcccagcagaattgtttcagatcgaggaactcagttcacctctaggttttggaagagcttgcataaagctatgggcaccaaattggatttcagctccgcctatcacccacaaaccgatggccaaaccgaaagagtaaaccagattatggaggatatgttaagagcatgcgtccttacttatggcaaggactgggagcagagtttaccctatgcagaattctcatacaacaacggttatcaagcaagcttgggcatgtcgccatttgaagccctctatgggaggaagtgcaggactcctctgatgtggtcggaagttggagagcgtgcactagttggacccgcattcataaaggaagcggaagaaagggtagctgaaatcagagagaagttgaaagccgcccagtctcgtcagaaaagctacgcggacaagaagagacgagaagtaagctttgagccgggagactttgtctatcttaaggtttcgcctattcgagggactcgaaggtttcagatacaaggaaaattggcacctcgttacattggaccatatcaagtattgaaaaaggttggagcggtagcatacctcctggagctaccagaaggaatgtcggacatatacccagtattccatgtatcccagctaaggaaatgtttgaggatatctccgatccctcttgacccgaattatccttcgtcgacagagttggaagattactatatttatccttctgcagtcattgaaattatccttctgtacgactccaacttatccttcttcaacgggacttcatcatttattgtgatgcatcccgccaaggactaggatgcgtcctcatgcaggatggaaaagtagtggcttatgcttcccgacagtttaagcctcacgagtagaattatccaacccatgatttggaatttgcagctgtagtgcatgcacttaaaatttggagacactacttgatcggcaataaatgtgagatttatacggaccataagagcctgaaatacatcttcacccaatcagatttgaacttaaggcaaaggaggtggttagaactggtcaaggattataatgtggaaatacattaccaccctggtaaagctaatgtggtagcagatgccttaagccaaaagccctttgagcctaaggatgcccatctacaggaagaaatggcacgattgaatgtgcacatcatccctcaaagttccagccataagctgagtgttcgacccactctggaggatcatatcagaaaagcccaaagttcggataaggatctaatgaaaatccgaacatatactggagaagataaagcaccgggactttttagaaggtgggaccgattaaggataccctatggcataaagatagaatatgcgtaccaaaggaaggagacttctgacagatcatcatgaacgaagcccataactcagcattttccttccccccaggatctacccaagatgttttttggattttaaagccgaaaatttttggggggaattggggattaaaagcccaccttgcccatttggcccttcattggaaaactttgtcaaagggtttaaacggggaccttggaaacctgctggatttttaaaccctttccccctcccaagggggaaaaggggaaaaaatgggtttggcccttttaaatgggcttcccccgggccccaaaagggcctgtttccctttgggggaattgggggaaaacccccctaaaatggggttttttttttcccccgcccaaatttagccggccccagttctcgtccagaaaaagctacgcggacaagaagagacgagaagtaagctttgagccgggagactttgtctatcttaaggtttcgcctatt

SEQ ID NO: 42625 - DNA, 463 bp, Oryza sativa
  Clone ID: PAT_MRT4530_45859C.1
cggagtcagaaaacgtgctcaacccaatgtttagtatctgctggctacaagtagcgcctgtccctgtacgaacccacgctacctcgagcgaaagaatgaacatggaaagaagtgagccacgcaaaatgcatggcactaaagacatgcatgatgctgcgggccagaaagcaaagggaacatggtttgcgctgagagttgggactggatgtgtgacaacatggccatgcctggaaatggcatttgatgttactagagaacatgcgtgggtcgcattggtaacaactgatgatgcgcatccacacatgcatttttgttgtgagttaaacttttgtcgaaagctgatggtgatatggagccctttactggtgacttgcatgacctgcctgagagatatgcaactagcacgtaagagcgcataataaaatctagccgttgattattccaaaaaaaaaaaaaaaaaaaa

SEQ ID NO: 42626 - DNA, 1617 bp, Oryza sativa
  Clone ID: PAT_MRT4530_4585C.1
atggtctgcatgagggacaatttcatcggatcaggatcccgtcagtttcatggatcaactcagctcaattctataagcttcccacgtcaacctctcaaagatcagccacaaccccaagtcatggctaatcagactcagacagtggaagagttgttacagcagatgcgacatcggtaccagatctatctgatgcagcagatgcaacggcaatgtcaggagccgcgtcaagtccaccagccacaaatgcaagtccaggtgccagcccggaacctgaatcagagtcagagtcaggagttcccaacatcggcaccgaagacccctgtcaaaatgcggtccagatacccgaagataacgatagccaagtcaacgtcagaccaaaggaaagtaagtgcttcctgttatgactgtggtgagcaagatcattatgtaaggaactgtccatggaaggtgttcgccaggtcacctgaaaaatacaagaagcagtgcccaggaagtaaccaagctccaagtcagtctaccgaccagaaggatgaatttactcctgaagacgcagcaaggatacccaagcgtcagagaggaagaaataccttccgtggagcacgccagctaacccgacatctcataaagtacggtccgcccagacccgaagatgatatatcaggagaacggttctctactgatgacgacgatgatgatgatgatgatgatgatgatgatgatgatgaggatgaggcgacccttaacagtttcatggaaagaggattggagttcaaagcatgtactagatgtgggatagtcgaacacactgctagtttatgcctccccacatgccgctgtggtgaatacacccattactcagatgaatgccctttgaggaaggtcacatgtttcctgtgtgagggaacagatcatgtgcctaaggattgtcagcggaactcggtcctagctttgaccaagaaagaacaagggacaaccgtgcaacccattcgtcaaccaatggcagtcgacgacatcagtcacaatccttctgctcttcctccaattccagccccagtggaagccaaccatggaagaagcaacgtcgctagggatgttcataaatcactacttgttccagtttcagctgtcaatgtgcataaccagaagcttgcacctcaggaccaagcaagtcggttttgtctcaattgtcttaccagcactgcccacgacaccaatcgacacctgaatgtgcaacctccgcctcaacggattatcgtcaagggcaccgtcagaggccgcattgttccaccggccatcgtttcaagcctacagcaccagcgccagcagggtaagcaatgccaggagaacaacagctcgctacagctacaaagaggcagtacgctccttcgtcagcacccgcagcaagtgttgtcagcaccaggtcaacccactgctgtcaattctagcaatgcaccttgtattgctccaatccggaggcccatctgtaaatcaccgctcggtaatcccatgagcaagaagatcccatctgccatagctgtcaagaggattgccattccctccctgaagatcaatgcccagagcaatgtttctgatgcaacttctggtagtaggaactaa

SEQ ID NO: 42627 - DNA, 331 bp, Oryza sativa
  Clone ID: PAT_MRT4530_45860C.1
gaaaaagtacgaattaccccccgggaactatcgcggtcgtccgaattaccccccgaaccacaaaaccggacattcttcacccccaactatgcaaaccggacaaattacccccctcgacctaatccgtggtggttttggtctacgtggcggtctactctctctccctcttctccttcggacggcgacggccgagccagcaagcggaggacggcgatggccgaggcgaggcgaggctaggcgaggcggcggcggcggtgaagagcagcgggggcagaggagaggcgagtgccgcgggggcggcggagaggcgagcggcgggggcggaggcgag

SEQ ID NO: 42628 - DNA, 446 bp, Oryza sativa
  Clone ID: PAT_MRT4530_45861C.1
cccacatcattcgctgcatcactggccgggtgagaatacttaggcgtggattcgaactaggcatttgtgcatctcattgtacgagaggcataatgtaaggagccacctgcaaactccccagccaaagcgccaggactgctgtggtcaccgacagcaacaaagagatctgcctgcaggtgtgccggcagctgatcaccgacggcatcacggttgttctcacggccagggacgagacgagcggcgtaaaggccaccgagaggctcatagggatgggcctctccagtgacgtcttgcatcagctcaaggtcacggacagttccagcgttgctcggttggctgctctcttgaagactctttacgtacagctagacatactcgtgaataatgccacgggttgtcgccctgggagtcgctcacagcgtggatcacaacgaggaactgttcgt

SEQ ID NO: 42629 - DNA, 334 bp, Oryza sativa
  Clone ID: PAT_MRT4530_45862C.1
ttttgttttttacacactgcaactgaactcacatatataggcacttgagctcatattgaaccttaatccatgccccaggttttcctagcagctaacctaaacaccccaaaatcaatcattagaccgtaatagggcctaaccatgaggattggacggggaggacgccgctgcggcacccccagccgccgagagccttaacgatacgcactcgccatgactaactcccaaggcaggtttatgggaaagcctagcactcaagctgggactcgcacccaccgttataggccacggactggacatgcgcaacaccaaagctggaggacgccaaggccga

SEQ ID NO: 42630 - DNA, 1466 bp, Oryza sativa
  Clone ID: PAT_MRT4530_45863C.1
atggaggtgcagggagaggtggatggatcgggggtgcccctggcggtgctcctgaagcgagagctgtgcaaccagaaggtggagaggccggacatgctgttcggcgaggcgagcaagagcaagaaaggggaggacttcacgttcctcttgcccaagtgcagccgccgtccaggtcaagcccaggctgacggggaggatgcaggaggcgccggcgacgacgacaccatctcggtgtttgcgatcttcgatggccacaatggatctgcggctgccatatacaccagggagaacctcttgaacaatgtgttggctgctattcccccaaatcttacaagtgaggagtggacaactgcattaccgagggcactagttgcaggttttgttaagacagataaagagttccaaacaaaagcggcgcgctcagggaccactgtgacttttgttataatagatggatgggttgtcactgtagcatcagttggcgattcccgctgtatcctagaatctgctgaaggttcagtatattttttgtcagctgatcatcgcctagataccaatgaggaggaggtagagcgtgtaacagcaagtggaggtgatgttgggagaataaatattgctggaggggctgggattggtccacttagatgctggccaggcggattgtgtttatcaaggtcaattggtgatatcgacgttggagagtttatagttcctgtcccacatgtgaagcaagtaaagttgtctaatgctggaggacggcttgtcattgctagcgatggtgtctgggatgcactgcgctttcaggaagctctgaactataccagaggactgccagctgaagctgctgctagtcgaattgttaaagaatctgtgagttcaaagggactacgagatgatactacttgcatcgtagttgacatattacctccagaaaagttgagccctccattaaagaagcatgggaaaggaggcatcaaagctttgttccgtcggaggccatctgatgaattgactgaagatcagatggacagaggatgtctagaacctgatgtcgtggaggaaatatatgaggagggctctgctatgcttgctcaaagattaaaaataaattatccgacaggaaatatgttcaaactgcatgattgtgctgtctgccaattggtgatgaaacctggtgagggcatctctgttcatggtagcattccgaggaattcaagggttgatccttggggtggcccttttctatgttcatcctgccaattgaaaaaggaggctatggaagggaagcaacatttgacaagtatgaatgccttcatctaaagattttttttttctctttgcattaggacaataattgttgaatgctttttcatttttaatttccagattctcaaccgacagtccaacctgttctcaagtagccctccccggtgttcgatacttcagtgaataaaaaaaaaaaaaaa

SEQ ID NO: 42631 - DNA, 259 bp, Oryza sativa
  Clone ID: PAT_MRT4530_45864C.1
aagcttgcaccatgccggaagtatttactatcgtttcttaagaaaagccgcttcagctaaataattataagaagtgatgataataagcctcgctatttttactttaagatgatttaattgttaatagttaatattgataataccatttatataaccatttatattaccatttatattaccaccaagttttttatcacttccgttaaatactatattataaggaataaaaatcctattgcaataccaaaaaaaaaagctt

SEQ ID NO: 42632 - DNA, 397 bp, Oryza sativa
  Clone ID: PAT_MRT4530_45865C.1
ctacgagagctcgtgctcctttgccgtcttctcaatccttcccttcgctaggagacgtcgttgttgccatttcctagcagccgcagcgctgctggacgagggtgcacttgccggcagggtcgcagttgaaggtggagctgcagctagtgagctcgcagttgctcgggttcgtcttcgagcagcaccggcactgcaggcacaacggcgccgccaacgtccctactacgccgccgccaccgatggccaccaccaccggcttcgccggcttcgtcggcaccatgtcgtccgccacctgggcatccagcgcccatgctcgggactgcacggcgacgacgatgaggaggacggcgaccaaactcgagagaggggaggtcatcctcctgcggcagttcgccat

SEQ ID NO: 42633 - DNA, 348 bp, Oryza sativa
  Clone ID: PAT_MRT4530_45866C.1
atggcagctgacatagcagttgacatgcccgttcatctgccgcatggcaacgcgcccgacggcaacatccctaaggaggccgcagccactggcggcggacagccaggtgcggaggcgatgcacatggggcacaacggcatggccttccaggactggcatgacggcaaacaactggaggcaaggtcgatccaacgccgccagcaagctctgcacagtgaacctgcggatcttggagttgcacgtgttgccgagattcctaagcaggtcggctcgcatgcagaagacgatgtccctgagcgaaccctcctggcaacggtgcctgagttcccgaagcttcttgcgcagtag

SEQ ID NO: 42634 - DNA, 380 bp, Oryza sativa
  Clone ID: PAT_MRT4530_45867C.1
aaaacaggccaccggcctgcttataaagccccaagggcccaaaaaccccaaacgcaggggggccctggaaccggcaaatttggggcaaggtcccgccccccgcggggtttattggggggtaaaagggggccccaagaagggcaagggcccggcccccaaaccgggggaaaggacccccccccagaagagcccctggggggggccaaaacccccccccccggggggggggatctgaagaatctccccgggtttacccataaccggggtcccccccccaggggaacccctcccaccctttttcctccccaggaagctggccccaggggccccatttctcccccccttaaagccccggggagccggcccccttttttccgaag

SEQ ID NO: 42635 - DNA, 253 bp, Oryza sativa
  Clone ID: PAT_MRT4530_45868C.1
ctaggggcacgggatgaggaaaggagacacagatgggaaaggtggaggaggctccaaaaggtggtgggaggagccgactttggtccgccacctctgcatctgagaggtttctcgcggcctctgcgcaacttccatggccgccgcctctattgtaccaaaggagaaaggaggtttgatagttcgtcggcgggaccacaaccctgcatcggcccacctctgggaggtcgcccgcgctcgggaggtcccgcataag

SEQ ID NO: 42636 - DNA, 491 bp, Oryza sativa
  Clone ID: PAT_MRT4530_45869C.1
gcacgaggctccatcattcccctctcctctcctctcttcggcggcgggtatcggcgatgaaagcgtgcggggcgtcctcctcctccatcgccgctcgtggtgccggcttactcctccctcaccgcttactgcgtcgcctccgtctccgccggcgccaggctcgggagtggtggatctgcggccgacagcgctcccgggcctagggcggctagatcgcgcggcggcagtccccgggcggctcgacgacggagctcgctgccacgccgtttgtgccggcgggctcctgcttcggggtttctggaggcgcgtgggggtccgtccgcaggtgtagtctgcatactggctcaagttctggcggaacatgatgcgcgtcactctcatctacgaggcgcacgccgcgcggatgctggaccgcgggaccccatcaacgccaacctctacgttaaggagctcatgcgcaagaagcttcgggaactcaggcaccgttgcca

SEQ ID NO: 42637 - DNA, 263 bp, Oryza sativa
  unsure (1)..(263): unsure at all n locations
  Clone ID: PAT_MRT4530_4586C.1
tcatttcatgtgaaaaaaaaaatagtaaaagggggcttttgaaacttgctgggcggtagctaagcagtcnaagccaatgaagtaagcgcccaacccttgtgcgcccggctgcccgtcctcaacacctttctctctctcaccccttgcccttggttcctttaactcaaccccaaggtgaaaagccccctccccccccctgggccaagagacactctatccggctaacaatctggggaggtctctgtcctctgcatcacctcggc

SEQ ID NO: 42638 - DNA, 1257 bp, Oryza sativa
  Clone ID: PAT_MRT4530_45870C.1
ctgcaggaattcggcacgagggagagaactagtctcgagttttttttttttttttttgattgcaatgtcacatgcatttcacattccacaagtcttaaaatgcaatatcattacatccatccaccaattcaatacatatccaaagtctcaaatttcatcttcctgctatagcgagagcaacagtagcacatatgcaatagcatcacagcagtagcagcagagcaatggccaaaagcacagcagcaacagcacaacgaccaaaagcacagcaacaacaaaataacatcccacaagcacaatagtcgcaagttcagtgtcaccttatgttcatacgtattgctgcttcagcccgttcatctgccgcatggcaacgcgcccgacggcaacatccctaaggaggccgcagccactggcggcggacagccaggtgcggaggcgatgcacatggggcacaacggcatggccttccaggactggcatgacggcaaacaactggaggcaaggtcgatccaacgccgccagcaagctatagtttggtcggttcaccgaatgatgtcttcctatctgcatgccttgctctcttgttcatactcctccttccttgactgatgtatccattcctcctgcggatcttggagttgcacgtgttgccgagattcctaagcaggtcggctcgcatgcagaagacgatgtccctgagcgaaccctcctggcaacggtgcctgagttcccgaagcttcttgcgcagtagaggttggcgttgatggggtcccgcggtccagcatccgcgcggcatgcgcctcgtaggtgagagtgacgcgcatcatgttccgccagaacttgagccagtatgcagactgcacccgcggacggacccccacgcgcctccagaaaccccgaagcaggagcccgccggcacaaacggcgcggcagcgagctctggcgagctgctgcgtgctaatcaggcccagcgccgtagccgcatgccgtcctcgagctgcccggggactgccgccgcgcgatctagccgccctaggcccgggagcgctgtcggcggcagatccactgctcccgagcctggcggagacggaggcggaggcggcgcagtaagcggtgaggggggagtaagccggcaccgcgagcggcgatggaggaggaggacgccgccgcacgctgtcatcgccgatacccaccgccggagaggagaggagaggagaggagaggggaatggatgggagaagtgtggccctcgtgcca

SEQ ID NO: 42639 - DNA, 493 bp, Oryza sativa
  unsure (1)..(493): unsure at all n locations
  Clone ID: PAT_MRT4530_45871C.1
gggnnggtttttttngnggggggccccnnaaaaaaccttnnttttttttnnttttttttcnaaanaaaaaangccnaaaggnttttnggggggaaaanggntttggnggccaaaaananggnnccccattccccnggnatttggggtttttttttncngaagcnnnanttngaanttntggggngcccnaatttnanaanggnggggtttttttttttnnggaanaaanttttaaannntttgnttttgnatcccntncnaaattttttnnngnnnggggnggnatnaaaaaanttggggggggntacccntcccctggnaaannannnnanttnaaannttgggnntnanntttttttaacccnnnnnanntttgggnnccnnaaaannggngnnttngnggggaaaaaaaaaaaaaaaaaaaaaaaaaaaaaaaaaaaaaaaaaaaaaaaaaaaaaaaaaaaaaaaaaaaaaaaaaaaaaaaaaaaaaaaa

SEQ ID NO: 42640 - DNA, 310 bp, Oryza sativa
  Clone ID: PAT_MRT4530_45872C.1
cctcagcgatggatcagtggtgcgcacggggaggcctactcgaaagcctttgccggaactcgagggggaggaagaggaggaggaggagcttctaaccaggagaagtgcgccggtgaggatcgggtcctgatcgccgccgccgctgccgccgccgcgggctctcgtctcgcctgtcgctcgccggcgattggcgaggtcaagcggagcgctggccgcgcggtccctctcctccggcatttgcagagcagattcagcaaaagtttcagaaaccagctggtggacggccggagaaacgcatgccgacggcagc

SEQ ID NO: 42641 - DNA, 565 bp, Oryza sativa
  unsure (1)..(565): unsure at all n locations
  Clone ID: PAT_MRT4530_45873C.1
ttttatagctagctaactgttactgtacctcctcccatatatcatcttcatatttttgcagatcgataagcgagaaaaatgggagcacgctgcctcgcattgcttctcctctatggcacgttgctgctgctgttgctgctgccacagctgccgctcgccggcgcggcgacgagatactacaccttcaatgtgaagcttcagaatgtgacacggctgtgcaacacccgggcaatcccgacggtgaacggcaagttccccgggccgaaaatagtcaccagggagggagaccgcgtcgtcgtcaaggtggtcaacaatatcaaggacaacattaccatccactggcacggggtgaggcagatgcggacggggtggtcggacggcccggcgtacgtgacgcagtgcccgatccagacggggcagagctacgtgtacaacttcaccatcaacgggcagaggggcaccctgttctggcacgcgcacgtctcctggctgcgatccacgctgtacggccccatcatcatcctccccaangccggcctccgttgcccttcancgagccgcacaa

SEQ ID NO: 42642 - DNA, 164 bp, Oryza sativa
  Clone ID: PAT_MRT4530_45874C.1
acaaggagcgggaggggaacacgagtgatctttacccagggaagaggatgagcggccgaaatccggaggagaaagaaaataaggtggttcgtgtgcgggatagatggaggagcgtcgaggtgcacgcagcaggtccacttgtgctcgccatccccaggccctag

SEQ ID NO: 42643 - DNA, 2490 bp, Oryza sativa
  Clone ID: PAT_MRT4530_45875C.1
atggatctgcagagcctggccgtggtgctgcgcgcggcgctcagccacgtccccgaggagcgcaaggccgccgaggccagcctaacccagttcttagctcttgttgcagatgttattgttagcattattgctatccatgttaacgcctcagagttgtttcagtacacaccacaacacttggttagattgctacagattattgtggatggaaattgtgatatggctgttagacagttcgcaagcattcatttcaagaattttgttgcgaagaattggtcacctactgatcctgaagaaaaacatataattccagaaagtgacaagtccatggtccgtgagaatatattgggttttgttactcaattacctccattgctaagagcccagcttggagaaagtatcaagaccttgatccttgcagattatcctgagcagtggcctagtcttcttccttgggtaacacataatctagaatcacaggatcaaatatttggagcactatatgtgctaaggattcttgcccggaaatatgagttcaagtcagaggacgagaggatacctttgtatcaaattgttgaggaatgctttcctcgtttgttgaatatattaagaaatcttgttccgatttccaaccctccaattgaagtagctgacttgatcaagctgatatgcaaaattttctggtcatccatttatctagaaattccaaagcaactttttgatccaaatgtcttcaatacttggatgattttgttcttaaacttactggagcgaccagttccagtggaaggacaaccattggatcctgatgcgaggaaatcttggggatggtggaaagtcaagaaatggattatccatatattgaaccgtttatacactcggtttgctgatatgaagcttcagagaccagaaagcaaagcctttgctcaaatgttccaaaagaactatgctggaaaaattttggggtgccatttgcagttgctcaatgcaatacgtactggtggctatttgcctgatagggttatcaatcttattcttcaatatcttaccaacagtgtcacgaagaacagcatgtatcagcttatgcaaccacaaattgacataattctatttgagataatcttcccattaatgtgcttcaatgatagtgaccagatgttgtgggatgaagatcctcatgaatatgttcggaaaggctatgatattattgaagatttgtatagtcctcgaacagctgctatggactttgtgagtgaattggtaagaaaacgagggaaaagcaatctgcaaaagtttatccattttattgtggaaatatttatgaggtataatgaggcatccattgaagtgaagccataccgccaaaaggatggtgcgcttcttgcaattgggacattgtgtgataggctaaaacaaactgaaccatataaggctgagctggagcgaatgttggttcaacatgtctttccggagttcagtagtcatgttggacacttacgtgcaaaggcagcatgggttgctgggcagtatgctcatatcaatttctcagatcaaaacaattttcgcaaagctatgcattgtgtaatctctggtttgcgtgatccagaacttcctgttagggtggattcagtctttgcactccgttcttttgttgaagcatgcaaagatctagatgagatccgaccaattcttcctcaactacttgatgaattttttaagcttatgagtgaagttgagaatgaagatctcgttttcacccttgagacaattgttgacaaatttggtgaagagatggcaccatatgcacttggtttgtgccagagtttggctgctgctttctggagatgcatggctagttcagaagctgacgaagaagttgaggacactggtgctttggctgctgttggttgcttacgtgcgataagcacaatccttgagtccattagtagccttcctcatttgtttccccaaatagagccgactttgttgcctattttacgaagaatgttgacttcagatggtcaagatgtgtatgaagaagttctggagatagtctcctatatgacattttactcaccaaccatttcactggaaatgtggggcttgtggcctttgatgatggaggcccttaatgattgggccattgatttctttgagaatattctggtaccattagacaactacatttcccgtggcactgatcaatttattgcatgcaaagatcctgattatcagcaaagcctatggagagcactgtcatctattatgacagaccaaaacatggaagattctgacattatacctgctcccaagctgattgaagtcgtttttcaaaattgcaaaggtcaagtcgatcattggattgagccgtatctcaggctaacaattgattggctgcgtcgtgcagtgaagccgtatctgaaaagcttacttgtacaagtgggatgcaacttctcaaagctaatatatctaatgccaggaaaaccttga

SEQ ID NO: 42644 - DNA, 192 bp, Oryza sativa
  Clone ID: PAT_MRT4530_45876C.1
ccctgtggcagccgtgtcagcggttctagtggcccgttggcgtggcagcctgttctgactccccggtgtggttgttatgtgtttgccactagtgataagtagtatcgtataatattatgcgcgtatgtcgtgtgagttacagtggtgtgttgaaattgtgggtcaaaaaaaaaaaaaaaaaaaaaaaaaaaa

SEQ ID NO: 42645 - DNA, 275 bp, Oryza sativa
  Clone ID: PAT_MRT4530_45877C.1
attatagccatagcttcgtattcattccaggtatcaaagctcaaagtgaacggcgaagatggcacgttatgactttacaaaggaagacttagactacatataccattgcatagtgggctggccatgctatgataggaagagccccttgaacatatgtgagttggttgaacccaaggatcaccgatgatgtggtaagctgcctagcataagtggacgccggcccagcacaagtgataacacccatctggtcgtattcatgcaagaatgtggccagc

SEQ ID NO: 42646 - DNA, 600 bp, Oryza sativa
  Clone ID: PAT_MRT4530_45878C.1
ccaaaacggagtcaagcaatcatcatacaattagtagcaagcaacgtaaattcaacaccaaacttcctccaaaaattaaaatccatttcgtcttaaagatgatattgaatttggccatgtttttggttgcccaagtaatatgaataggctattttgactcaggttcaccacgctgtagactgttgcttgagcagcaaaaggaaaatgctttgggccctctttagatcccatcccaaaactttacaccttggatttcagtcaggagctttgattattgtatgagaggaagaatatgtgccaggctgaaggaatttcctacatagaaattgtaccaccagattggatttaagttattggatctccttaagcctgcccagggtatacccgtccgaatggtcgaatttcgggcgaatatcgtaacaaacggtgatagatccaaatccgtagtagagcgactcttattaggaagataagagctgcatcaaaagaaccattctcccttttctttctttggttctttctttctttcattcttgagggactctgaatctgagagatactgtgatggcacggcgtcggtcagccatcacggacgcgtgg

SEQ ID NO: 42647 - DNA, 1773 bp, Oryza sativa
  Clone ID: PAT_MRT4530_45879C.1
atgtcgtcacggcgaagcatgggagccctggccgctgtctgcgtctgcatgttcgtcttcgtctcctccgcacgggcagaagatccgtatagatttttcgattgggaggttactactgggaacatcaatcctctcggcgtccagcagcagggtattctgatcaatgggcaatttccggggccggagattgactgccagacgaatgataacttgatcgtcaacgttgatgtgatggaaaaagttggaagtttggatccaaaatttgaatctacacacagccttgttggcatacgtttccactttgtttccgtttttgttatgaacgggcttcagcacaggaagaactcgtggcaggacggcgtgtccggcacgaactgcccgatcccgccgggccagaacttcacctaccaaatgcaggccaaggaccagatcggcagcttcttctacttcccgtcgctcgccttccacaaggccgccggcggctttggcgccatccgcatccgcagccgcccgctgatccccgtccccttcgatccgccggccggcgagtacaccatgctgatcggcgactggtacaagaccagccacaaggcatggcattgcagttacactaatttcatcaacagtagatggatccttgctctgcaagccatgctggacagtggaaagcagctgccttcccctgatggcatcctgattaacggcaaaggtccaaatggcgcaagcttcaccgttgagcaagggaagacgtacagattgcgcgtctccaacgtcggcctgcagagcacgctcaatttgaggatccaagaccacaacatgacgctggtcgaggtggagggcacgcacacggtgcagaacacctacagctccctctacgtccacgccggccagtcgctgtccgtgctgttcacggccaaccgcccgcccggcgtctaccaaatcaccgtctccacccgcttcgccaagcgtgcactcaactcgtccgccgtcctgcgctacgccggctcgagcgccaccatctcctcaccgccgccaccggctggcctcgccgacgacatcgacttctcgctcgaccaggctcgctccatcaggacgaacctgacggcgagcgggccacggccgaacccgcagggctcgtaccactacggctcgatcaacgtgacacgcacaatccggctcgccaactcggcggggcgcgtcgccggcaagcagcggtacgccgtgaacggcgtgtcgttcgtggaggccgacacgccgctcaagctggccgactactacaggatcagcgacgtgttccggctcggcggcatcccggacgcgccgcccgcgggcgccgcggcggctccgcggagcgaggcggccgtgatggactccgactaccggtcattcctcgagatcgtgttcgagaacagcgaggacagcgtccagatctggcacctcgacggctacagcttgttcgtagttgggatggacaggggagtgtggagcgagcagagcaggaagagctacaacctcgtcgacgcagtctcccggtgcacggttcaggtgtacccgagggcgtggacggcggtgttggtggcgctggacaatgtggggatgtggaacctcaggtcggaggactgggcgcgcaggtatcagggccagcagttctacctccgcgtgtacacgccgtcgcactcgttccgcgacgagctccccatcccgagcaacgcgctccgctgcggccgcgccaccaacgcgagcggcagaagccgaaccctgtcgcggtactag

SEQ ID NO: 42648 - DNA, 1629 bp, Oryza sativa
  Clone ID: PAT_MRT4530_4587C.1
atgccgccgccgcgccttggctcggccgagccggtctcatgccgtgcccgtgccccagccgcgccgcctcgtgaccgtccgatcggctttgtgccgatccgagccgtcggttcccgtggaccggcggtggacagcctcggtggtcccggtccacggtggaccggcgcccatgtgccgctgactggtggggcccgcttgccggcgccgcccctcccccttgatgacgtcagcgaggagttcccaatatcggcaccgaagacccctgtcaaaatgcggtccagatccccgaagataacgacagccaagtcaatgtcagaccaaaggaaagtaagtgctacctgttatgattgtggtgagcaaggtcattatataaggaactgtccatggaaggtgttcgccaggtcacctgaaaaggacgagaagcagtgcccaggaagtaaccaagctccaagtcagtctactaacaagaaagatggtactctgcagcacaactttggagcgaacaggaaggtgatatggaagatggataatggcaggaccatgatcatcaccagttcagaatttactcctgaagacgcagcaaggatacccaagcgtcagagaggaagaaataccttccgtggagcacgccagctaacccgacatctcataaagtacggtccgcccagacccgaagatgatgaatcaggagagcggtttgctgctgatgacgatgatgatgatactgatgacgatgatgatacgacccttaacagtttcatggaaagaggattggagttcaaagcatgtgctagatgtgggatagtcggacacactgctagtttatgcctccccacctgccgctgtgatcatgtgcctaaggactgtcagttgaacgcggtcatagctaagaccaagaaagaacaagggacaaccgtgcaacccattcgtcaaccaatgacaatcgacaacagcggtcacaatccttctgctcttcctccaactccagctccagtggaagccaaccatggaagaagcaacgtcaccaaggatgttcataagtctctgcttgttcccgtttcagctgccaaagtgcataatcagaagcctgcacctcgggaccaagcaagtcgattctgccgtaactgtcgtaagccaggacatcgtttcagtgattgtcctcttccaagagcagcaaaggcagttcgtcgtgattcacaagttaccagcattgcccatgacaccaatcgacacctgaatgtgcaacctccgcctcaacggattatcgtcaagggcaccgtcaaaggtcgcattgttccaccggcaaccgtttcaagcctacagcaccaacgccagcagggtaagcaatgccaggagaacaacagctcgctacagctacaaagaggtggtacgctccttcgtcagcacccgcggcaagtgttgtcagcaccaggtcgtccaactgttgtcagttctagcaatgcacctggtattgctccaatctggaggcccatcgacaaatcaccgctcggtaaccccacgggcaagaagatcctacccgttacagctgacaagacagttgcccctccaccatcgaagatcaacaagcagagcaacgttcccggtgagacttctggtagtaggaactaa

SEQ ID NO: 42649 - DNA, 270 bp, Oryza sativa
  unsure (1)..(270): unsure at all n locations
  Clone ID: PAT_MRT4530_45880C.1
nccccaactttttttttttttttttttttttttttttttttttttttggaacatcttcttcaaattttgctttttcatngttnctgcccngggntntcctttcnntctncntgcttgggngnnttcangntagngggaaaatgtacattgggtgggnacgtttncacgcacgnannngtgctctntagnagtggcattattngntnattaccccnntatacganancttnncanttanggcttanagntcccagantntngcagataaaa

SEQ ID NO: 42650 - DNA, 1719 bp, Oryza sativa
  Clone ID: PAT_MRT4530_45881C.1
atggacctcgacaagtccacttccaccagcgcatccctgaagaagttgcaggaggaaggcgctctccccggttacgggaccatggagaggaaaccaggaggtactgaacctgaacccgtcttgggccgcatggttgcggttgaggactatattctctgtggttttcttcctccgccttctgagtttttccttctcgtcttgaatttctacggtctttctgtgctccatctgaaccccaattccatagccttcctcagcattttttcacacatctgtgaggcctacattggggtagagccgtttcttgacctctttcgtttctactacgagttgcgctggatggaacctaaaaaggtatccgggtgtgttggtttcggacttcgggatggcctgaagtcgcgatacatccccttccagtgcccctcttctcgtagtaaatggcgggcgaggtggttctatcttcaaatagagaattcggatgcagtcttcgttgtccctgaggaacaaccagataagattccgtcttggaccgccaaacccgccttgaccccatcccttcagtcttttattgatatcatcgatgacctcggagtacgagggttgtcggggtatgaagtcgctgccgacttcattggtagacggatccagccgctccaggctcgagcccatcccgcctttgactactctgggccggaggacgagacccgagtatctcctcgaggtttgaacagcgagaccgtggagcaccgtgtcggccaggtgatggtcagcggccccacgacggcgagcaacgtccccgcccctctttgtgagaaaggggcggctgagcgcgaagctgcaatcaacgctctccctctgactaacgtcattgggccgctcgtggaccaccaggctgcggctttgttgaaagagggcgtcgcccaggaggcgtccgacgtggccattgccgccgctgctgccacgaccagttgcggcaatgttccgaggaaagggaggaagttttcctccgtgctcggcaaccgccagaaaacgcccaccccatcggcctcggatgtgtctcccccgcctccgcgacagcagaggctggtgatacttggcgagaaggcagcgcgggcgaaggcggtgcaagatgggtccggagggaactccagcgcgtctcctgcggtggcctcgacagatgtcgtggtcgtgcccaggagccgtgaggtaacgcccagcagtcctgccagtgatcttgtgcccgctcgaggtccgcctgctgacgtcctcacctgggaggagctccatgtcgagatggggcgcatcctcgaggccggcgctcgcagcataggtcgcgagattgcggaggcgagggcggtggcggcgtcgtcggcgaaagaacgcgccgacaagctggcacgtgacttggcagaggggctcgagaaccgcatgtcggaactcgagaacaacctgtcggagatccgtgtttcgctgcgggtcacctacaccggcctacaccagctcgccggggagtgtggtgttacgaccaccatcccggcgaaccccgacgagttctcgctgacgacttcgctcgcggaactggcgacggcgatggaggcgatctctaggcatgcggccaggatcggggaggagaagtccaacaggatctacaccgggatgtgccacgtcctcgcgtgcgtatggttggcacaccctgaactcgatctccagaggatctaa

SEQ ID NO: 42651 - DNA, 1329 bp, Oryza sativa
  Clone ID: PAT_MRT4530_45882C.1
atgggggcagatcgacattggcaccaggctgatagaaaggaagggaaaggatgcgcagctcccttcctctgctccaaggacagccgcagccgacgccgctctcttcctttctccgagtgcaacggccgcaactgttaccgacgcttcctccttcagcgccacgacgccaccgctctctccctcggcgcgcggtcgcaaccgccgcagctgctccctccgtgcgcggccgccgcagccgttgccgccagcaacgaaaacccaagtggtgtcgggagttgggattggataaggaggctcggcttcgtaggctgtggtggttgtcttggctatgagattcgatgccctaggtcctcccagggggtcccttttatatcgcagggagttttgggaatccattttagagtccgcctattacgaaaactttctaacctccaaacgctcttcgtcttcttcgcttccacacaaaccctagcttactcgcctcggtctcttctccggcgatccccgtcggcagtggacctcgacaagtccacttccaccagcgcgtccctgaagaagttgcaggaggaaggcgctctccccggtcgcgggaccatggagagggaactaggaggtactgaacctgaacccgtcctaggccgcatggttgcggttgaggactatattctctacggtgtgaacagcacaaccgtggagcgccgtgtcggccaggtgattgtcagcagccccacgacggcgagcaacgtccccgtccctctttgtgagaaaggggtggctgagcgcaaagctacaatcaacgctctccctttgcctgacgtcattgggccgcttgtggaccaccaggcggcggcttcgttgaaggagggcgtcgcccaggaggcgtccaacgtggccattgccgctgctgctaccacgaccagtggcggcaatgttccgaggaaagggaggaagttttcctccgtgctcggcaaccgccggaaaacgcccaccccatcggcctcggatgcgtctcccccgcctccgcgaccgcagaggctggtgacacttggcgagaaggcggcgcgggtgaaggcggcgcaagatgggtccggagggaactccagcgcgtctcctgcggtggcctcgacagatgtcgtggttgtgcccaggtgttgtgaggtgacgcccagcggccctgccagcggtcttgtgcccgcgcgaggcccgcctgccgatgtcctcacctgggaggagctccaagtcgagatggggcgcatcatcgaggccggcgctcgcggtcgcgagattgcggaggcgagggcagcggcggcgtcatcggcgaacgaatga

SEQ ID NO: 42652 - DNA, 1177 bp, Oryza sativa
  Clone ID: PAT_MRT4530_45883C.1
atggaccttgataagtccacttccaccagcgcgtccctgaagaagttgcaggaggaaggcgctctccctggtcgcgggaccatggagagggaaccaggaggtttgaacggcgagaccgtggagcgccgcgtcggtcaagtcgtgatcagcggcccttcaacggcgagcaacgtccctgtccctctttgcaagaagggggcagccgaacgcgaagccgtaatcaacgctctccctctgactgatatcatcgggccgctcgtggaccatcaggcggcggcgtcgctgaaggaggacattgccaaggaggcatccgatgttgctgccgctgctgtcacaacgagtggcagcaacgttccgagaagagggaggatgttctcctccgtgctcagaaatcgtcgaaagatgcccaccccctcggcctcggatgcgtctccgccacctccgcgacggcagcggcttgtgacgcttgcctttcatagggcggcgcgggtgaaagcagcgcaagatggatctggagggaactctagcgcgtctccggccgtggcctcgacagatgtcgtggtcgtgcccaggagccgtgaggcgacgcccagcggccctgtcggcgatcttgcgcctgctcgaggccctcctgctgacgtcctcacctgggaggagctccaagtcgagatggggcgcctcctccaggccggcgctcgcggcatagttcgcgagatagcggaggcgagggcggcggcagcgtcgtcggtgaacaaacgcgccgacaagctggcgcatgacttgacggaggttcgtgaggacctccagaaaatgaaggagctggtggccggcaacgagcggcaatggcaggggctcaagaaccgcatgtcggaactcgagaacaacctgtcggaaatccgcggttcgctgtgggtcacctacaccggcctacaccagctcgtcggggagtgtggtgttaagaccaccatcccggcgaaccctgacgagttctcgctgacggcttcgctcgcggagctggcgacggcgatggaggcgatcccctccaagcatgcggccaggatcttacatggtctttcgtctctaaaggatccgacaaggccttatcagctctgggcgtccccagccaaagttcccttaggttcctcgaaggccttgtcaagacggcgtaaagggacat

SEQ ID NO: 42653 - DNA, 1823 bp, Oryza sativa
  Clone ID: PAT_MRT4530_45884C.1
cgggctgcaggactcggcacggccgcacagagagagagagttttttttttttttttttttaaaaaagatagatcggtaaccttttttaatacatttatgaacaaagatagatataaatgctcattttctcctgcccacttgcccaggttaaacaagagcgtttttactcgtccttcagagttatacgggatcttatacctcccaattcagcaagtatggcatcttatacctcccaatacctcctcaagtactcctcccaatacttcctcaagtactcctaaaaaggaactctgggaaatacttctacaccattacaacaaatgcaaggcccacagctcgacgtacaggtaaatgcagttcagtacaggtgaccctggttgactatcagcaatggcagcaaatggccataacagtatttcagaaaaagaatgatcatctccaaatcaatcttgagagaatacctgaacatggggttgcacactcaatttccttctattatgaaggtgtgagtccacaagtttccctgtatggaggatcagtttagtttccatgcacacgaagcctcgcaaatgtcaggtagccagtgtgtcctctagcagtgctacaaggcctaaccataacactagaattctgcttaacatctaaagtttctgcagcagcaagaagttttctttttttctgagcaagaggcactgcattagactcttcattggttgtggcacccttcaaaccaccttctcgtacttcataggtgcgaagaagaatttcaaaggttctaatatctgtgaaacatgatctcatagcttcgcaagcccgctgcacttgctcaatgcagggtgagaaggagcataaaactccatcttgctttagcatagtccccgcagaaggtattgcaagccaaggctggggtaagtccaagaacacagcatcggcagcaccagtgtgttcctcagggaacccttgtccttgtatgtcccgaactgcgactgtgattatgctggtcaggtcattcctctcaaaatcttcccttgcggaggcggccctctggtcgtggaaatcgaaggtgcagacgcggccgtgcggggcgacggcgcgggcgagcgaggtggtgagggagccgctcccggtgccggactcgagtacgaggcacccggggacgagctcgaggtaggagacgacgaggctgatgtcggcgaggtagaggatctgcgtccggtggctgagcacgagcgtccacagctcaggggtgggcgcaaggaggtggacgaacccgccgcccttccccttgcccccgcgagcccctccgccgccggcggaggcggcgctgtggaccttgcagccgaaggggcggccgatccagtcgtcgtggcggaagacgccgaatcggttctggagcacggcccccgggcgcacggcgacggcgcgcatggcgtcgtggcgctcgtacaccacgacggtgtccccctccgcgatgcggcgctgggaggtgggcttggatgacggatccagcggcaccatcatcttctccggcggcggcggcggcggcgtggtggtggggtttggggggtttatcgctgtagtggtgttagatttgtgtgtgcttttaccttataatcctcttttccgagatcgggggtacgaggaaggggtcgcctggagtcgccgcccgcgccgccaggagacagcgcccgcgccgccgacacccaccgcctgcgccgccgacacctgccgcccggccccggcgccgccacccgctccgccgaaccacccccggcccggcaccgcctaccagtccgccctccacaccgcctgcggacgcgtgg

SEQ ID NO: 42654 - DNA, 200 bp, Oryza sativa
  Clone ID: PAT_MRT4530_45885C.1
gagcagttgagcaacgcgatcaaagggcggggtactatccagatgctaataatctaaataactagtgcacgataacacagaccatatccagtcgatacaccggcatatgctaagtgacggcaaggagctgatgccgccctctacgactagatccacggcaaattctagagggccgggaaccatgggactcttgacctagg

SEQ ID NO: 42655 - DNA, 570 bp, Oryza sativa
  Clone ID: PAT_MRT4530_45886C.1
ctggcttgacggagcacatcctgctagaccggtacctgcaggcctcatttccggtactacatgcgtgaagtccgtactgttgtctattcacatttcctcgagctctacaagagagagacgatggaagcaatggcttctgcttttggtgtgaccgccgattgatagacctggaattgtaccgctgggtgggtgctggaaagctccactgcaagatcgataaggttgctagcgtcctgtagacgaaccgggctgatgccataaatgctttctaccacgcaaccatcaatcaaggggacttcctgctgaaccgcatccagaatctatcactattcatctgacctgtaggtgatagtgcaggagctggcgcttgccaactctctgctagagctcccccgcacgatcaactgatttgctgtgggcccatgggactacgaacagtacttgacttcacattccatgcttggttcgaggaatgataccttaacataatcagcgttaaatctgagaatttgagcttatgttacctactatatggatcgatgaaagctcaaacccgctggtactagactc

SEQ ID NO: 42656 - DNA, 1858 bp, Oryza sativa
  Clone ID: PAT_MRT4530_45887C.1
gcaagccaagccggtgtcaggctcagaccccgcccaggaggagcagcagctgacacagctttcttcttccttcctgcttcctcctccagtctccagagcagtggtgtcgtggtgggagcgcacccgcacccgcacccgcatcacaaggcggcaacgcaagcgaccaacaaattaaggagaatgcagcagcagaccacgggtggggtcgccaccaggaggcggctgtcggtgccgaggggtgccggtgcggcggcggcggcggcatcggcggcgtcggtgtgggagacgaggatgaagatggacgaggtgaagggaggggtcaaggtgttcagcgccggcggggacgacgccgacgaggaagggctcagggtctaccgccgcctcaggcgcaaccagagcgacggcggcggtggcgcgtcggggtcgacgaatgcggcggccgcggctaagaagaggcggaactggaaggcgtccgagcccgtcaccgccatcggggacctgcgcaagtcgcgctccgacgtcgccgttgccgccgcggcgccggcggtcgggatcgtcaccaccgccaagcgctccgtcaccagggtcaccacgccggagaagaaagtggccgcctccgccgctgccgccgaggtcaaggaggtggttgtggtggaagtgccggaaaccaacaatttggatgaggaaacagaggaggaggaggacgaggaggaattggaagaagagctcgaagcagaggatgaggaggaggaggaggagaaggaggtgctcgaccaagatcacatggccattgacgacgacgaagctgcaaaatcaacagctccgcatcaaggcaagtatcaactcctccagtgttgccatcaccaggatttcttgatgaatttggtattgattctttttttcccccacaatttctcagtggatgaccaagatcttgagccaccgacaaaaagaggggttaagattgtcccaacttcagtggaggatgagagagcggcaaatccggagccagtcaagcctccagaattttccggtgatccagtaaagaagcttgccgcaacaattgatctccgggcggtgaacccagagccagtgaccattccaccagtggagaagaaggctatgccagtgataattcaccggatgacgaacgcagagccagctaaaccttctccagtggatttggtcatgtggagagatgtctccaagtctacacttgtctttggattagggacttttttactgatctcctcctcctatgccaaagacctaaactataacacaatcacagcagcttcatatcttggcctagtctaccttggtctaaggttccttagcaagtccatacttaacaggggagagaatgtggactgtgatgatgctgagaggagtggtgaaaggtacctggtgggggaggaggaggccatctggctgctcaggcttgttctgccttacatcaatgaggtgctcctgaatctaaggtccctcttctctggtgagcctgcaacaaccatgaagctggcactcctgctgtttgcaatggcccggtgtggcaactttgtcaccctctggacactggcaaaactggcctcatctctttcttcgtttcaacaacctcatggtgctttaaatcacagccaaactaatgttcatatgaacaattttgaggaaataggaccacaggcatcaagaagtgctgttgcttgtacagataaagtgttctttggggtcttcatcattccgaaggtgtgctcatcttactccacccagcttgcaagatatgagttgaggttgttggatctggtaacattggtcactgcttttactggtcccccgaggcacttgggcatgtgcacgg

SEQ ID NO: 42657 - DNA, 569 bp, Oryza sativa
  Clone ID: PAT_MRT4530_45888C.1
gggagggaaacaaaaaaaaaaaaaacccccaagggaatttatgttcacaaaaaaaaaaccaaatatcatgcccgggggaagaaggggacagaaaacaaaaacaaaaaaaaaaccaacaaaacaaacgctgaaagggaaaggtttccccgaaaaccccaaaaaaaggcaaaaaaaaaaggccgggggaacaaaagttcaaaaaaaaaaaaccccgggggaaaaaaaaaaaaactaaaaaaaaaaaaaaaactaggggggaaaaaaaaacttttaaggggggcccaaaacccaaaaaaaaccttccaccatgggggattctgccccaaaaacggcaacccaaaaaagggggggagccccaagggatcccaaaagggccaaataaaaaaaaggccggggcttgggtccccaaaggccggggtaaccgccaagagggggcctcttcggtttttaaagggaaaaggcttccattaaaagccgggaaaaaaaaaaaacagggaaagcccgcaaagcaaaagccagaaaccaaaccaactcctttggggaaagggaatgggaaaccccaggggggg

SEQ ID NO: 42658 - DNA, 1149 bp, Oryza sativa
  Clone ID: PAT_MRT4530_45889C.1
tcactggaagatgctactgacagagcagtcgtcgtgaacgcgccagatggtctcgccgaggagattggcgacggagaggacggtgagctgggggaaggtccggtggtgaagcacggggacggtgttggtgacgatcacctcctggaagaggccgctggagagcctgtcgacggcgggcgggctgagcacggcgtgggtgctgcaggcgtagacggccctggcgccctccctgtgcagcagctccgctccctgggacaccgtccccgcagtgtcgatcatgtcgtccaccatcaccgccaccttccccctgacgtcgccgatgaggtgcaccacctccgactggttgtgcccctgccgccgcttgtccacgatggccagcggcgcgtccgacagcttcttggcgaaggtgcgggcccgggcgacgccacccacgtccggggacaccaccaccacctcgtcggggcagatggtcttgctggccaggtagtccaggatcaccggctgcccgtacacatggtccacggggatgtcgaagtagccgatggactgccccgagtggaggtcgcaggccagcacgcggtgggcgccggcctccgtgatgaggttggccaccagcttggcggcgatcgactcccggccgccgcgcatcttgcggtcggcgcgggcgtacccgaagtagggcacgacggcggtgatggtcttggcggaggcgcggcggcatgcgtcgatcatgatgaggagctccatcaggttctcgtttgccggcgggcaggtgggctgcaccaggaacacgtcgcacccacgcacgctctcctgcagctgcacgtacagctccccgtccgcgaaccgcttgatcttcaccctccccagctccatccccaggtagcacgccacctcctgcgccagcctcgggttcgccgtgccggagaagatgcgcagccgaccaccgctagagctcgcctgcgcctgcgatagcgctggcaccgggaccacgtccgagtactgcctgccgccgtaggccccagccccagccccagccccaactggaagcaacaatcccctctttgacctgctgctgccactgctactgctggtggtgccatggccggcaagcgagcacggcgccgaaatcttgacgaagaaggccat

SEQ ID NO: 42659 - DNA, 1934 bp, Oryza sativa
  Clone ID: PAT_MRT4530_4588C.1
gtggagtgttatatcacatgttaatacatcttcttaattttttccaatttttttcgtaaccatttgagtaacatgcaaataacgatgtcccctcgagggattaaaatatatagtttcccgtctagtgactattcttgtttattatgttcaggtcagcaaaatcatgacatccgccattgtaggtcgatctactgggttctgctggacacacaggaggccgatgttgacacatttcagcacctcggcttcagggtagtttctgtccaaggaatagtctaccatctctacaatatttccctctgtccagtgcctccatactaggcttactaaatcttcgttttgctctgcaaaatagggcccactgtttctttgccctgtcacaatctctaagatgagaatgccaaaactaaacacgtctgatttcgtagagtattgcccgcgaatcacatactcaggagccatgtatccaaatgtcccaacgatacggttcgtgacgtcccgagtttggtcttgcccgaagagcctagcaaggccaaagtccccaatctttggggttcaagtctgcatctagcaaagacgttgcttgccttcatgtcgcggtgaacaatcttcttctgggagtcttgatgaagatactgcaatccacgagcgacgccttctatgatcctaaatcgtgttgcccaatctagttgtcttcgttgctccacgtcgaaaagaaatgtgtcgagacttttattgggcatatactcatagacaagcaacctctctccatcttccaggcaaaaacccacaagacgaacaagatttttgtgatgaagtttggtgacaagaactagctcatttttcagctcttctagcccctgatttgaaccttttgccatccttttcactgctacttcttgtccaaaaagatgccccttatacactgcaccaaatcctccttcgccgagtttcttgctttcgtcgaagttatccgttgctacttgcagtgatcccagagttagcaaggttgacttgacactttcaaggtcctcagatgcatcaactgcaaaaatttgcatggattcgatagaacaatcaattcatactgatgattctccccgccgtgtagttgccgccgctggtgccgcagacaggccatggctgggcggcggcgagcgggagcgcgaccgcggtgtagaaggggcccagctcggacctcaggtagcagcgcgggccggcgaccctcgcccccttcccgttgagcgggaacgtcttccaccactggcccacgaggccgtcgaggcagctccggcactgcgccggcgacaggtccggcgagcactgcgccatggagtagatgttgctgaaccccgtgtcgttccccacccgctggcccgtggcgaacagcttcgtggagttctccaccgcgtaccgcacggtggcgttgaggagctcggtgaccgcgcggtcgtagccggcgacgtcggtgctggtgatgttggtgccgcttatgaggaggctcacctcgccggagttgttggtggcggcgaggaagtcgcccctgtcggagaactgggcgtagcattggttgtagacgaggatggcgtccttggtgcggttgcaggttggccccgcgtccctccagacgttggtgccgcagtcgaagcagtcggaggggttcatgtcgccgcggcagagcaggaggccgtagacggcgtccgggccgacgccgcggacgccggaggcgaagagggtgggggaggcggaggcgttcgcgcggagggtgctcgcgaggcgcaggaggttggactcgtaggtgctccccgccgtgtagttgccgccgctggtgccgcagacaggccatggctgggcggcggcgagcgggagcgcgaccgccgcgaagaggagaacgaaaaaaaaaagataaaataaaatttataccaatattttct

SEQ ID NO: 42660 - DNA, 367 bp, Oryza sativa
  Clone ID: PAT_MRT4530_45890C.1
aaaaacaagggaattttcatttacattaaaaatctttaacacgaaggcacgaacacagggggatataaaggattccggggggaacccacaaacaactgggtttctctccaatcaggctttaacaaaaatggaaaatccaaaagcttaaaagccttaaagggaaccatttaatttgggaccacaagggcccacagatgataagggtttaggaaaatacataacatacagcaacgggggacaaccctgggtttggggtggcgcctggttttgcacgcagaatctaaccacaatccagttcaggaggatttattttaccaaaatccacttgagggggattccttttaaccacaatccacttaaggaggtt

SEQ ID NO: 42661 - DNA, 1722 bp, Oryza sativa
  Clone ID: PAT_MRT4530_45891C.1
gaaggacaatggcaacttggcaagtactatctgcgagtttaaagaaacatctcgtaccacgaccaagcacctttgtgcttctgcactgcaaaatcttacaaaaagaagctgctcaatgaatgttgtattaaaatcggatgccacggagtacaaatgatgtaagggtattgttgtttcttggggacacggtgttccgcctggaactgttcctgtggtttgcttcgctcctgaatcagcatcttctggagacctgatggctgaggatgccaaaatctcccactaccaatcttttttggtggcttcgagactccgaatagagttgtcgcaattagaagcctcatcatcccgttgaaggcccactccccacccataacaattagttgtatcagggagctttaatttgcccaggccaagagcttctgcagcagttctgatattaccagcagtacagatgctcctatatagagataagagatgaaccctttccgcaacttgtaaattcttcttaagtccaccagcaaccatttccatttccgcagaattttcctctggagggaacatgttatgaattctacaaatctttgagagctcatctagagcctctgaccgttttccttgcatctctagtgcccagcattgcaagaacaaagaacgtgtgcgagcagcaactgatgcacaaacaagtgtggcagcacggaatttatccaatccaatattgctagcaagaccagcaagaaaattccttggattctccccactgatttgtgctgctccaatgtcttgtgctgctctgctgcaatcatccagaacaaagtttattgccgccctatagaaagaatcacgagcattctctgtgtcaaaagagacctttacacctgatatcttgcataattgccttagttgaattgcatcatcatatttgtaatccttccccgtgattctattatcaatgattgctcggaccaatctattcgctaatctcgcccacttttccatccctggcccctgatccaccaccacctcctctctcaattccggccaccattccggaagccttgcctttggttccctcctcttgacctctcttgccggctcaggcacacggctgactggagccgccaccggggacgacgacacagcgaccaccacctccttgccacccaggctgcggtccctcctccgcactacggccgcgccttcccctccgcgccaccccaggccccgccgctgccaggcgcggacggcccaccccagcagcgcccacgccgcggcggagagcgcgagcgaccagaggagcgcggcggcggcgaagcgcagggacgagcggcggaaggtgaggacgacgcggtccccgccgacgacgcgggcggagtagcggaggtcgcggtaggcctcgtcggcctcggcggcgaggcggtgaaggcgcagctccgcccggcgatggaggcgccagagctccgcctcgagggcatcgatgccgccgccgccgccgccgtcgtcgcgggcggcggaggtggtgggagcggccgggacggaggcgcgcctcccgcgggggcggtcgctgctagggtttacgccgcggaagcggcgcgcggcgaacgccacggtggacgcggcccggtgggcgcgggggagttggtagcgagagagcaatgggagggatggcgagaaggtagcggcggtcacggaggtcgccggcgcggtggcagcgacggcggccat

SEQ ID NO: 42662 - DNA, 1198 bp, Oryza sativa
  Clone ID: PAT_MRT4530_45892C.1
atgggcatcgcggcaggcgcggcgctgccgggaggaccggccggcccggcgggcggcctcttcgcgtgccgcagcgcggccgcgtcgatgaggcagacgtacctcgacctcgccgcggcggcggtggcggcgcgctccgcgagctgcaccagctgggccgacgccatgcgcgcctcctcccccacccgctcgtcccgctccgcctccgacgtcgacgagttcaccgcctgggtgaggaagcacccgtcggcgcttagcaagttcgaggagatcgccgccaagtccagggggaagaagatcgtaatgttcatggactacgacggcacgctctctcccatcgtcgccgaccccgacacggcctacatgagcgacgcgatgagggcggcggtgcgcgaagtcgccaagaccttcccgacggcgatcgtcagcgggcggtgccgcgacaaggttcgcaacttcgtcggcctctccgacctctactacgccggcagccatggcatggacatcaagggaccaagctccaacccggagtctgccctttgccagccagcaagcgagttcctccccatgatcgacgaggtgtacaagacgctggtggaaaagacgaaatctacacctggagccaaggtggagaacaacaagttctgcctgtccgtccacttcagatgtgtagatgaaaagagatggaatgctttgggggagcaggtcaaggccgtgatcaaggaatacccaaagttgaagcttacccaaggaaggaaggttttggagatcaggccgagcattgagtgggacaagggcaaggctctggagttcttgcttgaatcgctgggattcgccaactgcggcgacgtcctgccggtgtacatcggtgacgaccgcaccgacgaggacgccttcaaggtgttgagaaagagaggtcagggcctgggaatcctagtctccaagtgccccaaggacaccaacgcctcctactctctccaggacccaacagaggtgatggagttcttgctcaggctggtggagtggaagcggaagtcgtcgtcgtcgtcgttgatgattcgtccgagagtgtagactgatttcagggagatttttcagataaggaagggtccacctgtacaaattcttccagacattaccagatatccagaggttggaattgttcccccgctttttggttggttttacaaaaactttg

SEQ ID NO: 42663 - DNA, 494 bp, Oryza sativa
  Clone ID: PAT_MRT4530_45893C.1
aaagaaacatctcgtaccacgaccaagcacctttgtgcttctgcactgcaaaatcttacaaaaagaagctgctcaatgcaacatcttacatcctgtgaaactgtcaaatgtgtaagctaatgttgtatcaaaatcggatgccacggagaacaaatgatgtgtcggtatcattctttcttggggacaacatgttccgcctggaactgttcctgtggtttgcttcgctcctgaatcagcatcttctggagacctgatggctgaggatgccaaaatctcccactaccaatcttttttggtggcttcgagactccgaatagagttgtcgcaattagaagttggaactagaaaaatatggacagaatgagtcctccagcagcatctgcattctcattgatctggtaagctcaggccaagagcttctgcagcagttctgatattaccagcagtacagatgctcctatatagagataagagatgaaccctttccgcaactt

SEQ ID NO: 42664 - DNA, 346 bp, Oryza sativa
  Clone ID: PAT_MRT4530_45894C.1
tgacgaccaccacccgcgcgagcaccgggacatcctcacatggctcctagtctgctccgccccgcctccccgtgcctcaacctcgcgccccccaccgccgacggccccggccggagccgctccgctgtgacgatcggtggttcgaggccgctcagcgtttccctgcgtgtgggaggatctagccggagggactttccgtgtaccacaatggcctcaagagatcattctggtttgactcgacagcttttagattttcaacatggtacagtatatgagatagatggggaacttgtcccattcatggagtcgaaagctaggcttatggaccttctagtcaggaattgct

SEQ ID NO: 42665 - DNA, 223 bp, Oryza sativa
  unsure (1)..(223): unsure at all n locations
  Clone ID: PAT_MRT4530_45895C.1
gaaacggaaatttaaaattttattaatggttttaatgtgaacaaaacggggccaagatcgctaacaaatacaaattctgtaaccttgcctacaacaatatgatacaagcttgaatttgaagaactacacataccaaatgacaaccttatcgcctattatgagtacaaggtcgcctgaaccaatatttatgctcaaacttatattaggngtttttaccctaacc

SEQ ID NO: 42666 - DNA, 1694 bp, Oryza sativa
  Clone ID: PAT_MRT4530_45896C.1
atggcgaagccgacggtggtgttgctgcccgtgtggggcgccggccacttcatgcccatgatcgaggccggcaagcggctgctccgcggcagcggcggcgcgctgtcggtcaccgtgctcctcatgccggcgccgacgccggatgcggcggtcgacatcgcggcccaggtgaagcgcgaggaggcctccggcgccgacgacatcagcttccggcacctccccgccgtcgacatgccgaccgtccacaccggcatcgaggagtgggtctccctcatactgcggagccacgggccccacgtgagggccgccatcgccgggctcgattgccccgtggccgcgctcgtcaccgacatcttctgcacgccggcgctcgacgtggccgccgagctcggcgtgccgtcctacgtgtacttcacctccggcgccgtcatgctggagctgctgctgtactcgccggtgctcgacgaggaggtgcccggcgaattctcggagatggatggcgcgctgaacattcccgggctgccgccggtgccgccgtccgtgctcccggcgacgatgcttcacaagaagaagatgtcgacatacaggtggttcctcgaaaccgggaggtgctacatgaaggccaccggcttcatcgtcaacacggcggcggagctcgagcagagcgtcatcgacgccatcgccgacggccggtgcacgcgcggggtgcccgcgccgacggtgtacgcgatcggcccggtgatcgcgctcaccccgccgccggagcagccgcacgagtgcgtgcggtggctggacgcgcagcccccggcgtccgtgctgctcgtctgcttcggcagcaagggcctcctgccgccgcccaaggtgcgggagatagccgccgcgctggagcggagcgagcaccgcttcctgtgggtgctgcgcggcccgcccaaggacagccggccggggcaacgggtgcccacggacgccatgctcgacgagctcctccccgaggggttcttggacaagaccaaggggagggggctcgtgtggccgacgcgggcgccgcagaaggacatcctcgcccacgccgccgtgggcgggttcgtgacgcactgcgggtggaactccatcctcgagagcctctggttcggcgtgccgatgctgccatggccgctcgacaacgagcagcacgcgaacgcgttcctgctggtgtccgtcctgggcgtcgccgtgccgctgcggctggaccgggagcgggacaacttcgtggaggcggcggagctggagcgtgcggtgagcaccctgctgggcggcggggacggcgaggcggggaggaaggcgagggagaaggccgtggccgtgaaggcggcgtgccggaaggccgtcgagaagggcgggtcgtctgacgccgcgttccagaggctcgccgaggaaatccggcgaggtgccgttaatgtcccgaagaagcgaaactgaaaggactgaaaatccgtcgactgacgactgtgcagtgcagagctggccaaaatcgaaacgcccatgcggctttgcgtgactgcgtctacacgtcgacatgtgtacgttttaaaatgcacgggttagagattctatctatcgactatacgtgtacgtctgtactggcgtttaatatgtgtgtatatgcatatctggtcattggtcaataataaaatctttcaaaacaagcagtttct

SEQ ID NO: 42667 - DNA, 540 bp, Oryza sativa
  Clone ID: PAT_MRT4530_45897C.1
gctttggagaagatgtcttaggtggagtcctgggaccttgggccgtcggaaccgggcgccggacacgagggcaaaggcaatggaggccaagaccaccctgaggagattcgtggccgaaaaatgggcattcggcccccacctgaaagttggcgaaacaagaacgagaagttcgtggcggttaaaggattgctgaagaccaagtgtcgttttcggcctgtttaccatgaaatgttaataaaaggcaacagctacatggttatacgggttgccgaatggatgcgtgcacaccccggtcgaactttgaaagactatgacaggtatcgtgtaacgtatcgcgaagatagcgcaattttctagcgaaactttaagaggtcgtttctccaagaggctatcgctcgtcgccgttacagcttagtttgcttttggccaccgtcccctttaagggttgtgtataatattagtagcaacgatgaacctaattcgccgattagtaacttaattgagggcgaacatgtaactggtgatgtaattttttatgag

SEQ ID NO: 42668 - DNA, 580 bp, Oryza sativa
  Clone ID: PAT_MRT4530_45898C.1
tctgcgtattgtaacgttggtggtgccccgtcgatatctagagggtgttttaagacccctgtgttgtaggcttgctgaatcatcttttgaagcacatcggcaaccagaatgaaaagatagggtgatagagggtctccttgtcgaactcctcttttgtattatatatgttctcctttttgtccattgatgataatctgagccttgcctgaacataagagtgtcttggtccaaccaatccatttctccgggaaacctctcgtttcaagaactctaaacaaagcatcccagctgacagtgtcaaaagccttgtaaaagtccaatttgagaactaacattagttttttgttctttagggctgattgtactagctctgaggcgaagattaaattttccgtgattgatctgcctttaatgaagcctgactgcatagggtcaatcagctttggtatttccttctgcaacctgattgtgatagttttgctgataagttttggtacactgtgcaatagtgaaataggtctgaagtctttaatctgaactgctgttgctatcttcggtaagagggtaatatatgaatgat

SEQ ID NO: 42669 - DNA, 561 bp, Oryza sativa
  Clone ID: PAT_MRT4530_45899C.1
atggccggatgtcccgagcacgcagctcgtctagatactaagaggtctaatactgtaattatcccatcaactaagttacccaaggttgacaaaggacagacatcaagtaaatatgacacaagcaagcagatagatgaattttgcaagttgagttgctcaatttggagttcgaatgaatttattatgaataattattatcgaattattgtgcaattattatttatttatggcgtcgacaagcgggccccacccgtcggtgactcatgggaggtagacgtacggtggaccaagtccaagcgcgcatcgtccgtgggtgcaccacgtggtggccacggcggacaagcgtcggaggtggcaaggacgtggcgccgaggtggcaccgatgcgagatggcaccacgacagccacgtggatggccgggattcacccgagggtgaatccaaccgtgtgggagtgggcggccgaggcgcgggtatggctcaggctggcccaagcgagccatggcacggcggcggcacgcggccactggcggcgcgggacgacggcgagcagcctggctga

SEQ ID NO: 42670 - DNA, 1647 bp, Oryza sativa
  Clone ID: PAT_MRT4530_4589C.1
atgccgccgccgcgccttggctcggccgagccggtctcatgccgtgcccgtgccccagccgcgccgcctcgtgaccgtccgatcggctttgtgccgatccgagccgtcggttcccgtggaccggcggtggacagcctcggtggtcccggtccacggtggaccggcgcccatgtgccgctgactggtggggcccgcttgccggcgccgcccctcccccttgatgacgtcagcgaggggtatggtttgcgtcattggtggggatgcgaccatactagcagatggtctgcaagagggacaatttcgccggatcaagaccccgtcagtttcatggggcaactcagtgcaattctaataatattccacgtcagcctcttgaagatcagcctcaaccccaagtcatggctaatcaaactcagacagtggaagagttgttacaacagatgcgacgtcgataccaaatataccagatgcaacagatgcaacgacaatgtcaggagtcacgtcaatgtcacccaccacaggtcacctgaaaaggacgagaagcagtgcccaggaagtaaccaagctccaagtcagtctactaacaagaaagatggtactctgcagcacaactttggagcgaacaggaaggtgatatggaagatggataatggcaggaccatgatcatcaccagttcagaatttactcctgaagacgcagcaaggatacccaagcgaacagatcatgtgcctaaggactgtcagttgaacgcggtcatagctaagaccaagaaagaacaagggacaaccgtgcaacccattcgtcaaccaatgacaatcgacaacagcggtcacaatccttctgctcttcctccaactccagctccagtggaagccaaccatggaagaagcaacgtcaccaaggatgttcataagtctctgcttgttcccgtttcagctgccaaagtgcataatcagaagcctgcacctcgggaccaagcaagtcgattctgccgtaactgtcgtaagccaggacatcgtttcagtgattgtcctcttccaagagcagcaaaggcagttcgtcgtgattcacaagttaccagcattgcccatgacaccaatcgacacctgaatgtgcaacctccgcctcaacggattatcgtcaagggcaccgtcaaaggtcgcattgttccaccggcaaccgtttcaagcctacagcaccaacgccagcagggtaagcaatgccaggagaacaacagctcgctacagctacaaagaggtggtacgctccttcgtcagcacccgcggcaagtgttgtcagcaccaggtcgtccaactgttgtcagttctagcaatgcacctggtattgctccaatctggaggcccatcgacaaatcaccgctcggtaaccccacgggcaagaagatcctacccgttacagctgacaagacagttgcccctccaccatcgaagatcaacaagcagagcaacgttcccggcagcatcagtggtactcaaatgaaaagagtgatggaatatttgaaagtgacaatggttggatccatggtgctcgacactatgaaatctctccaaaggcagtaccaagggatgtggcagttcaatgtgcagatcagtcagaccgccgaccagcaccagctttctttctag

SEQ ID NO: 42671 - DNA, 1090 bp, Oryza sativa
  Clone ID: PAT_MRT4530_458C.1
ggctgtcatgtgcatagatttgatcatgcgttcatacggatgattatagtacaattttatccctccacttatatatttttatgcacaaatatgccctctcacatgcattaaagcaattgataatgcaagaaaaaattgtctttggaagggaaataacccaaattccacaagaagatccttaacttcatgggacttagtttgcaggccaaaggaaaaagggggtttgggagttgtaaacttgaagcttcagaactctactcttcttatgaaacatctggttaaactttataatggtgctgatttgccttgggttgacttagtatggaaaagttactatcttgcaaaagtcccccacaccagtctaaataaggcggttcataaagaggaatctgtgttggccatgtgcacaagacccctagaggattctttcttgctacctttgtcagtcttggcctatgaagagtttctgttgctggaagaagaacttagccttttgcatttgcagccaggacaaggtgatagttggagctttatttggaattcaactacatacactgcaaagaaattttataagctcaacttcatgcctctgcaaccccccaggccgtatgtttggctatggaagacaaaatgtgacatgaaaatcaaggtttttacctggctcctcttcagtgataggctaaatactagggatatgcttgacaagagacattgtgcaaaggagaatgatgacttaacttgtgtcctgtgcaatggaggccacagagaaaccagacttcatctcttcttcaggggcaattgtgttgttacccttactttccagttcatttgtaattttacctctattctttagagattgtgattttgcccctgttttttttgaaatgaagcaaccgtctgtccctactctgccaacttatggtaacggtgttaaatgtgtggtgaatggacaaatatacccctgcgtttgagatcaatgattttggcatgcacactggactgatgagatcaaaaatcgtccctgctcatccaagaacaggagaatcaagaaaaaggaaaaaggcaacgattttgtttcttcaggggaatg

SEQ ID NO: 42672 - DNA, 1069 bp, Oryza sativa
  Clone ID: PAT_MRT4530_45900C.1
ccggccgggaaaagaaggaaaatctcccctctgtctcctcgctccgctccttgcgccgccaagacgagtcgcggctgaacataacaggggaggggcggcgatctccctctccatctccatctccatctccatctggcgagcagagcaggggaggggaggggatcctcacctggaaagtgtgggtaaagcgcagggcaacaagaaatggcagcattcctgaggtcaaaatgttcgtcagttggacgtaccttgatgggaggccttgggaacaatctatttggagccgttaactcatctgttgaaacggtgtcaagaccatctcattgtgatcctatctttcagcaaatcagaacattcatccagatgagaacaaacctaaaggtggtagacaactctggtgccaagcgcgttatgtgcatccagtccttgagggggaagaaaggagcgaggctcggggacactataattggatctgtcaaggaagcacagcctcgtggtaaggtgaagaaaggagatgtggtctatggagtggttgtccgtgctgctatgaagcgaggacgcaacgatggcagtgagatccagtttgatgacaacgcgattgtccttgtgaacaacaaaggcgagctgattggcactcgtgtatttggtcctgttccccacgaactcaggaaaaagaagcatctcaagatcctagcgttagcggaacacatagtttgagatgcttacatacctggcaacctacctgttagttctgcagaatgaaatgagcatggtgctgtctcaagagtattccaccgttgttttgatcagttctgtttgcaataatgtaccctcaaaagattaaatgagctgatgccctgcagtcagtcctagacaaatcagattctgtactactatttaacctctgtagtattgcattccattcagatggaaacgcatacattgcttatgttctcttgttaaacctgaaactgcaactgaactcttgtgctttctgatctcaaagtgtttcggttcatgtgttaaaaaaaaaaaaaaaaaaaaaaaaaaaagactagttctcctcgtg

SEQ ID NO: 42673 - DNA, 210 bp, Oryza sativa
  Clone ID: PAT_MRT4530_45901C.1
atgcagcagtttgtcttgcaagcattagctgtagcaagagaatcaacccgcaaacgacaaatctggctccaccacccgctgcccgaggaagtggtcgctggtcgcacctgcccgccgtcggaggaactaggcacccgccactcccgtccatcgccgaatccttccagcgtcgaccacttccaccagtcgccaaaggagaggagaggatag

SEQ ID NO: 42674 - DNA, 3805 bp, Oryza sativa
  unsure (1)..(3805): unsure at all n locations
  Clone ID: PAT_MRT4530_45902C.1
atggccgtcgacgacgaactggacatacggacgggcggggcgtgtgcgactgcaaagtgcaacaaaaattgcggcccggccaggcatgtggggtgggctgggctttcggcccatgttaatatgggccgaagtgggccaggtttgatgggctggagcgacataaaggggggccacccgcgcgcggagaaggaggctccggctgtcgacgtctgctgcggcgggcgcgcggcttcaccgctgcgagtcaatatgtcactggatattactcaagttctcttgagtgcacaatctcctgatggcgcgactaggaagcttgctgaagaaagccttaagcagttccaggagcaaaacctcccaggtttcttgttctccctctcaaatgagttggccaatgaggagaaacctgaggaaagccggaggttggctggcttgattctcaagaatgcactggatgccaaggagcagcacaggaagaatgagcttttccagagatggctggcactagatgttggcgttaaggcacagattaaaggatttcttttgcaaactctctcatctcctgttgcaagtgccagatctacctcttctcaagttatcgcaaaggttgctggaattgagattccacagaagcaatggcctgaacttattgcgtcgttgctctcaaacatacatcaggtccagccaaatgtcaagcaagcgacgcttgagacacttggctacttatgtgaagaagtttctccagaagctgttgaccaagaccaagtcaataaaattcttactgctgttgttcagggtatgaatgcttctgaagggaattctgatgtgaggcttgcagcaacacgggcattgtataatgcattgggctttgctcaggttaacttctccaacgacatggaacgtgattatatcatgagagttgtttgtgaagcaactcagtccactgatgtgaagataaggcaggctgccttcgagtgcttggtggctatctcatccacttattatgacaagctggctacgtacatgcaggacatatttaatattactgctaaggctgttaggggagatgaggagtcagttgcactccaggccattgaattttggagctccatatgtgatgaggaaattgacattttggatgagtacagtagtgagtttacagctgactctgatgttccttgctactattttatcaagcaagcacttcctgccttagtgccaatgctgctagagaccctcctcaagcaggaggaagaccaagacttggatgaaggtgcttggaatcttgcaatggctgggggtacttgtttgggccttgtggcgagaactgttggggatgatattgtacctcttgtgatgccttttgttgaggagaacataacaaagcctgattggaggcacagggaggctgcaacatatgctttcggttccattttggagggcccatcagctgataaacttgctcctcttgttaatgtcgcattgaattttatgttgtctgcactggtgaatgacccaagtaaccatgtgaaggacacaactgcttggacccttggaagaatatttgagtttcttcatggttctgcacttgaaactgctcctattatcacatctgagaactgtcagcaaatacttaccgtgcttcttcaaagcatgaaggatgtcccaaatgtggcagagaaggcatgcggagcactctatttccttgctcaaggctatgtggatgcaggatccgcttcgccgctaactcccttcttccaagatattattcagagccttctctttgttactcatagggaagatgctggagaatccagattgcgtactgcagcttatgaaactctaaatgaagttgtcagatgctccattgaagaaacaggccctattgttatgcagttggtacctgtgatcatgatggagctccatcagacacttgaggcaggaaagttatcaactgatgagagggagaagcggagcgaactgcagggccttctctgtggttgtttgcaggtcataatccagaagttgggagcgatggagtcaacaaaatattccttcttgcaatatgccgatcaaatgatggaactgtttttgagagtttttgcctgtcgaaacgccactgtgcatgaggaggctatgcttgctattggtgcattggcatatgcggcaggtccaaacttttcgaaggcactggaggacaaaattctgccttactgtgatggaatcatgacccaactcctgaaggacttgtcgagcaatcagttgcatagatctgtaaagccacctatattctcatgctttggcgatattgcactggcaattggggagaactttgagaagtatttgatatatgccatgcccatgctacaaagtgcagcagatttgtcggcgcatgctgctgcagctgatgatgaaatgctcgattacaccaaccaattaaggaatggaatactggaagcatactctggtattcttcaaggatttaagagctcccctaagacacaattactgatgcagtatgctcccaatattcttaatttccttgatgctctttacaatgggaaggatatggatgatactgtgatgaagactgcgataggtgtactgggagatctcgcggacacgttgggtgtccatgctggccctttgatcaatcaatctatctcaagcaagaaatttttggaggagtgcttagcatctgatgatccactggtcaaagagtcagctgattgggcaagggttgcaatcagccgtgcggtttcagcccgccctcgccttcgtcgccgtcctcctcgccgccgccgccgcgggcgacctcgccggcggcggtggcggccaccacgctgaccatccagaacctgtgcccgcacccggtgtggccgctcgtcacccccacctccggccaacccatctccgacaacaccgcgcgcctcgaccccaactccctcatctccctcgccttcccgcccacgccgtggtccggccgcgtcgccgcgcgcaccggctgcgacgcggcggcgtcgccgccggccgggtgcgagaccggcgcctcgccgccgtccaccgtggcgcagctgagcgtccacggcggcggcgacgtcgcgacgtacagcgtcagcctcgtggacggcttcaacgtgcccgtggtcgtcagcccgcaggccgtcggcggcggccagtgccccgccctcggctgcgtcgtcgacctcaactgcgactgcccgctggggcagcggttctccgacggcgccgcctgccgcggcccgccggagtacttcaagggccggtgcccgcagacgaggacgacgccgggcgacgtcgagcccgtgccgcagagctgccgctcccccggcgagctcaaggtcatcttctgcccgcccaccatgctcaccgccgccgccgccgccgccgccagcgacatgctcatccgtaccgtcgtcgcctccagctagatcgctcgcttcgccggcgagacgacggcgagaagagaaatcccgtgcctaatgctgacgcatgcatgggcttaataataaattaattaatcaattaagctgtggctttgagcatgttaattactacttaattaatcttaattagcatcgatctgtggctgtggagatgtaattagctcgagctttggacttagngaatacttggtgttcgtctgtgttgtttttcgatgtgctacgccattagcaatggctagcaaaaaataatcaatcagtatgaaatttctcgtgttgtgatgaatttacatggtgtatttaattcgttatttaccataaatttcatcatatatattatctag

SEQ ID NO: 42675 - DNA, 723 bp, Oryza sativa
  Clone ID: PAT_MRT4530_45903C.1
cctcaggtggacagagggagctttgaatggaagggaggaagactggagaagattggttggtggggaaacattcaaggactggggaagaaatgtggagcgagggatcaactgggtggaagcttcgtggcgccgggcgtcgccgccgcggtgagaaggggagggcggcagcggcgcgacggcggccggcgcccggggggagaaggggagggcggctgcggcgcgacggcggccggcgcccgggggaagaaggggagggcggctgcggcggtagccaggggggagcgcgaggaggacggggggagcacggcagtagcagcggcgcttggtcctggcgcaccgccgccgtcgcgcctgtccctgcctcctgccgctccggctcccagcgctgacgccgacacggtcctcccgcctcgccgccaccgccaagccgacgccgacgccggggagagggaggaggcggcgcctaccttcgcggcggcgccgaacagcggcggcggcagtggcgcgacgctgttcgccgctttcccgacgctggacattgttggccgccgcgtcgtgagctccggcggcttcacgttcccggcgcggctaaggggtggcggcggtggtgaccccctcgccgccttcgctcctggccccacctccgtcgtcgttgccgcatcgccggacttcttctcccgcctcgccccggcaacctccttccccactcgccggccggctgcc

SEQ ID NO: 42676 - DNA, 3792 bp, Oryza sativa
  Clone ID: PAT_MRT4530_45904C.1
ttgcttgcttcctcctcctcctcttcgccgccgccgccgcgcgccgccgatcgggccagcggcaggggggccacccgcgcgcggagaaggaggctctggctagtcgacgtctgctgcggcgggcgcgcggcttcaccgctgcggtttctctctccccccgcacacccccccgcgacagtcaatatgtcactggatattactcaagttctcttgagtgcacaatctcctgatggcgcgactaggaagcttgctgaagaaagccttaagcagttccaggagcaaaacctcccaggtttcttgttctccctctcaaatgagttggccaatgaggagaaacctgaggaaagccggaggttggctggcttgattctcaagaatgcactggatgccaaggagcagcacaggaagaatgagcttttccagagatggctggcactagatgttggcgttaaggcacagattaaaggatttcttttgcaaactctctcatctcctgttgcaagtgccagatctacctcttctcaagttatcgcaaaggttgctggaattgagattccacagaagcaatggcctgaacttattgcgtcgttgctctcaaacatacatcaggtccagccaaatgtcaagcaagcgacgcttgagacacttggctacttatgtgaagaagtttctccagaagctgttgaccaagaccaagtcaataaaattcttactgctgttgttcagggtatgaatgcttctgaagggaattctgatgtgaggcttgcagcaacacgggcattgtataatgcattgggctttgctcaggttaacttctccaacgacatggaacgtgattatatcatgagagttgtttgtgaagcaactcagtccactgatgtgaagataaggcaggctgccttcgagtgcttggtggctatctcatccacttattatgacaagctggctacgtacatgcaggacatatttaatattactgctaaggctgttaggggagatgaggagtcagttgcactccaggccattgaattttggagctccatatgtgatgaggaaattgacattttggatgagtacagtagtgagtttacagctgactctgatgttccttgctactattttatcaagcaagcacttcctgccttagtgccaatgctgctagagaccctcctcaagcaggaggaagaccaagacttggatgaaggtgcttggaatcttgcaatggctgggggtacttgtttgggccttgtggcgagaactgttggggatgatattgtacctcttgtgatgccttttgttgaggagaacataacaaagcctgattggaggcacagggaggctgcaacatatgctttcggttccattttggagggcccatcagctgataaacttgctcctcttgttaatgtcgcattgaattttatgttgtctgcactggtgaatgacccaagtaaccatgtgaaggacacaactgcttggacccttggaagaatatttgagtttcttcatggttctgcacttgaaactgctcctattatcacatctgagaactgtcagcaaatacttaccgtgcttcttcaaagcatgaaggatgtcccaaatgtggcagagaaggcatgcggagcactctatttccttgctcaaggctatgtggatgcaggatccgcttcgccgctaactcccttcttccaagatattattcagagccttctctttgttactcatagggaagatgctggagaatccagattgcgtactgcagcttatgaaactctaaatgaagttgtcagatgctccattgaagaaacaggccctattgttatgcagttggtacctgtgatcatgatggagctccatcagacacttgaggcaggaaagttatcaactgatgagagggagaagcggagcgaactgcagggccttctctgtggttgtttgcaggtcataatccagaagttgggagcgatggagtcaacaaaatattccttcttgcaatatgccgatcaaatgatggaactgtttttgagagtttttgcctgtcgaaacgccactgtgcatgaggaggctatgcttgctattggtgcattggcatatgcggcaggtccaaacttttcgaagtacatgcctcagttttatcagtatttggagatgggactacagaactttgaggagtatcaggtctgtgccattaccgtgggtgttgtgggtgatttgtgcagggcactggaggacaaaattctgccttactgtgatggaatcatgacccaactcctgaaggacttgtcgagcaatcagttgcatagatctgtaaagccacctatattctcatgctttggcgatattgcactggcaattggggagaactttgagaagtatttgatatatgccatgcccatgctacaaagtgcagcagatttgtcggcgcatgctgctgcagctgatgatgaaatgctcgattacaccaaccaattaaggaatggaatactggaagcatactctggtattcttcaaggatttaagagctcccctaagacacaattactgatgcagtatgctcccaatattcttaatttccttgatgctctttacaatgggaaggatatggatgatactgtgatgaagactgcgataggtgtactgggagatctcgcggacacgttgggtgtccatgctggccctttgatcaatcaatctatctcaagcaagaaatttttggaggagtgcttagcatctgatgatccactggtcaaagagtcagctgattgggcaagggttgcaatcagccgtgcggtttcaggttgaggtcacattggtctcgagtctgcacatgcatcattccacttgtcatgtccgggtcttggttgcatcatgtctagacctgctctttggagaagtcaacccatccttacagcagagtcggaggtcctcactaactcatgcatcaatacatgtgtcagcctgtccttatcacttctgcagaagagagggttaagttggctgcctgctaactttgcttaaggcatctagaaccttcatttcttactggaggtgagatgagcttctacagttgcctggcatcccgattgttcatcggcatggcttggcatgcgtagggtctgggtgctatcgttttccattgcattcattgcatgcatcgaactttggtcggatggtcactcgatacatggtccagttgcttatgtttcaattaagcaaaaagagggctcgaatgcattgtcacaggattattttgtattagctcagggcgacaaagttcattatgtcggacctgagcgttctgtccctcccttagctggtagcttttctttaatttcctagcattttcttcacttgcattgtcttgcattcattcttggtctgttttgtaagagttcaccttttatcaaaacttcggtccagtccggtccggtacagcacgccgttgtacaagtcctcgcgtgcatcggttttatttcctggtgtatcggagcagcaggcatttgtactttctttctttttttttgggttactatcctctgctccatttcagtttccttgaagaagctgggctgctgaaaaacaaaaacaattataggtcttggagtggtttttttgggaggcggttggccgagttgaatttgtttacaaaaattgtattattctatggagctctgcctcctctctccccccatgtgtcatataatttgctggcatattatgagaatatggtgaaatgcgttgaaatgatatggtgttttgcttgcatggtatgctcgtatggtttgattcggt

SEQ ID NO: 42677 - DNA, 669 bp, Oryza sativa
  Clone ID: PAT_MRT4530_45905C.1
atgtcgctggcggcggcggcggcggcggcggtgagcatggtgggcgggcagaagatgaccttgagctcgccgggggagcggcagctctgcggcacgggctcgacgtcgcccggcgtcgtcctcgtctgcgggcaccggcccttgaagtactccggcgggccgcggcaggcggcgccgtcggagaaccgctgccccagcgggcagtcgcagttgaggtcgacgacgcagccgagggcggggcactggccgccgccgacggcctgcgggctgacgaccacgggcacgttgaagccgtccacgaggctgacgctgtacgtcgcgacgtcgccgccgccgtggacgctcagctgcgccacggtggacggcggcgaggcgccggtctcgcacccggccggcggcgacgccgccgcgtcgcagccggtgcgcgcggcgacgcggccggaccacggcgtgggcgggaaggcgagggagatgagggagttggggtcgaggcgcgcggtgttgtcggagatgggttggccggaggtgggggtgacgagcggccacaccgggtgcgggcacaggttctggatggtcagcgtggtggccgccaccgccgccggcgaggtcgcccgcggcggcggcggcgaggaggacggcgacgaaggcgagggcgctggccattgctag

SEQ ID NO: 42678 - DNA, 827 bp, Oryza sativa
  Clone ID: PAT_MRT4530_45906C.1
cggcatctcgatcatcgccgtgctgtacaccacggcgcaggtcacgcgcgacgttcaccggctcagctggggacgggacgtcatcgcggggaggaaggcggcggccgtcgttgacttcgccggagatcaggtcgtcgcttacctgttgatgtcggcgttgtccgcggtggcgcctgtgattgactacatgctgcaggccgtctactacctgttcaccgactgcgggggggtggtcctcaacgagcctccgtccgttgccggtttgttctgcacccccatcgccctgtattacccttcttcccttttccttattgcttttgtgtacagggttttcttctatgtctcttatttctgcttgtttctcagactgttgtgtgtatcgtcgttcattccgctgttcgttcggcggcgcccctcctctcccccttggtttcttatttccatcatcttttttacgtcgtcccgtacttggccccttgtcattgcacgcgggtctgccgtctttgccttttctgtgtgcttcttactttcgcccttccgttctatatctcgtttctttccgggttctgtatgcctcgtatttcgttcatgtgtcctttcgctcgcgtcgcctggtccgcccgtcctgagagtcccctgtcttatgttcgttggtgggtggagcgattcagtgtcgtcataatttggtcgggtgtgccgccgggcttttttcttactggttacgttcattatgccccgcgtcgctatgtttattaatatttatgatactttcacaccgcatgcgagctgaaggcgtcgttgctgtacgtacccgtccctgttatatg

SEQ ID NO: 42679 - DNA, 666 bp, Oryza sativa
  unsure (1)..(666): unsure at all n locations
  Clone ID: PAT_MRT4530_45907C.1
caaacatggccatntgcattttcgggtgaccagcncggatntcgaccgtgccaagcacggcggtattgactccatgtcgggctgacgacttgaagaagntgancaagaacaagaagctcatcaagaagctcgcccgcaagtacgacgcttccttcgcctccggcaccctgatcaagcagatttccccgtctccttggtcccggtctgtccaaggccggaaaagttccccaccccggtctcgcacgccggcgacctcagcggcaaggttaccgaggtcaagtcgaccatcaagttccagctgaagaaggttctctgcatgggtgtcgccgtcggcaacgtcgagatgacccaggagcagcttgttggcaacatcatgttggccatcaactacctcgtctcccttctgaagaagggctggcagaacgttggtagccttaccatcaaggctaccatgtctcctcccaagcgcatctactaagctttgacttggggatcggttggacagagtattcggcagttcgatggtcgtggcgacagtcttgttacaaagtagaggctagaaagcctgatagcatctagctctagtctcagccagaaaaagaaggtttccgcggtcatagagacacgcgcgatacagttgcccaccgaaaaaaaaaaaaaaaaaaa

SEQ ID NO: 42680 - DNA, 195 bp, Oryza sativa
  Clone ID: PAT_MRT4530_45908C.1
atggcgtcaacaacgatggcaacaaacttgtatacttctgggcgttctcactgctatagcatcgacccatgcattgatatagggctagttgttgacactgaaattgttagaaccatgcaagttttgagttgttctcatagaatttgtgattatggattttgggagactactttatctattactttaactagctag

SEQ ID NO: 42681 - DNA, 663 bp, Oryza sativa
  Clone ID: PAT_MRT4530_45909C.1
atggaggtattgtgtgcgtatgggatgcagagtcgaatttggaaggtgtccaaatttggatccacaaaggtcgacatgagggatctagaggcatctccaatctcattgaattcatattcgaggaagctgactacgctagtcatcgaccacatccaacgagaaagcattcctccatccggatcgaaggacttcaataagaccaatcatgacatgtttaatggccaaggcctcgtaaaggtaccaaacgcgcccttaacaatctgcaaattcgaatacgatctgcaccagctttcaaaagctggaaaacaactcggggcgcaatttggatcagtttcaaaagacatgaacagcaacctgaactgtttctccttgatgcttctcgacagcagtggcttttttcagactgttcttcaaactactccaccaaacaacccaaaccacatgagggcgactttcattcatagaatgcgcgatcagggaaccccttcccgtggccaactttgtgcgcggatggtcattgtcgcggaaattactggatcatggtggaggatgctgcacttggttcttcgcggcggcgccgttgttttctgcacacctagtgttgatgagtctttgggatgccattttcatgcaactaccgcaccaaactcccggcttatatag

SEQ ID NO: 42682 - DNA, 1116 bp, Oryza sativa
  Clone ID: PAT_MRT4530_4590C.1
ttgtctcctctcgcccttcggcatttctttgtcaaacggttttcaaaattctcctcccaatctctccaattcttttagttgtcacacctagaggaccagccgtcagcttcatgtctgttcagaagtcaagtcaagtcaaatctcaagcttcgcgcagaaggagcaacaattggtcagcatgagggacaatttcaacggatcaggatcccatcagtttcatggatcaactcagctcaattctaatagtattccacgtcagcctcttgaagatcagcctcaaccccaagtcatggctaatcaaactcagatagtggaagagttgttacaacagatgcgacgtcggtaccaaatataccagatgcaacagatgcaacgacaatgtcaggagtcacgtcaatgtcacccaccgcaggtgcgagatcagatgccagcccggaacccgaatcagagtcagagtcaggagttcccaatatcagcaccgaagacccctgtcaaaatgcagtccagatccccgaagataacgacagccaagtcaacgtcagaccaaaggacagtaagtgctacctgttatgactgtggtgagcaaggtcattatgtaaggaactgtccatggaaggtgttcgccaggtcacctgaaaaagacgagaagtagtgcccagggagtaaccaagctccaagtcagtctaccgacaagaaggatggtactttgcagcccaactctggagcgaacaggacagtgatatggaagatggataatggcaggaccatgatcatcaccggttcagaatttactcctgaagacgcagcaaggatacccaagcgtcagagaggaagaaataccttccgaggagcgcgtcagctaacccgtcatctcataaagtacggtccgcccagacccgaagatgatgaatcaggagaacggttttctgctgatgacaatgacgacaacgatgatgataatgatgacaatgatgatgcgacccttgactgtttcagggaaagagagtgaagttcaaagcatgtgctagatgtgggatagtcggacacactgctagctattgcctccccacatgccgctgtggtgaatatacccattactcagatgcatgcctgcag

SEQ ID NO: 42683 - DNA, 446 bp, Oryza sativa
  Clone ID: PAT_MRT4530_45910C.1
cccacgcgtccgcttcttctcttcggcgtggtcgcgtcgtcgcgtttgcgtcttcccgttcccgatcccttcctccctctgcctctcgattcgattcgagtttcttcgtttttttcccctcttaataatcttcgtgttgatttggattgtcgtcgtgttcttcgccttttctgtccgcagatctccgtgcgacgctgcccgggagcctcctctatctggattcgttcgacttgattgattgattgttcggtttgcttgcgacgtgtttgatttttttcctccccggtgattcgattcgatccgatcctatccgaccccttctctggtctcgatttctgttttgtggtggtccccgtgttcgtcctctcggcgtgttcggttggtgcaggagcggatttgatccgggattttggaggttcccgcggcgtcctgtggcgaaaggggaa

SEQ ID NO: 42684 - DNA, 366 bp, Oryza sativa
  Clone ID: PAT_MRT4530_45911C.1
atggaggtagagtgtctgatagtgaagattcagatcaagtctcctcagatgatgaagatgagaagtatctccaatgtttcaagcagaataaaatggaacataaggcatgctctcgttgtggagaaatcggtcacgttgccagctcgtgtgccactacctgcgttcattgtgaggaagaccatccacccgacgggtgtccaacgagtaggatcacttgtttctggtgtgaaggaactgatcatgtaccaaaagatctgccaggacagagaaatcgacatgggaaaagaaaatgccaagtccggaaagatatctgttgcttcaattgtcatgaattgggtcactttgctgaccagtgcccgaaactga

SEQ ID NO: 42685 - DNA, 1113 bp, Oryza sativa
  Clone ID: PAT_MRT4530_45912C.1
atggtgggcccagaggccactggctcggctcctcgaggcgcgtggaggcttgacactggatgcaggcccagcctctctgttatcctttcgccaatagttactgggcctcgccagcccagagatggccgcgtgggcctggcccccttactgctcaacccaaaagatcgagctggaagctccaaacctcacatcggtcgatttgaccaattcggccaattccgttggcactaagtgaatctctgaaggtgatggaagcaaacattaaactgctacataagagcgtgctttatggtgataatctggactacatctgcaccgagcttcctgccgctcttccgcatgtactgaaacactccattacaccgacactctgcatctacgaggacttgcaaagttttgccaaaacctcattgagattcatcgatttgaagcatctgagcttgtcatttgcctctttatggggacggcaggtcacttggtgggattctgcgtttggcctacctcttggagctcgctttcactcctggagcgaagaacattttcaagggcttgcctgatgacaagtacatcttcccactgcatgttttcagtggcccggacagctccccttctcatgtcagatctcttaacctggcctacgtctgcctgaacacaacaaccactggttttgctggctttgcaaacctcaagaagctcaccctgcacaaattgaaaaggttcgccaaaacctcagtcagattcatcaatttgaggcatctgaacttgtatttgcctctttatgggaacggcaggtcagttgatgggattcttcgtttggcctacctcttggaggtagctccagttctagaggaattggaactgcacgggctgatagagctagcacactgcattcttcgttgtgctattagacttgactgtatgatcatggatccgatggtaagaattaagggcctcccggtggttgattggttggtggaaagaggccgcaggattgccaaagagcttcttgagagggaggagtctcagggtgttcttagggtgtgtttgaggataaggggctcgaggagattgggaagatacgtaaaacgaggtaagctattagctcatgattaa

SEQ ID NO: 42686 - DNA, 491 bp, Oryza sativa
  Clone ID: PAT_MRT4530_45913C.1
cccccccttcggggggtttttttatcagggccaggctcagcttcatcagccacattggaaggcttgtatccagagcatgatctggcagtagaaatccccagaaatacagtacgggcactttttttggtaaaggcattacttttaacaacagctcaaattgcatatggggaggccaagggaactctgcatatcgcagttttctgcgcattaccacttttacgaggtgcatcacttgtcaggtagaagtctaaccgctactcaacattggcacgaagcttttgcccaaagactgtggactcggactctgaataacaatcaatgccctgtgcaggctgaactttgttcgccagatatctagccattcgggatatgttattcatcgcctttctgacaaggaaagatgagtggacgatcccgtcatacttagatagaaccctcctttttgtaatgcccagaagagcacgtgcaccacattatgtggagagtcagtg

SEQ ID NO: 42687 - DNA, 379 bp, Oryza sativa
  Clone ID: PAT_MRT4530_45914C.1
cgctatatatggccaaacgggcggcacggcccaggcctggccgtgcttgggccaagggtagtcggcccggcatggcccgaccaacacatcgggccgtgccgtgccagcccacgggccgcacacacggcccaacacgactcgggccgtgccgggccggcccgaaggcacgacggtccatctccctatactttgtgtgtcgggcctggcttgctggcccccagcatgccggtggggaggcccaggcacgacctggcggtcgggctgggtcggcacgggcccgacccaagtcgggccgtgccatgcttgggccgggcctcgggacttatggccatctatactcatcgccaagccgaattggagttaaaaaatagctttagtt

SEQ ID NO: 42688 - DNA, 4395 bp, Oryza sativa
  Clone ID: PAT_MRT4530_45915C.1
atggcggaagagagagaaagcttcgagagtcaatgggcgccctccgacgttacggaggaaaatctcaaggagatggtggtgcaaggagtttttccggcaaaggagatcatcggatggcgtccggcgtgcggcaaggctttcccaactcctgacactcatgaggtcgtcgtcttcttgttgacgaccaaatttgattatattgtgtatccactgttggtatttcttaatgacattactagaaatataattcccagcaatggcgtagaaatactcctggatcaaatcaactggcacgctcacgaacctaaaggcaagatttttggacctgcattgaagttaagcagatcttgcaggccatcaccgtcatcagcggccaagcctccaaatcctctagggtccaagcatccatcggctgagattggggctgagaacatcgtcctagtcaccatagataaactatcactagagcaaaggcaagagcttgaacggacgatgaaaagtgtgcaagataaatttatgaatttgttcaaggagacccactcaggaacaatcgttcagaagtacaagcttaaggtagttgctgccgatgaacctgaaacaacctcatctaaaggtagcgaagccagaggaaccaaagctgctgcagatagttcaggtggtaaaggtggagaacctaaggatggtgaggttgaggacgtagttgaagaagaggacgctgaggagcaagaagaacccccaccatgcagtaatttccaagatcaagttgattatgccgtgcaacatgctttgatcaatcaatcaggagtgcttgttaacaccttaacaaatatgatcaaatctatggttgatgatgtcatgaaggagcagttcgggcttaagccgaagaatactggaaacttgtatcagcacccttattctgagtggtttgaaagaattccactgcctaaccgatataaagtcccagacttttcaaaattttcagggcaagataatgtttcaacttatgagcatgtcagccgattcttggctcaatgtggtgaggcattggctgttgatgcattaagggttagatcattccccttgtctttgtctggatcggcattcacatggttttttgcactgccttataattctgttcaaagttgggctgatttggaaaagcagtttcatagttatttctacagcggaacccatgagatgaaactatctgatttgattgcagttaatcagaggcatgatgaaaacggactgatagctccgatcaaggagaaattttcgtcacaagactttgaaagcctgtctcatcttgcacagaaggaaactatacatgagcaaaggagttctgggaaagaagaaaggtatgactttgatatcaccaaggctgacaagattttcgatctactacttcgggagaaacagatccaacttcctgctggtcatgtgattccatcggctgaagagctaggaaaaagaaaatattgccagtggcataattctgggtctcatgctactaatgattgcaaggttttcaggcaacagattcaagcggctattgagggaggaaagatcaaattcgacgactcgaagaagccgatgaaggtggatggacatccttttcctatcaacatggtctacatgtctgggagggcagccgatgggggaaaccatcggaatttacagttaaattcgacaaaaatcattaataaataccagagaaaatatgacaggcagcaggaaagatattatgacgaagatgatgatgattttgatccttattgggacttcgaatatgaggctaaacaagccgatgttgatgatgtggaagaagcctctactaggttgattttgtctccagaacaagcaatttttgagaagccagaggggacagaaaatcggcatctcaagccattgtatgttaatgggttcgtcaatgcgaagctgatgttcaagatgatggttgatggtggggttgctgtgaatttaatgccatatactacattcagaaagttgggcaggaatgcagatgatctcatcaagacaaatatgattctcaaagactttggtggtaatccttcggagaccaaagaagttttaaatgtggagttgacaatcggcagcaagactgttcctactacgttttttgtcatcgatgggaagggttcctatagcctgttgcttggaagggattggattcatgcaaattgttgtattccttctactatgtatcagtgtttgattcaatggcaaggtgacaagattgagatcgtgccagccgacagacggagagcccaagctgttactttaagggcgtcgtggaggccatgccgatatgctgagtgggtttctaacatagttccaataatcaagaaaaatggcaagctcagggtttttattgattttagcgatctaaacaaagctactccaaaggatgagtaccccatgccgattgccaatcaattggttgatgctgctttgagacacaagattataagttttatggatggcattgctggttacaatcagatttttatggcagaagaggatattcataagactactttcagatgtcctggtgcaatcggcttatatgagtgggttgtgatgactttcggcttgaagagcgctgaagctacataccagagggccatgaactatatattccatgatctgatcgatttgttggttgagggaatgcctttcagtttatacttatcagccgatgagaagtcaatcggctcggttttgatccaggagttagagggcaaggagagggctattttctatttaagtcgtaggctcttgcatacagaaacaagatatgagtctcccaaggcagtcaaggggctggctatagccgattttattgttgaacatcgtgatgattcaatcggctcggttgaaattgtgccctggactttattctttgatggatcaatttgtactcaaggttgtggtatcggcttggtaataatttcgcctcggggggcaggttttgagtttgcttatgctattaaaccttatgcaactaacaatcagttgctcaaagaagtcgaagccgatgctgtggagataatgggagattctttgctagtgatcagtcagttggcaggagaatatgaatgcaaaaatgatttattaatgatctacactcaaaagtgccgagaattaatggacagtttttggctggtgactttgaagcatgtctctcaagggcagaatgttgaagctaatgatttggctcagggggcatcagtatataagccgatggtgaaggatattgagaatccatctcaatcggcttcacggaaattacactataaggctttgaaatatactttcttggatgatgagctatactgtcggacgatcgatggggtattgcttaaatgtttgagtgccgatcaagccaaggttgtgatgggtgagggaagtcaagattgtcagaaatttggagcaattcagagagcaccagcatcggctatgaatcctatcatcaagccatggccatttagaggatggggtattgatatgatcggtcagattaatccaccttcaagcaaaggacataagtttatattggtggcaaccgattatttcaccaagtgggtagaggcaattcctttgaaaaaaattgattttggggatgcagtacagtttgtaaaggaacatattatctaccgatatggaattcctcagactataacaactgatcaggggtcaatctttgtgtctgatgaatttgttcagtttgccgatagcatgggtatcaagttgttgaattcgtcaccatattatgcacaggccaatgggcaagctgaggcatctaacaagagtttgatcaagttgattaagcggaatatttctgatttttctcggcaatggcatatgagattagctgaggcattgtggtcttatcggatggcttgccatggatcgattcaggttcctccatgtaagcttgtttatggacacgaagcagttctgccatgggaaactacgatcggctcaaggagaatagggttacaagataatttgacaaccgacgagtattacaatcttatggtagatgaaacagaagatctagtttggtccagattaagagctctcgcaaagatgactaaggataaggaacgaattgcttaccattacaacaagaaagtggtgcctaagtccttttccgagggagaattagtttggaaattgatcttgccgataggaactcgtgacaataaatttggcaagtggtcaccgaattgggaaggaccgtttcagatttacaaagttgtgtccaaaggggcttatatgttgcaaggacttgatggtgaagtttatggacgagcacttaatggaaaatatttgaagaaatactacccaagtgtttggattaattcatga

SEQ ID NO: 42689 - DNA, 3358 bp, Oryza sativa
  Clone ID: PAT_MRT4530_45916C.1
ctctgggtgaacaagtttcagtccccagctcatgtcctcacagtgtctgacatgtgggaccaacttccccgtgtcggcgccacgcttcaccctgcagtcgtagaagggcggcccgtgcaagcacggctccatggacacggcgcgccggcacggcgggtccggcgtcgtgaggttctccggcttgaacatgacccacggcgagagcccgccgaggccgtggccgacgtacccgaacgtcgaccacccgctggtgacgatggcgtcggtcatgctcagcaggtacatctccgccatcgccttcatgtcgtgcgtcgtgctcccggacagctggtgctcctcgtggctcggctggtgcacgcgcaccacctcgccggtggccgtcggtgactgccagtacctggaccggatgttgtcgtagtaccacgagttcaggccggtcatcaggacggccttggaccgcgccgccgtcgccgccgccgccggagctgggaacgacgacggttcttgctccaccacctccggtagcaaccgctcctgtgacgtgcaagcggtgatctgatccaagatgtgcttgaacggggtgtccccgtcgaacaccctgacctggatgccgagccgttcgtccgaatccctcaggtaggagtcgtagaacctcgtgatcaatccccaaaccttgttcgtcggatggagaagatagtgcgccaagaggtagaacaccgagtctttccgagggaacagccggtcgagctcgtcttggtacgccgggttgaggaacagcgccggcgggaagtagccgtcggtcctcatcagcagccatggcgcccggtggaggaaatggcgttcgtcgtcgcagtagaagagcttgtcgtggtaggtgcagccatggtcgaggtcgacgaagacgtaggggagctccgacaccgacgtggccggccggtcgctctgcaccaggttcctgtagctctccggcgcctcgccggtcaagtcctggaggttcttgatcgggaactccggcggcagcagccacgacgtgcccgggaacggctcgcagaacaggtcggccagcgactcccccctgtcgacgagcagcgcgcggccggtgagcatggcgtagaggaacgccgacgccatggccagcatcctgttccctaggcccctgtacggcacaagcacgaggtacttgcacccttcgtcgtcggcgccggccgtgccgttccgccgggagcccagccgctccgccgccctccagtacgccgccgtgcccgggccgcaccgccgctgcagcgcctcctgctcccgcagccgcttgacgaggtgacggcacggtgatcgcgccgtgttcttgcggtacatcgccgagctgtaccggctggcgcacgtccgctcgtcgagtcccgggacgagcaggccgcccatgagcacgtctctcttggaccctgcaatggcggaggcacgtgattttgtcactaacagataggttcgcggttcattagacccacgtgtaaatgacaaagacactctttgaagtagagaagccacacgattaaggaaaatttttaagctttcactttatttattaaaacatttaaaaataattttaaacaaattattttttaaaaaatacaatgaggtaggcagcctaaagccacgaactaaactcatactaagagtcctaaacaccttaggaaaccctctagtacaagaaagaaactttacataaccaatcgtaccaaatttggactccttccaaattcgactccgcatcccatacgcacacaacacctccatcgtatgccatatggaatgccacaaccttcccggagtgcgcgcttcgcttcatcctgcagttgttgtacggcggcgtgaggaagcacggctccatggacacgtcccggcggcacggcgggtcgggcacggcggacgactcgttcgccggcttgtacatcacccgcggcgtcagcccggcgagcccctgcgccacgtacccgaacgtcgaccacccgctggtcaccagcgcgtcggagaggctgagcaggtatatctcggcgcacgccttggcgtcgtgcgacccggagccgaaccgctggtactcctcgtggctcggctggtgcacgcccaccgcctcgccggtggccgtcgcgcgctcccagtacatgcccttgagcttctcgtagtaccacgacgtgagggaggtgacgagcacggctttgggcttcaggcggcggcgcgtcgtcgccgccggttctccggtggtgatcacgtccgggagcagattctccatgtgcgcgcacgcggtgatctgttccaggaccttgggcgactcctgccgcgcgccgaagacgcgcacctggacgccgactcgctgccgcgccgtcgcgaggtaggcgtcgtagtagcgcgtgacgagaccccagatgtggttgttcgggtggaacaggtaccgtgcgaggtggtggaacacggcgtccgtctccgggaagagcgagtcgagctccgcctggaatccggtgacgaggaacagccccggcacgatgtagctgtccgtcctcatcacaagccacgggacgttccggagcacgctctggtcgtcgtcgcagaagaagaacttgtcgtggaaggtgtagtcgtggtcgaggtggatgtaggcgaacgccggcagggcgtcggtcgtgatcaccttgttcttcagcatgttcccgtagctctcggtggtgtcgacgctgaagctggtgaagttcgtcagcgggaagcccggcggcagcagccacgtcgtgccggggaagggctcgcagaagagctcgcccatctcgttgctggggtcgacgaggagcacgcggtcggtgagcatcgcgtacaggaacgccgacgcggcggcgagcatccggttgccgaggccgcggtaggatatggacaccaggtacctgcactccgtctgcggcggcgacccgatgccgccgctcttgcccgacctcaggctctccacggcgttgctgtacgcggcggtgcccgggccgcaccgccgctgcagctcctcgtgccgccgcagcctggacacgaggtgcggcgagggctccttgccggcgttgtttcgacggtacatggcggattggtacctgctgtggcatgacccctcgtcgaatccgtcagccaacaggccgccgagaagcttgtcgtgcgccgccgccgaaaatttcctatgtgttatcaatatttgataaaaaaaactaaatacagttatatatttatcaattttatcaaacaatgatatgtttaaaatgatatttatcaattttaacaatctaaacaggccatcatttcttatcgatctactctgtcctaaaattatttttcatttacc

SEQ ID NO: 42690 - DNA, 219 bp, Oryza sativa
  Clone ID: PAT_MRT4530_45917C.1
tcagattgcgttgagctgaagctgttcgtgtgactcttctacaccttccaggctatccggaatcgggagggtttcccaataggaaagcaactcaggactcaggagcggcgtctgagaggtttcagagatggagaaccagttccaggtgagatctctgtaccctaatccttttctcctgctcttgtttgtgtcctgaccgacctgggatgccgaggacat

SEQ ID NO: 42691 - DNA, 1776 bp, Oryza sativa
  Clone ID: PAT_MRT4530_45918C.1
tcacccccgacgaaccagcttcaacccccactgcacgtcgtcgcagtgccggacgtgcggcaccatcttcccggtgtccgcgccacgcttcagcctgcagtcgtagaacggcggcgcgtggaagcacggctccatggacacgtcccgccggcacggcgggtcgtcgcccgccgcggccgcggtgtcgttcgccggcttgtgcatcacccacggcgtcagcccggcgagcccctgcgccacgtacccgaacgtcgaccacccgctggtcaccagcgcgtcggagaggctgagcaggtatatctccgcccacgccttgccgtcgtgcgacctggcaccgaaccgctggtactcctcgtggctcggctggtgcacgctcaccgcctcgccggtggccgtcgcgtgctcccagtacatgctcttcatcttctcgtagtaccacgacttgagcgaggtgacgagcacggctttggacttggagttcgccggcgcgacgtcgacgacggggggctctccggcggcgatcacctccgggagcagcttctccttctgcgtgcacgtggtgatctgatcaagcagcttcggcgactccggctgggcgccgaagacgcgcacctggatgccgactcgctgctgcgccgtcgcgaggtaggcgtcgtagtagcgcgtgacgaggccccagacgtggttggtcgggtggaacaggtagcggccgaggtggtggaacacggcgtccgtctccgggaagagcgagtcgagctcgtcctggaatccggtgacgaggaacagacccggcacgatgtagctgtccgtcctcatcaccagccacgggatgttccggatcgccctctggtcctcgtcgcagaagaagaacttgtcttccacggtggacgtgtggtcgaggtggatgtacgcgaacgccggcagctgcgccgtcgtcggagcagcatcgccggcgtcggtcgtgatcaccttgttcttcaccatgttgccgtagctctcggcggtttcgacgctgaagctggtgtagttcgccagcgggaaccccggcggcagcagccacgtcgcgccggggaagggctcgcagaacagctcgtccatctcgttgctggggtcgacgaggagcacgcggtcggtgagcatcgcgtacaggaacgccgacgcggcggcgaggatccggttgccgaggccgcggtaggagatggagacaaggtacctgcactccgcctccggtgacggcgacacgatgccgccgctcttgcccgacctcagcctctccacggcgtcgctgtacgcggcggtgcccgggccgcaccgccgctgcagctcctcgtgccgccgcagcttggacacgaggtgcggcgagggctccctgccggcgtttcgacggtacatggcggattggtacctgctgtggcatgatccgtcgtccaatccgtcggccaggaggccgccgagaagcttgtcgcgcgccgccgccgccgccggccattgcaggatcgagccatcgcctcggcgaaaggcgttgacggagctaatccagacggccggcgcgccggcgccgcgggcgtcgaggaggatgaccattggcggcacgaccatgacgaaggcggcgagcacgacgttgacaccacatctccacgccctgcgcacgtgcctcttggccgtcgctggcaccacgccgtcctcgacctccggccaccggccggcggctgagcgttgcttctctttccgtagtggcacggcggcggcggcggcggcggcaccgccggatcccat

SEQ ID NO: 42692 - DNA, 312 bp, Oryza sativa
  Clone ID: PAT_MRT4530_45919C.1
atgtcccttctcaacaaattaggtccagccgggcaccgtggtccgctcgaccccctcaagccgggcctgatccgtgttgtcgacctgtcgttcaacatgttcaggcaaaatttaccagtgctcctaattgctactgatcaccgagtagctcgtttcacctacactgtcgagatcaccgcgagaggcgtcgagaaacgaatacaccgtggagatgtggacgaagaagcactttctccctcgacggacgacgagtctccgaggcctctctcccgacagcgactcgagaagttgaaaggagtaggtttagcctaa

SEQ ID NO: 42693 - DNA, 584 bp, Oryza sativa
  unsure (1)..(584): unsure at all n locations
  Clone ID: PAT_MRT4530_4591C.1
tattcaccttgtggtaacagccaatgtaaaatttctgctgtatttcatactcttcggggtaacctgagcaagtgagcagcacactactctgatcaattatcggtgcatgtctgtccatttcgattatcagagaatgcgaaaaatcaggggcctccttgcagagctagcaattgtggaggatgagatattctacctggagaagaaggtggacgacttacggctgcggcttcaccgggagcgcaagtggactgatcagtgcatttttcagcagcagcagcagaattggccgcaaaatcgccatcagaggcactccatctgcagccttggtggaaggagggagcttcaaggagctgagttgctaccaaggctaccttgtcctgngcagtgatgaagctcttgaatgtgaaagcaaggcttctgttggatctgtctctagcaaaggtgaggaagttgagcaaatacgaagaagcagccactcatttgagaatttgaagctccctgaaaggaaaatctgcttgagtggcccaaataagctctctgaggagctgatcagactgacagtgaacatcttccacaagctgaat

SEQ ID NO: 42694 - DNA, 309 bp, Oryza sativa
  Clone ID: PAT_MRT4530_45920C.1
atggagccgccgtcagcatcgccgtcgagttgccgccaccttccctattgccgccgcccgagtctagatctggcgagctacgggccagatctggagagctcggtggagggagaggatggaggctgggaggggatgacgaagggagaggttggaggcaaggaggggatggcggagggagaggtcagaggccgccgctgccgcgagccgttgagctgggctcgagcggcgtccgggattgagaggcgccaatggggagggggagcggtagagaggaggagagagagctacgccggcggtcaagggaagtag

SEQ ID NO: 42695 - DNA, 244 bp, Oryza sativa
  Clone ID: PAT_MRT4530_45921C.1
ggaaaagaaaaaaaaagcaggaccattgatttgcattgccaaaaaagcttgctaaaggcgacacattggcccttccaagtctcaataataagaaatgttccagaccatttgttttctttcccccaatctacttttccttttcttttcctgtacaatgggaaacaattcaaatcagataatcttcgagttacaaccgaatggattgttttgagacagacattgaaaatggtctgccattcaaata

SEQ ID NO: 42696 - DNA, 1247 bp, Oryza sativa
  Clone ID: PAT_MRT4530_45922C.1
ctcttctcaaaaaaaaaaaaaaaaatccagcggcggcggcggcgcacatggatcagatggcggagcggcagcacaagaagcggaagccggagaagatggccggcgcgcgcaccagcggccatgataaggaggaggagaagaaggtgaaggctccttctgtgtacctggtggtaggccatgaggtgagctgggcaacctactccgtgttcaaggtggatccctacgcggcggcgaagagaggcggcggcggcggcgacgaggaggatcccgctccggtgcctatccctcgccggctcgcccgcatcagcgccaagttctgcatgtctttcgcccccgtgcccgtgcgctcatggatcgtcggcgtcgggggcgattcagcggatgaggactacgccccggagaccatcgtcttcgacaccgagactcgcgccgtgatccgggggcccaacctcctgtcgaccaagctccacccggttgtgctcaccatcggccacaagatctacgccctggcacggtatccctccgtcacggggcaactcgacttcgttccatggttcgaggtgcttgatctctcccaagcgcgcgtggtcgatggccatctagagagctgcgagtggaagcccctgccacggcctcccttcttcccatgggacctcaccccattgcagtacctttctccgccaatggttactgtcgagtcctacgttgcactggcctcctgcattctggtgtcattatctcagcaggagggcacgcacatgtttgatgtcgacaaggagcaatggtcgaaactggatgacaacagcctgccattcgtcagaggcgccgttccacacggacccatcttccttggcttatcgagagccaagaaaatcatcaccgcatacaatatcacagtggtctgccaaccaaggtcaggcggcacagcgccgtccttatcaattgttgagttccctgtggtgtctgacatggaagaggagatcttaagcacaccaatatttctttctctcggtagccctggcttctgttctttgaaaagttggagcgaccacccaacgacggatgatccatgtactcgtgcacgtatcaaattgatggcataccatacagaggaacccatatcacaagagtacatcgagtcttctcatggcttattgataccgaaccagtggaaacaggtgtacgagatatgtgattcgtccagggaattgatttggcaatgcctgatcactgcaatgtccttatga

SEQ ID NO: 42697 - DNA, 364 bp, Oryza sativa
  unsure (1)..(364): unsure at all n locations
  Clone ID: PAT_MRT4530_45923C.1
aaagaaacaaatcaaaatgagcatgcaacattcgcatgacatggaataaatttttttgtgtatttaggtgacatggtagatgaatactaatatatgaggtccacatgtcaatcaaacaaagaagatagtgggacgtcccactacctccacctcaccctctctacctctatctcctcgatctctccgccggtgagccaaagtcagtggggaggttggcgagcggggtagggaggctggcaaggggggcggagaggcctccccatgtaaatccaagtcatcaccgtcatcgtcaaccgtggtcanattggacggtngtgaagagcttgggagaagaattaataagtngagccatcagagtagtgtt

SEQ ID NO: 42698 - DNA, 1714 bp, Oryza sativa
  Clone ID: PAT_MRT4530_45924C.1
gatcgccggcgtggaggtggagcagctgctgcggcggttcgagccggagaagggggaccagccgctggcgtacgccaggagcgtcgtggagtactgctcctacattgccctgcgcgtcgagaccaagcgccatgactacctcagcgacagcgagttccactcgctcacctacgacatgatgatcgcctgggaagcccccgacgacgagacggacgccgcgttgcagaaaatgtcatttagcttcgttgacggcaaggatgacgacgattgtgggtccatgttctgtttgagccccacacaaatggccattcaggttgatgggaggagaacggtcagtcctgaagcatttgccaagattattcctgcgtgtcctgcaatggcacacgcgatcactgttcgcaacttatttgatgcgctcacaaactctacgggaggccgcctgcattttctcatctaccataagtacctcaaatgtttagacaaggtgctgagatttgcgaaacgtatatcaggtggacacaaagctccagctcttcaactttctgatggagaagtgatccttgatatctatggtgccgcgacaaccaagccgattcttcaacacattgggacgtccacttggcctgggaggctcacactgacaacccatgctttgtactttgagccagtcagtgttgatttctcatacaacgaggctgtggtgtatgatctgtcaagggacttgaagcagtctataaaacgtgaatcaactggcccatggggtgctcagctatttgacaaagctgtcatgtacaaatctagctctacaagagagccggtgttcttcgaatttcctcaattcaaaggtcacactcgtcgagactactggtttgcaatcatcaaagaggtgttgcacgctcacaagttcattaggaagtacaggatgatcaatttacataaggccgaggcgctttctgttgcgacactaggaattctcagataccgcacggtgaaggagggattccacatactgcctgcacatttcaagactacccttgccttcaatttggcagagaaattgcccaagggggacaagatactggaagcattgtatggtcagatgaaagattattcctcaaggttcagagtagatgaagattctgttcaaagcagttcagatgatctgacgcttgctgatcctttcccactttctgcatatactttggtgaacatgggtttgttgacactcaaagaggaggacaatcccgaggaatgggatctcactgtccgagatgtgcagacgggaggaactagctcagtgcaaatggctctagagagatctgtaggttactctggcagagtggaggctgcgagggcgacccttgatcaggtcaaagtggaagacatcgacactaatgtggctgtcctgaagtttaaagagcacgaacaaagtagcagctacaatgctcgtggcatctgcgatattcgcgtacctgcccttgagaagcatacttgtactgattgtgctggaagcatacacgaggcatatgccggcgaggaagaagagcagcgagaagttggtgaggagactgagagagtggtggctgcgaatcccagctgctcctgtacagctcttgaggcctcaggataccaggagatggacatcgaggttgagatcgagatgacccacatcggaaatgtcggtactttacacatgtattatatgtacctgtaa

SEQ ID NO: 42699 - DNA, 2185 bp, Oryza sativa
  Clone ID: PAT_MRT4530_45925C.1
tgggtctccttgaggacctcctcctcgccccgcgcgtcgacggcggtggcggcggcgacggcgaggccatggcggcgcccgactacgccatccctcccctctccccaaccgccgcctccgtcgtccaccgatgcgcccggatcgccggcgtggaggtggagcagctgctgcggcggttcgagccggagaagggggaccagccgctggcgtacgccaggagcgtcgtggagtactgctcctacattgccctgcgcgtcgagaccaagcgccatgactacctcagcgacagcgagttccactcgctcacctacgacatgatgatcgcctgggaagcccccgacgacgagacggacgccgcgttgcagaaaatgtcatttagcttcgttgacggcaaggatgacgacgattgtgggtccatgttctgtttgagccccacacaaatggccattcaggttgatgggaggagaacggtcagtcctgaagcatttgccaagattattcctgcgtgtcctgcaatggcacacgcgatcactgttcgcaacttatttgatgcgctcacaaactctacgggaggccgcctgcattttctcatctaccataagtacctcaaatgtttagacaaggtgctgagatttgcgaaacgtatatcaggtggacacaaagctccagctcttcaactttctgatggagaagtgatccttgatatctatggtgccgcgacaaccaagccgattcttcaacacattgggacgtccacttggcctgggaggctcacactgacaacccatgctttgtactttgagccagtcagtgttgatttctcatacaacgaggctgtggtgtatgatctgtcaagggacttgaagcagtctataaaacgtgaatcaactggcccatggggtgctcagctatttgacaaagctgtcatgtacaaatctagctctacaagagagccggtgttcttcgaatttcctcaattcaaaggtcacactcgtcgagactactggtttgcaatcatcaaagaggtgttgcacgctcacaagttcattaggaagtacaggatgatcaatttacataaggccgaggcgctttctgttgcgacactaggaattctcagataccgcacggtgaaggagggattccacatactgcctgcacatttcaagactacccttgccttcaatttggcagagaaattgcccaagggggacaagatactggaagcattgtatggtcagatgaaagattattcctcaaggttcagagtagatgaagattctgttcaaagcagttcagatgatctgacgcttgctgatcctttcccactttctgcatatactttggtgaacatgggtttgttgacactcaaagaggaggacaatcccgaggaatgggatctcactgtccgagatgtgcagacgggaggaactagctcagtgcaaatggctctagagagatctgtaggttactctggcagagtggaggctgcgagggcgacccttgatcaggtcaaagtggaagacatcgacactaatgtggctgtcctgaaggaactgctatttccgttaattgaaataggcaaaaggcttctctttttggctgagtgggaagatccacttaaatcatacgtcttcttgttctgtttcctcttcatagtttacaggcataccgggaacgggcagatgataggcgcatttgaagtcacaactccacctaggagacgaactgtagaacagctactggcgctgcaacaagctatctcgcaattagaggcacaagtgcaagccggaaacatttttcttctcaagctccgatccctcctgcttgcagcgttccctcaacacgaacaaagtagcagctacaatgctcgtggcatctgcgatattcgcgtacctgcccttgagaagcatacttgtactgattgtgctggaagcatacacgaggcatatgccggcgaggaagaagagcagcgagaagttggtgaggagactgagagagtggtggctgcgaatcccagctgctcctgtacagctcttgaggcctcaggataccaggagatggacatcgaggttgagatcgagatgacccacatcggaaatgtcggtactttacacatgtattatatgtacctgtaaattcatcatgttgttagaaatgttgatatatacgatcagatttttgtgtt

SEQ ID NO: 42700 - DNA, 342 bp, Oryza sativa
  Clone ID: PAT_MRT4530_45926C.1
aatcacatagtcgggggctacacctaattaggtgcatctactcgatgcaccatgttttattttcgcccttcacagtcttttagcactcccctagccgccaacccatccacatatcaaattaatccctccgccgccgctcgccgtcgccggagatccctagctccctccccttctcggccgcaaccaatttctccctctacggcccgatttggggaatggccgaaggtagaagaagagaagagagagagactgacagccctaggtcttgaggattcttctgactccatagataatatcaatcaatctcaggacatcgagcaaggcaagttaccatatacctat

SEQ ID NO: 42701 - DNA, 520 bp, Oryza sativa
  unsure (1)..(520): unsure at all n locations
  Clone ID: PAT_MRT4530_45927C.1
ccacncntccngtcactccgatgactcgcgcccgcgcccgcgcccgcgccgtgcggctggccgtgtcggagatccctctcgccgtgcggcgatcggcgaggcagcagcagcagccgcctgagccagccgcagacgtgccggaccatttcttgtgcccgatctcgctggacatgatgagggaccccgtgacggcgccgacggggatcacgtacgaccgggacggggtggaggtgtggctggagcgcgggcggccgacgtgccccgtcaccggccgcccgctgcggccggaggagctggtgccgaaccatgccacgcggaggatgatccaggagtggtgcgtcgcgaaccgggccctcggggtggagcgcgtgcccacgccgcgggtgcccgtttccgccgccgacgcgcgcgagatcctcgagggcgtcgccgcggcggcgcggcgaggggacgcggcggcgtgcgggaggatggtggccagggctagggcgctcgggaaggagagcgagcggaatcgccg

SEQ ID NO: 42702 - DNA, 576 bp, Oryza sativa
  Clone ID: PAT_MRT4530_45928C.1
ttctttttttcgcgctcgattctaatcctaccggagagcaaaagcccacgcgcgaagcaaaagctcgccgcaaatggaggacgccgcggtcgtggaggccgtggtgagcggtggttcggttgttttcgcgccagctctagatgtctggcactcactctgacgctcaggctgcggctgagagagtaaaaggctaggcgttatctgtttgaaagggattgtgcataatttattgctaagcgagtttttgcgtgctttgtctgcattgtttttgctttttgtgcttattgattagtgtccttttttttttctttttagttttgtttccattattcttttttttttcttaatctcttatttttttctctttttggtgtgggggggggtgggtgtattctttttctttttttttttctattattttggggggtctatttttttttttatttcctttttttttcttttattcttattttttcttttttattctatattttcgacttcttttttttttcgttttattattctaatatcttttttctttcttgacttttacttttaaactaggtctgtttcttt

SEQ ID NO: 42703 - DNA, 258 bp, Oryza sativa
  Clone ID: PAT_MRT4530_45929C.1
aggcgaggcacaccaatacacatgagattagttgcagtgagaatagcagcgggtcattacataacactagatcatacggggatgcacgcatagcagacccaccgacctgactattaagctattgattacacacggctttaatgaatcattgatcagtacacacgcacaccacactaatatgggtggtcaggattgtcgactaaccaaggaaggtgacttgactgaaccgagcggtcgactgcttaaggacttcacttg

SEQ ID NO: 42704 - DNA, 911 bp, Oryza sativa
  Clone ID: PAT_MRT4530_4592C.1
atgtctcccctcgcccttcggcttttctttgcgaaacagtttttcaaaattctcctccctgtccctccaattcttatagttgttaaaccgtggaggataaaccgtcagctttgtgtctgttcggaagtcaagtcaagcatcaagcttcatgcagcaaagagcgggaagcagatggtcagtgtgaggggcaatttcaacggatcaggatcccgtcagtttcatggatcaactcagctcaattctataagcttcccacgtcaacctctcaaagatcagccacaaccccaagtcatggctaatcagactcagacagtggaagagttgttacagcagatgcgacatcggtaccagatctatctgatgcagcagatgcaacggcaatgtcaggagccgcgtcaagtccaccagccacaaatgcaagtccaggtgccagcccggaacctgaatcagagtcagagtcaggagttcccaatatcggcacctaagacccctgtcaaagtgctgtccagatccccgaagataacttcagccaactcaccgtcggaccaaaggaaaataagtgctacctgttatgactgtggtgagcaaggtcattatgtaaggaacggtccatggaagatgttcgccaggtcacctgaaaaatacaagaagcagtgcccagaaagtaaccaagctccaagtcagtctaccgaccagaaggatggtactttgcagcccaactctggagcgaacaggacagtaaaatggaagatggataatggtaggaccatgatcatcaccagttcagaatttactcctgaagacgcagcaaggatacccaagcgtcagaaaggaagaaataccttccgtggagcacgccagctaacccgacatctcataaagtacggtccgcccagacccgaagatgatat

SEQ ID NO: 42705 - DNA, 204 bp, Oryza sativa
  Clone ID: PAT_MRT4530_45930C.1
gttatatccaacacacgcggcgaggaccatggaggggaaggtcaaactcaaggggttcttacgtgccggatacgtaccaatctaaagacgagaatgcgcattcacaccaagcacaccgctgtggaagcctgcgaccttagagccgggtatacacttgattctataagaggtaataacacctgataagttctatagctagctggg

SEQ ID NO: 42706 - DNA, 2493 bp, Oryza sativa
  Clone ID: PAT_MRT4530_45931C.1
atggggccagataaatggaggagcgcgaccggcatcctctcccccctctcccacgacgaccacggtgacatcgacgagaaggcgctggggcagcagggggaggtctccgatgtgcaccctgagcccggcatcatcggcgggcggtggctcaagtactggacggaggccggcgcggtgctctcctccgtcgggttgttcgaagcgcagctgagcagcggcgcgttccagctcctcggcatggcggagctgggcctcctcccctccgtcttcgcccgccgcggccccggacgatccgccaccccgtgggtcgccgtcgccgcctccgccgccgtctcggtcgccgtctccttcctcggcttcgacgacgtcgtcgccaccgccaacctgctctacagcctcggcgcgctgctcgagttcgccgccttcctccggctccgcgcgagggaggagagcccctcctcgctcaagcgcccctaccgcgtcccgctgccgctccccgcgctcgccgccatgtgcctcgtgccgtcggcgttcctggcgtacgtggtcgccgtcgccgggtggagggtctccgccgtcgccgccgcgctcacggccctcggcgtcggctggcacggcgccatgagggtgtgcaggtccaggaagtggctcaggttcaacaccgcggttgccgccgaccatcgtctgcaactacaagatgctcctcctcctcctgctgtcatcctacaaaccaatagacaccgcgcgcgcggaacgccatcgctgccacatctcatggacgacgtgtggccgtggctggccggcctggccggcgaggagccgccgccgccgcaggccgttgtcgcccttgccgccttcgctgacggcaccacgtccattgtcctgcaggccgaccacgtcgcattggctgaaggtgatgaggaagagaagactctagtagatttctctctcgccttgaacagcaccaatggcggcgcagcgcgcgtgctgtggacgtcgggtcgatttgaggccgcctccggtgtcgcgttgcagcggcagctgctggcgaggctgctcgacgaggtgatcacgctctcgccgtccgtctcttgcttgagcggaaacctcggactcggagtcggcggcgcaccgaagtcgaagttggacgaggagatcgtcgccggcatcgggaatgattctgccgcctcattcttctcgctgactctccttctgcgcctcttctggctgtgcgccaccgaggcacccgccgacaccgggtttctcttcttccaagctctcggcgccgacatccagcgcgctctcgtggactgccgcccagcgctcgccctgttcctggcctccctcggcccggacgtcgaggagcggttcatgcggtcgctcggctacatgctcgccaagctgtgcttgctacgggagatgcaagcggatgcggatcagccggcgccggcggcgacacggcgcccgcgcgcgctccccgcggcgtgcctgtcgtacgccaccgaggtgcacgggctgtgggttctgagaggatacgcgccggtgctcgccatgccccgtgtcacctgcgcggcatcgacgacggcgcccatcacggcgctgccgcacgaggcgccggaggagccggcgctgaggtacggcctggtgcaccagcagctggaggtcgtggcgcagctggagtacgccgtgcgcgctcgccgcggcgagaggttcatgaccgtcgccgtgcgcgtcgacaacgtccgggtacgcgtcgcgcggctcgggttccggagggacgacgcggacgctgacgccgacggtggcgacgctcacgacgacgccatggacggcgagcgccatttcccgtcccgtctccgcctctgggtcggccctaggttcggcgcgtcgtacgcgaccggcccgagcctcggccggtcgacggggaacccggagcaggacgtcgagacgacgcgcaccgtcaagggcgccttcgccgccgccggcgccacgaagctagccaacggcggcgtccctccgaggatcaaggccaagacgcggtcgtcggcccgggcacgcaaccggagctggcggtgggagcaggaggcggagggcagcgccggcgtgttcgagggcgtgctgtgcgacccggccaccggcacggagatctcggcgtggcgcggcgacaacaacaacaacaatggcggcgccggtgacccgcgcaacgggatgcggcggcggtacggcgggccgggcagggcgttcagcaagatgcgggggctggtggtggccggcgacgagctgcccgaggaggtgacgtggagggtggggagggaggcggaggggagaacgctgccgtggcgcgtggggctcaaggcctggttgacctaccttcccaaccaggtgaggagccaccatttcgagacgaggtgcgtcgagtgggcacacgaggtcgacctcccgcttgccgccgttaatggcgacgagagggcatttgcaccgactttaagatag

SEQ ID NO: 42707 - DNA, 219 bp, Oryza sativa
  Clone ID: PAT_MRT4530_45932C.1
tgtggatttcttggaagacgtgttcatgggtgcataccaccaggtcgtcagactttgcacaacacgattgggttccccgagtgctggcttgaattgcttggctaaggccttcaggatcataccgacatatcacaggattgtgaatgttttttagccagcttgtttactccgtgagttgtaacctgggaatgtctaaaggtatatgcacttagtagtaca

SEQ ID NO: 42708 - DNA, 189 bp, Oryza sativa
  Clone ID: PAT_MRT4530_45933C.1
cataaaaaacgggtgtaacacaacactggcaagaggataaaatggatattcctaattggcctgatagaaaccgaggcccctcccatgggaatagaaatgggctaagggtcctttcttcaaattatgaaaagaaggggttcccccgtgtcactgacaaaaatctatcctgcggaggttacatcacctttg

SEQ ID NO: 42709 - DNA, 1689 bp, Oryza sativa
  Clone ID: PAT_MRT4530_45934C.1
atgggtggtggagcggctaggcggtggcggagcggcggctgctgctcccgcctctggctcgtgctcgtcgtgttcgccaccgtcacgatgctgctgcgccaccgctacgactccggcctcggccatggtgccgccgccgtggtgcgcatcgagccggtgcaccggaaggtgaagccagccgatcgcggcggcgccaggccgtcgttctccgattccggcagcgcgaagccggtcaccgtcgaccacaagtcggcgacgaccgattcttctaccggaacggagtctgacggtggaggcgagccatcgtcggcgtcatcttcgctgccggcggcggcgcacccgttctcgcgcgcgctcgcggcggcgggcgacaagggcgaccggtgcggcgggcggtacgtgtacgtgcaggagctgcctccgcggttcaacaccgacatggtcaagaactgcgtggctctgttcccgtggaaagacatgtgcaagttcacggcgaacggcggcttcggcccgccgatgagcggcggcggcggcatgttccaggagaccgggtggtacaactccgacaagtacacggtggacatcatcttccacgagcggatgaggcggtacgagtgcctcaccgacgacccctccctggccgccgccgtgtacgtgccgttcttcgccggcctcgaggtgtggcgccacctctgggggttcaacgccaccgcgcgggacgccatggcgctggaggtggtggacatcatcacgtcgcggcccgagtggcgcgccatgggaggccgcgaccacttcttcaccgccggcctcatcacgtgggacttccggaggctggccgacggcgacgccggctgggggagcaagctgttcagccttccggcgataaagaacatgacggcgctcgtggtggaggcgagcccgtggcacctcaacgacgccgccatcccgttcccgacggcgttccacccggcgagcgacgaggccgtgttcgtctggcaggacaaggtccgccgcctcgagcgcccatggctcttctccttcgccggcgcggcgcgcccgggcagcgccaagtcgatccgttccgagctcatcacgcagtgcagggcgtcgagcgcgtgctcactcatggagtgccgcgacgggccgagcaacaagtgcggctcggcggcgagctacatgagactcttccagagctccaccttctgcctccagccgcagggcgactcgtacacgcgcaagtcggcgttcgacgccatgctcgccggctgcatcccggtgttcttccaccccggcacggcgtacgtccagtacacctggcacctgcccaggaaccacgccgactactccgtctacatctccgaggacgacgtgcgccgcaacgccagcatcgaggagcggctgcggcggatcgcgccggccgccgtggagcggatgagggagacggtcatctcgctcatcccgacggtggtgtacgcgcagccgtcgtcgaggctggacacgatgaaggacgcgttcgacgtggcggtggacgccatcgtcgacaaggtgacgaggctgcggcgcgacatcgtcgacggccgcggcgaggaggagaagctggagatgtacagctggaagtatccattgctgcgagaagggcagaaggtcgaggacccccatgagtgggattcattgttcgcgttcgcctag

SEQ ID NO: 42710 - DNA, 147 bp, Oryza sativa
  unsure (1)..(147): unsure at all n locations
  Clone ID: PAT_MRT4530_45935C.1
gaaaagaaaagacctgattgaggagctatgctctaatgcaagtaactcatgatacttnccacctttggtttatnatgcagggaaaaccatgtaagtattccantccatcttgcaccgcccaaagcgtgtcctgcnttggaaacacca

SEQ ID NO: 42711 - DNA, 195 bp, Oryza sativa
  Clone ID: PAT_MRT4530_45936C.1
atggatactctgctgggctccgggagattcttggcgcggcggcccccgctcgcgctcgcccctcgctgctcgcgaggatccccggagaaaggcggcggcagcgacaaagatatgatctgcgtagtggatcactcaagccgggtaatccaagcacccgattcatttgatttgctgagacttgagctggatgtatag

SEQ ID NO: 42712 - DNA, 612 bp, Oryza sativa
  Clone ID: PAT_MRT4530_45937C.1
cccctataaccgattgcatgtcaagcccagaaattctcgaaccagaatttctaagcttgacggcagcgatgaaaccaacatcgacaaaatagctcccactaggaagatcttcagctctggggtgggggaaaagagagcaagactgagtattacccactgtactcagcaagtcataccgaaagaggaggtatgatgcaggatatatccaaaggaggctaaatgttcttttgcataaagcaggcatttaaaagcagaagttgaaagcagtaaaacaattgtagtaattaagcaatattaaccaatcactgtccaacgctacaccacgttgcaacaggcccaaccaaccacctgaacatgatactgcaaagggggaaaccgtgacaagaccctccgcataaccctcccctaaccatccacaccatgggtttcacccctacccctcaaaaggcagtgggcggtcccctcttgcaccgcggtgaatccgacagctggacaaccggacaccacagccgacccaactccatcacgcccaccctcgccaccggtgctctcgcttgtggtaagcacggtaagtctcccagggtttcccgtgaaccggtccttaattgccat

SEQ ID NO: 42713 - DNA, 2595 bp, Oryza sativa
  unsure (1)..(2595): unsure at all n locations
  Clone ID: PAT_MRT4530_45938C.1
atggggtgcgtgtgcgggagggcggctgcggtggatgatgggaggtgcggggcggcggcggaggcagcggtggcggcggggaagggtgtggggatgggggtggggatggtgaggagggagggggaggcgaggaaggtgcaggcgagggtgggggggagggaggaggcggcggagaggaggagggcggcggcggcggcgatggcgatggcggcgtgcagggtgaggagccccgtgccgagggcggtggagggggagcaggtggcggcggggtggccgccgtggctcgtctccgtcgccgcggaggccgtgcgcgggtgggtgcctcgccgcgccgagtcgttcgagaagctcgacaagattggtcagggaacatacagtaatgtttacagagctcgcgatcttgaaaaggagaagattgttgccctaaagaaagtgcggtttgataatttggaacctgagagtgtgaagttcatggccagggaaatccttattttgcgacggcttgatcatccaaatattattaagctggagggtctagtaacttcaagaatgtcttgtagcttatatcttgtttttgagtacatggaacatgacctagctggactagcttcttttcctggagtgaaatttactgagtctcaggttaaatgttacatgcagcagctactctgtggccttgagcattgtcatagtcgtcacattctgcaccgtgacattaagggttccaatcttttgattgacaaccgaggcattttgaagatagctgattttggcctagcaagtttctttgatcctgaacaacgtcaccctttgactagtcgtgtggtcacactttggtatagaccaccagaacttttgcttggtgccacaaattatggtgttgctgtagatctttggagttctggctgcattcttgctgagttatatgctggcaagcctatcatgcctggtagaactgaggttgagcagttacataaaatatttaaactctgtggttcaccatcagaggactattggaggaagtctaaacttcctcatgccacaatttttaagccacagcatccatatgctaggcgtgtatcagaaacatttaaagattttcctccgcctgctgtggcgttagtggatgttcttctttcagttgatccagcagatcgaggaacagcatcttctgcattgcaaagtgagttttttgcaacaaaaccatatgcttgcaatccttcaagtctgccgagatatcccccaagcaaagagtttgatgcaaaacggcgagaggaggaagctcggaggcaaggtattgctggaggaaagcaacacaagtatgatcctgaaagacggactagagagtcgagagcagttcctgcacctgacgcaaatgcagaattagtgtcatctttgcaggttgatgagaaaagacaaaaccaagtcaatgccaagagcaggagtgagatgttcaatcccagcaaggaagactctgcatctggctttccgattgagccacccaggccaactcatcctgctgaatcgtctcaagactctcaacgtgtctacacaagaacattccattctgggcctctagttaatcaaaataaaccttcaaaggctggacggagtgaaaatggcgatattcatctttctggtgttgcaaacgcatcggacttccgtgtggttgtatcaacaagatcaaatattcgttcagataatggcaatggaacagtggttactcaagccgaagcctttccgcatgaacggaggctgtctgaatctataaatgagcgtttcagtagtagtggaaagtatgatcaagtatttcagcagaaagatgacaggagtagcagggtggatggagctattggctatggatcaaagggtaacaagatccaccattctgggcctctaatttgcccttcaggcaatgtcgatcagatgctgaaggaaaatgaccgccaaattcaagaagtcttccgccgaacccgggttgagaagtcaagagcaaggagaggccatgggcactccggggatgggcatcatcagtttggcctaagacccagtgactttggcgctgccccggtcttcccttcaagccgctccagctatcgagctatgcagcagtaaggccaatgcttagcaagtaatttcgtatcgacgtgattttgcaagagaagttttattggcttcctttcccccatatttccgggggatatatatcacgttatgtacaggaaagtctagctgtgaaatgccttttaattgggaaaaaaaactttgaaggagagggaagaaggccatttgttaatttagcggcaatttgggtgttctacagatgtcattatcatgaggctggcaattctccatgttctggtttcagtttgctgaaatgctagctcaattgtatatttcagattgctaggtatgctgtgtgaattagatctacgaagttttgggcatgcttggttccttgtttttgtatagtgtaccccacgctagtgggtcgtacgccctacatgtggccaagttattgagaaatcttgcttactccttgctaagacatgctgtgcaatgagaccaaacatgacnnccaacctgttttaaagg

SEQ ID NO: 42714 - DNA, 540 bp, Oryza sativa
  Clone ID: PAT_MRT4530_45939C.1
cacaaaaatgaccggagcgccccaaggcgaagtgctcggtcgagggctcttaggtttttccatttggcttgtcctacggtcaaggtcggctctgataccaacttgtcacgcccagaaatttactaaccagaatttctaagcttgacggcaacgacgaaaccaacttcaacaagacagctccaactaggaagatcttcagctctggtgtgggggaaaagagagcaagactgagtactacccactgtactcagcaagtcataccggaagaggagatatgatgcaggatataaccaaaggaggctaggggttcatttgcataaagcagccatttaaaaatagtagttgaaaacattaaaacaattgtagtaattaatcaatattaaccaatcactgtccaacgctacaccacgttgcaacaggcccaaccaacacctgaacatgatactgcaaagggggaaatcgtgacaagaccctccgcataaccctcccctaaccatccacaccacgctaatgtttcacccccacccctcaaaagccagt

SEQ ID NO: 42715 - DNA, 355 bp, Oryza sativa
  Clone ID: PAT_MRT4530_4593C.1
gcagctttaggcgcagagacagcacccgcaaacgtgcgcccgagtatacactcccctcctgcccttccattcactctgaggaggccaggccaagcctcccctgccatacacgatcatactacgcagggccgcggtggcaggcagaaaaaaggggtggaaatttccactattcaatccaccgcgggggagggcgtgtcccggtgcgggagccaggcccaaactggacggtaaaccccgggggcttggtagttctccagaaaaagaggaaggggaaaaggcatgaactagggttcgaggatggcatataactaatacacatggcatttaaagggggggggccggatcccaaattaat

SEQ ID NO: 42716 - DNA, 542 bp, Oryza sativa
  Clone ID: PAT_MRT4530_45940C.1
gataaatggcttgaaatgcccgagtaccatgatagctaccgtaagaccttcaaggaagaaagagaagaagaccaagtaggagtttgaggaggagatggaagacgccgtagaggctgccatagagcatcgagttcaaagaagaagaccaagggtaggagcataagccaagcaagcagggccaagaatgagggaggaagaagttttgaaagccaaaaggccgttcctggagcaacacaaggaaaacgatgggaggcctgacatagaaacatgcgggtcagcgaggagattgagctgccacaaggccttgcagcggttcgccaaagagtaggcagtgacatatggagcacagaattttctttttatttttgtttgctgcaaacctcatatttatcactagtgtgcattgtatcgtgtagctggcaaatgtcatatctgcttccttgtgaaccataggcttttgcacatgaggcaatggtgcacagaagtaagcacccaattcctctcgcttctgaatcttttgtgaaaaaaaaaaaaaaaaaaaa

SEQ ID NO: 42717 - DNA, 828 bp, Oryza sativa
  Clone ID: PAT_MRT4530_45941C.1
tacaggggaggaagagaacacacagaaacggaggaacacacacagacagaacacacaccattttggctggagaattgcatgcacaacacggcgaggaggcgagtttctgatgctgctcggcccgccggatatagcgtcctctccgcctgtcggacgcaccgccggccggagatcgcgtcactccctctcatcggagacgtcggtcgccgtgatttgtcttggatgtttgatgtcacgcccagaaattcacgaaccagaatttctaagcttgacggcagcgacgaaaccaacttcgacaaaacagctcccactaggaagatcttcagctctggtgtggagaaaaagagagcaagactgagtactacccattgtactcagcaagtcataccggaagaggaggtatgatgcaggatataaccaaaggaggctaaaggttcttttgcataaagctagcatttaaaagcagaagttgaaagcacgtaaaacacttgtagtaattaatcaatattaaccaatcactgtccaacgctacaccacgttgcaacaggctcaaccaaccacctgtacatgatactgcaaagggggaaatcgtgacaagaccctccgcataaccctcccctgacatccacaccacgctaaggtttcacccccacccctcaaaaggcaatgggcggtcccctcttgcgccgtggtgaatccggcagctggacaaccggacaccccggccgacccaactccatcacgcccaccctcaccaccggtgctcccgcttatggtaagcacggtaagtctcccagggtttcccgtgaaccggtccttaattgccat

SEQ ID NO: 42718 - DNA, 794 bp, Oryza sativa
  Clone ID: PAT_MRT4530_45942C.1
atggcaattaaggaccggttcatgagaaaccctaggagacttaccatgcttaccacaagcgggagcaccggtggcgagggtgggcgtgatggagttgggtcggccagggtgtccggttgtccagctgtcggattcactgtggcgcaagaggggaccgcccactgccttttgaggggtgggggtgaaaccttagcatggtgtggatggttaggggagggttatgcggagggtcttgtcacgatttccccctttgcagtatcatgttcaggtggttggttgggcctgttgcaacgtggtgtagcgttggacagtgattggttaatattgcttaatctactgcaattgtttttactactttcaactactgtttttaaatgcctgctatattgcaaatgaacccctagcctcctttggttatatcctgcatcatacctcctcttccggtatgacttgctgagtacagtgggtagtactcagtcttgctttcttttctcccacaccagagcagaagttctttccagttggaggtgtcttagaaaggttgttttcgtcgctgccgtcaagcttagaaattctggttcgtgaatttctgggcgtgacacgtctcggctcgggccagccgccggccctccttctctccggcagctccagcgccggcggcggaggtggagctgtaccgccgcggcagccgcaccaggcacccgaacatcccaccgccgccgtcgcctcgctgcacgatacgcgacagcagcgattagacgtgtcttttaaaaaaactaagttaaccttcttta

SEQ ID NO: 42719 - DNA, 597 bp, Oryza sativa
  Clone ID: PAT_MRT4530_45943C.1
atggcaattaaggaccggttcacgggaaaccctgggagacttaccgtgcttaccacaagcgggagcaccggtggcgagggtgggcatgatggagttgggtcggcgggggtgtccggttgtccagctgccggattcaccgcggcgcaagacgggaccgcccactgccttttgaggggtgggggtgaaaccttagcgtggtgtggatggttaggggagggttatgcagagggtcttgtcacgattaccccctttgcagtatcatgtttaagtggttggttgggcctgttgcagcgtggtgtagcgttggacaatgattggttaatattaattaattactacaattgttttactgctttcaactactgcttttaaatgcctgctttatgcaaatgaacccttagcctcctttggatatatcctgcatcatacctcctcttctggtatgacttgctgagtacagtggatagtactcagccttgctctcttttcccccacaccagagctgaagatcttcctagttggagctgtcttattgaggttggtttcgtcgctgccgtcaagcttagaaatcctggttcgtgaatttctgggcgtgac

SEQ ID NO: 42720 - DNA, 618 bp, Oryza sativa
  Clone ID: PAT_MRT4530_45944C.1
atggcaattaaggaccggttcacgggaaaccctgggagacttaccgtgcttaccacaagcgggagcaccggtggcgagggtgggcgtgatggagttgggtcagccggggtgtccggttgtccagctgccggattcaccgcggcgcaagaggggaccacccactgccttttgaggggtgagggtgaaaccttagcgtggtgtggatggttaggggagggttatgcggagggtcttgtcacgatttctctcctttgcagtatcatgttcaggtggttggttgggcctattgcaacgtggtgtagcgttggacagtgattggttaatactgcttaattactacaattgttttactgctttcaactacttcttttaaatgactactttattgcaaaggaaccccttagcctcctttggatatatcctgcatcatacctcctcttccggtatgacttgctgagtacagtgggtagtactcagtcttgctctcttttcccccacaccagagctgaagatcttcatagttggagccgtcttgttgaggttggtttcgtcgctgccgtcaagcttagaaattctggttcgtgaatttctgggcgtgataagttggtatcagagccg

SEQ ID NO: 42721 - DNA, 153 bp, Oryza sativa
  Clone ID: PAT_MRT4530_45945C.1
atggaggtcgcgcaggtgcaggtatatagcgctcgactgcacaaaggcggtagtggcacggtggtgacgcgcacagtggaggtgctagatagacgtggaggggacgggctggggagcaaggggatgatggcgccatggcagcacgagacatag

SEQ ID NO: 42722 - DNA, 414 bp, Oryza sativa
  unsure (1)..(414): unsure at all n locations
  Clone ID: PAT_MRT4530_45946C.1
cccacgcgtncgcccacgcgtccgcccacgcgtcccgccacgcgtccgcgcgccggttcttcgtcttcatcggcggcggccgggccaggagccccattattgggatgggttctggcaaggaaggaaatggggccccaacgaagaagacaacccttcatgatctttatgatcttcaagggcaagccccgggggaccaccacctttggcggtccggtaccgatttggtggcccttattgggagggggggtccgggaagtaccaagcacccattaatttttcaaaaaggccttttgaatttcaatggcttccaaggaccagttaaggcagttattttaagctggaagggccgcaaaaagcgctattgggaacctggtattaaaggttttccaaaaggcgggcaaccttttggagcct

SEQ ID NO: 42723 - DNA, 669 bp, Oryza sativa
  Clone ID: PAT_MRT4530_45947C.1
atgtgggccccacaagccattttccctctcttcaattctctctcccttctcatctactgcgacggtggcacgggtgaggaggggcggtggcggggcggagcagaggggctccgggcggagccctcacgacggccacgccctctccggcggggcgtcggcggtggcggcctcctccggcgaggtggctgcagcacagagtgtgtcggttttgatggcctttggctctcaggccataacgacgtacttgctgggaaaaccgcaacagcagttggtggagaggatgaaatcgcagtgaacagcagattggttggctcgcggggcccttcgccgtcgccgtcgacctcctcgcgccgctcttcaccgctgcggcatagacctgccaacgccgtggtgttcgacggcgtcctcccgtgggctgccaccgcggcggctgggctccgcatcccgcggtacgcgttcacggggatggggtgcttcgcgctctcggtgcagcgagcactgctgcgccacccccctcgggtccgccccgcgtcggacgacgagccgttcctcgtgcctggactccccgacgtggtgcggctcttccgcccacagccgccagagccttgcctccgccgccgcgagccgctgtctctccgtcgcgagagaggagaggggagagagagttga

SEQ ID NO: 42724 - DNA, 733 bp, Oryza sativa
  Clone ID: PAT_MRT4530_45948C.1
atggcaattaaggaccggttcacgggaaaccctgggagacttaccgtgcttaccacaagtgggagcaccggtggcgagggtgggcatgatggagttgggtcggccggggtgtccggttgtccagttgccggattcaccacggcacaagaggggaccgcccactgcctttttaggggtgggggtgaaaccttagcatggtgtggatggttaggggagggttatgcggagggtcttgtcacgatttccccctttgcagtattatgttcaagtggttggttgggcctgttgcaacgtggtgtagcgttggacagtgattggttaatattgattaattactacaactgttttactgctttcaacttctgcttttaaatgctagctttgtgcaaatgaacccctagcctcctttggttatatcctacatcatacctcctcttccggtaagtcttgctgagtacagtgggtagtactcagccttgctctcttttcccccacaccagagttgaagttctttccagttggagctgtatcgaagaagttgatctcatcgctgccgtcaagcttagaaattctggttcgtgaatttctgggcgtgacaagttggtatcagagccgacccatgtgccagcgatgcatctgacaacagtccatctccaccgcccgagaacggggatcctctagagtcgacctgcaggcatgcaagcttgagtattctatagtgtcacctaaatag

SEQ ID NO: 42725 - DNA, 608 bp, Oryza sativa
  Clone ID: PAT_MRT4530_45949C.1
atggcaattaaggaccagttcacgggaaaccctgggagacttaccgtgcttaccacaagcgggagcaccggtggcgagggtgggcgtgatagagttgggtcggccggggtgtccggttgtccagctgccagattcatcgcggcgcaagaggggaccgcccactgcctttttaggagtgggggtgaaaccttagcatggtgtggatggttaggggagggttatgcggagggtcttgtcacaatttcccactttgcagtatcatgttcaggtggttggttgggcctgttgcaacgtggagtagcgttggacagtaattggttaatattgattaattactacaattgttttattgctttcaactattgtttttaaatatctgctttattgcaaatgaacccttagcctcctttggttacatcctgcatcatacctcctcttccggtatgacttgctgagtacagtgggtagtactcagtcttgctctcttttcccccacaccagagttgaagttcttctcagttggagatgtctcgaagaagttggtttcgtcgccgccgtcaagcttagaaattctggttcatgaatttctgggcgtgacacatatcctc

SEQ ID NO: 42726 - DNA, 225 bp, Oryza sativa
  Clone ID: PAT_MRT4530_4594C.1
atggtagacggcgaagtgaactcgatgcagccgtcgatgagctccacgtcgttgccgtcgcggtcgccgccgccaccgcgcttggctttcaagctgtactcaagtagcacgccgtcaattatggatgttcctcgtgcaggagagatcaaaggcagtgtgctcggcgaggtcaaaaccggcgccgccgccgtggcaagcctcctcggccgccaccgccatggttag

SEQ ID NO: 42727 - DNA, 618 bp, Oryza sativa
  Clone ID: PAT_MRT4530_45950C.1
atgagtactaacgccgtcatccgtcgaggtctcaagaaaaccaggagtccaggacatggttttcacccagcagccccactaaagggagaggaacgactcattaatgcccccaagaggaagaacaacgcccgaagcaccattgtttctcctatcgatctgaagctatcgctccatttctccaccaccggtcattctctgtcagtgtatggacatcgtcgtgccaacgcctcctgccggcaaacctctacatgcctttgtggaatacccgctgtcatcagcctccctatcgtcgccacaccggccgtcttaccatcgccgtcgcccacactgacctcccgacgccacccacgccggtcttccacaaccatcatcgtctctgacaagccccctgccaccactgtctatgtaccgtgccgctcgaccagatccgtcgtaggggctcccgtgggctccaccatcgtcatcgtccatgcacaaatgtgcccgtcagcaccatcgccgtcttctccaatgccgatgctccctgtcgtcactgtcgctgtcgctgaggttcgccacatggggaagggggactacctcccttgttggagaggccaagtcttgacggaggggcgctga

SEQ ID NO: 42728 - DNA, 257 bp, Oryza sativa
  Clone ID: PAT_MRT4530_45951C.1
gtgtgggtgtgtgaggtgaggggggaaagggcgaaggaaggaggaggaaagcggcgtcggatcgtacggacgcgcgcgcccgcgcccgcgccgcgcagcgatgctgtcgcgctctcactcgcacccggccgtgcgttggcgttctgtccttgtctcccgtgtctgctttcgatgcgcttctttgggggggggagtccatctcccctttccacctcacccccttcttccctctctctctcctctctctctctatcacc

SEQ ID NO: 42729 - DNA, 562 bp, Oryza sativa
  Clone ID: PAT_MRT4530_45952C.1
atggcaattaaggaccgcttcacgggaaaccctgggagacttaccgtgcttaccacaagcgggagcacgggtggcgagggtgggcgtgatggagttgggttggccggtttgtccggttgtccagctaccggattcactgcggcgcaagaggggaccgcccactgttttttgaggagtgggggtgaaaccttagcgtggtgtggatggttaggggagggttatgtggagggtcttgtcacgatttccccctttgcagtatcatgttcaggtggttggttgggcctgttgcaacgtggtgtagcgttggacagtgattggttaatattgattaattactacaattgttttactactttcaactactgcttttaaatgcctgccttatgcaaatgaacctttagcctcctttgcttatatcctgcatcatacctcctcttccagtatgacttgctgagtacagtgggtagtactcagtcttgctctctttttccccacaccagagttgaagttcttcccagttggagctgtctcagaaagtttggttttgtcgctgccgtgaagg

SEQ ID NO: 42730 - DNA, 777 bp, Oryza sativa
  Clone ID: PAT_MRT4530_45953C.1
gcacgaggtttctatctccgctcgcttcacccttctcagatcgatcaggaagcagcaagcaaatccatcatccatggcactccgcgcgctcgacaacacgctgccgatggcgtcggcggagcggcccaagaagttgcccaagctgtccgccgccgccgccgccgtcgtcccggcggcctcacccgaggggaagaggaagaagaacgacgagaactcggcgcccaaggccacaacggagcaggcggtggagtacgtccgctccgaggatctccagccggtgccccaccccaaggccaaggcggcggggttggtggcggagcttgactccaaggactggatccgggcgtgcgacgcgctcaacgacgcgcgccgcctcgcgatccaccacccctccctcctcaaccccatccttggcaaggtgatgctggcgatcgtgaagacgatgaagagcccgcgcagcgcggtgtgcaagacctccatcatggcgtgcaccgacgtgttcgactccttcggcaacctcctctcctccgcctccgacgacgccttcgacaagctgctgcttcagctgctgctgaaggcgtcgcaggacaagcggttcgtggcggaggaggcggagaaggcgatgcgggcgatggcggcgtcgatgcctccccttccgctcctcaggaagctcaaggcgtacgtccaccacgccaacctcagggtgagggccaaggccgccgtcgccatgtcgcagtgcgcgtcgaggatggacgtcgcgacgatgaaggagttcgg

SEQ ID NO: 42731 - DNA, 419 bp, Oryza sativa
  Clone ID: PAT_MRT4530_45954C.1
ttgttttttttaatttcatggtcttttatttgttttttcttattgccttatcttttttgtatcaaaaatattctcacaatgtcgtggagcttgattgattatattgaatggggatatgaactctctttgagaactctggatccctttcgttaaaggtccctggggcccttgaaatccttgttttcgatcactgctccatccgggattttccagtttgcccccaggctgggccttggatggtcaccctggccttcaatgggatgcttgaggccaacccaacatgaccggaaacctttaagggggccagccccacaatgctgaaaattgacttggagggacccaggggaccacccgccctttttgaactttggacccagttcaattgagggatccgttggttttgtcctggccgggttgcc

SEQ ID NO: 42732 - DNA, 612 bp, Oryza sativa
  Clone ID: PAT_MRT4530_45955C.1
atgacagttaaggaccggttcacgggaaaccctgggagacttaccgtgcttaccacaagcgggagcaccggtggcgagggtgggcgtgatggagttgggtcggccggggtgtccggttgtccagctgctggattcaccgcggcgcaagaggggaccgcccactgccttttgaggggtgggggtgaaaccttagcgtggtgtggatggttaggggagggtcttgtcacgatttccccctttgcagtatcatgttcaggtggttggttgggcttgttgcaacgtggtgtagcgttggacagtgattggttaatattgattaattactacagctgttttactgctttcaactactgcttttaaatgctagctttgtgcaaaagaacccctagccttctttggttatatcctacatcatacctcctcttccggtatgacttgctgagtacagtgggtagtactcagtcttgctctcttttcccccacaccagagctgaaggtctttctagttggagctgtcttgttgaagttggttttgtcgctgccgtcaagcttcgaaattctggttcgtgaatttctgggcgtgacaagttggtatcagagccgaccttgacc

SEQ ID NO: 42733 - DNA, 597 bp, Oryza sativa
  Clone ID: PAT_MRT4530_45956C.1
atggcttcttccccttcctcttccttctcctcctccccttccgctgccggtgctgcgccggcgtcctcctcctactggtgctacaattgcgaccccttcgtgcgtgccgcccctcacaaagactccgctgtcgcttacccgaattacgccggcggcatcctcgaggagatgggtgcacccccaccgtgcacggcttacttccgccaccgggcggcagccgatgaccgctcgccgttcaaccccgtcatcgtgctttgccgctcccccgctgccgtagctgccggcgacgatgactccctcgccacggttactagcttcgagctcttctacgacgacggcgtgggctccggcctccgcccgctcccggagaccatgtcggacttcctcatgggctccgccttcgagcgtctcctcgaccagctcacccagatcgaagccggcggcctctcccgcgcaagggagaacccgccggcctccaaggcctccatctccatgccgcggggccgcccactcgcccagttcaatcgccggagaggagacagaaaaagtgacgggagtggcatggttttaattttagaaatttcgagtgacatgtag

SEQ ID NO: 42734 - DNA, 630 bp, Oryza sativa
  Clone ID: PAT_MRT4530_45957C.1
atggcttcttccccttcctcttccttctcctcctccccttccgctgccggtgctgcgccggcgtcctcctcctactggtgctacaattgcgaccccttcgtgcgtgccgcccctcacaaagactccgctgtcgcctacccgaactacggcggcggcatcctcgaggagatgggtgcacccccaccgtgcaccgcctacctccgccacccgtgcgcgcaccacgccaaagacctgcgcctgcgacggacatgctgcgctgacgcagtggcggcagccgatgaccgctcgccgttcaaccccgtcatcgtgctttgccgctcccccgctgccgtagctgccggcgacgatgactccctcgccacggttactagcttcgagctcttctacgacgacggcgtgggctccggcctccgcccgctcccggagaccatgtcggacttcctcatgggctccgccttcgagcgtctcctcgaccagctcacccagatcgaagccggcggcctctcccgcgcaagggagaacccgccggcctccaaggcctccatctccatgccgcggggccgcccactcgcccagtgcaactgcaccgccattacacgagtctctgaatcgacgatgttggtgccccat

SEQ ID NO: 42735 - DNA, 243 bp, Oryza sativa
  Clone ID: PAT_MRT4530_45958C.1
atggcggcccggtggtatgtggtggacacaggtgagcaacgaggtgtcagcggtggcatggaagccacggggatggaggagagtggtgggccgggaggcaccgaagacagggaagcaggcggggtgggaggacctcgccaccgtcagcttggggaagggggaggtgatggaggaggccagccaaggggcctcgtcggcgtcgttaatgccgcccggccaactggtgagaccgagcggtggtga

SEQ ID NO: 42736 - DNA, 261 bp, Oryza sativa
  Clone ID: PAT_MRT4530_45959C.1
ttatctttgtcggtgatatgggaccgggagtatcgtgaccagaggcttgaggcagacacaatcgcccacgtggcccggcaccctcggggacgtcgggcccgagggtgaggtgtccgccctcctcttgatttccccgaggggggtcgggttactcctgccccggccccgacggccgaggcaccccgacgccctgagcccccggccgaaccggcaaaggggggcctgcgcggtctcccggtgaggggccacgagctccgtcat

SEQ ID NO: 42737 - DNA, 642 bp, Oryza sativa
  Clone ID: PAT_MRT4530_4595C.1
atgttaggagccgcggcaaggccaccagccacaaatgcaagtccaggtgctagcccagaacctgaatcagagtcagagtcaggagttcccagtatcggcaccgaagacccctgtcaaaatgctgtccagatccccgaagataacttcagccaagccaccgtcaaaccaaagagaagtcattatgtaaggaactgcccatggaaggtgttcgccaggtcacttgaaaaggacgagaagcagtgcccaggaagtaaccaagctccaagtcagcctaccgacaagaaggatggtactttgcagcccaactctggagcgaacaggacagtaatatggaagatggataatggttggaccatgatcatcactagttcagaatttactcctgaagatgccgcaaggatacccaagcgtcagagacgaaaaaataccttccgtggagcgcgtcagctaacccggcaccttataaagtacggtccgcccagacccgaagatgatgaatcaggagaacggttctctgctgatgacgatgacgatgatgatgatgacgacaatgatgcgacccttgatagtttcagggaaagagagttgaagttcaaagcatgtactagatgtggggtagtcggacacactgatagtttatga

SEQ ID NO: 42738 - DNA, 357 bp, Oryza sativa
  unsure (1)..(357): unsure at all n locations
  Clone ID: PAT_MRT4530_45960C.1
gntngctgggctcaccgnttanaaccgagntgtgactccnntggtggagagnctgaagntgngccgcgtcagagcggnggcggaggtggntnntacanagtaccnnngtcttgtnaggcgccntcgntaccttaccaacanaagnccgntcttcaccttttccgtcggntangtcagtngnnntatgcagcgaccgacgacggagnaccagcagnccttgacagaggatcatncattacgntncggggactgtngnccacggtttttangtacccganggnnngctcgcaagggacactttgacggntacagnnccantcnacaaggntntggtattcaaancngcangnntacgag

SEQ ID NO: 42739 - DNA, 801 bp, Oryza sativa
  Clone ID: PAT_MRT4530_45961C.1
atgcggtggcgtgtggcggggagtctcgaggaggtgcagcagcgagtgaggtggtccggcgatggaggcgcggcagcggcggcgctggtccagcggtggactgcggcggcagcgaggattcaactgcaggttgagaccactgacaatacggaaggggtaaactccacgccatgggcgcagcctaagcggtttatccaaaagcccgcacgatttgtctcaccggtggttgtgggtaacccacaaccgacaactcgcatttctgccagcatacagctcagggaattcatgttgaaaaacgtggatcgtctcaaaagcgttaaacttttggagattgactcctcggtggcatatgcttccgatgtggttgagtcattttgtaacgggaacttgaccgaggggctcttcatagacgcttccagctctatgcttttcaaggatgatatgacgatcaaaccagacacctttggaaaaagaatattcatcccaacaaatttattgtacctattgaacatcaacttaataaagcataacggtgtcacacaaccgttctcagccgatgctttggatagtagattagaagaattcatccggcagataaacacatccaatgctcagctggcttacgacggcagcagggatcccatcgagaccctcaacatcccgaccaactcgacgattgtcccctcaagcatcctgttccagcttgtatccagcgatcacaacttagctgatccacgccatcctgagatggcggcgtttctcggtccttctgttggtgacgcctccgaacaagcttcatga

SEQ ID NO: 42740 - DNA, 4401 bp, Oryza sativa
  Clone ID: PAT_MRT4530_45962C.1
atggcatccaaagtccgctttactgtgggttctaatgtttgggttgaggatgctgatgtggcttggattgatgggctggtggagcaggtcactggggatgaactaattataaggtgcacttctgggaagaaggttactgcaaatgtatcaagtgtctatcccaaggacgcagaagcaaagcgctgtggtgtcgaggatatgacgagactagcttatctacacgaaccaggagttctccataacctaaagtctagatatgggatgaatgagatatatacatatacaggcaacatattaatagctgtgaatccatttcaaagacttcctcatctgtataacaatcatatgatggaaatttacaaaggagcaggatttggtgagctgagcccccatccctttgccattgcagaccgtgcatataggtatatgatgaattatggtgtcagccaagccatattagtgagtggtgaaagtggtgctggtaaaacagaaagcactaaaatgcttatgcaatatcttgcttttatgggtggcaaagttcaatcgggtggacggtcagtgcaacaacaagtgctggagtccaatcccgttcttgaggcatttggaaatgcaaaaacagtcaggaataataattcaagctatatgtcttcacacatttcctttgtctcacaatgcagtcgctttggtaaatttgttgagattcaatttgatcagagtgggaaaatctcaggggctgccataaggacttatcttttggaaagatctcgtgtttgccaaatatctgatccagagagaaattatcattgcttttacatgctatgttctgcaccagcggaggaacgtgaaaggtataagttaggagatcctgcatcatttcactatctcaaccagtctaattgcattaagcttgatgggatggatgactcttcagaatatattgcaactagaagagcaatggatatagtgggcatcagttctgatgaacaggacgcaatattcagagttgttgctgcaatccttcatttgggcaatgtagaatttgtggaaggaagtgaagcagattcttctgtacccaaagatgataaatccaagtttcatcttcggacagcttctgaacttttcatgtgtgatgaggaggctcttgaggaatctttgtgtaagcgtgtaatagcaacacgtggtgaaagtatagtaaaaaatttagatgcccgggcagcagctcttagtagagatgcattggccagaattgtctactcacggttgtttgattggcttgtaaataagatcaatacttcaatagggcaagatcctagttcaaagcttctgataggtgtgctggatatatatggttttgaaagtttcaagacaaacagttttgagcagttttgtatcaacttaactaacgagaagctccagcagcactttaatcagcatgtgtttaaaatggagcaagaggaatatacaaaggaagaaattgactggagttacatccaatttgtggacaatcaggagattcttgatctcattgagaagaaaccaggggggataattgctctactcgatgagacttgcatgttgcgaaattcaacccatgaaacatttgctgagaagctatatcaacaatttaagggcaaccaacacttcagtaggccaaaattttcacgttctgatttcactattcatcactatgccggacatgttacttatcaaacagatttgtttttagataagaacatagactatgctgtaaatgagcatcaagttctgttacatgcttctagatgttcattcgtttcaagtctttttccaccttctgaagaatcaactaaatctacaaaattcacatccataggttcaagctttaagcaacaactgcaagctttgttggaaactttgagttcagtagaaccacattacattcgctgtataaagccaaataatgttctcaagccagcaatttttgagaacagcaatgttctccagcaacttcgatgtggaggagtgctagaggcaataagaataagctgcctagggtacccaacaagaagaacatttgatgagtttgttgatcgttttggtgttttgctacctgaagttcttgatgaaagttatgatgaagttactgctacagaaatgcttcttgagaaagtcaatctcacaggctatcagatagggaaaacgaaagtgtttctgcgtgctggtcagatggctgagctagatgctcgaaggactgaggtcttgagcagttctgctagcaaaatccagagaaaagttcgatcatacttggctcacaaacacttcattcagttgcgattatctgctactcagcttcaggcagtatgcagaggacaaattgcaagacattattatgaagacctccgtaggaaggctgcgaccttgacaattcagacctattaccgtatgcattttgcaaggaaaaattatagagatctctgttctgcatcaactactgtccaatctggtctacgtggcatggcggctcgcaaggaactccagtaccgtcagcagacaaaagctgcagtgattattcagagttactgtcgcagttatttagcacactcacagtacatgggcttgaagaaagcagcgatcacaacccaatgtgcttggagagggaggttggccagaagagaacttcgaaaacttaaaatggctgcaaaagaaactggtgctctgcaagctgctaagaataaattagagaaacaagttgaagagctaacttggcggcttcagctggagaaacgcatgagggttgacatggaagaagccaagtcacaagaaaataagaagctgcaacagaaattgcaggaacttgaattgcagtccaatgaaacaaaagatttgttaaaaagggaacaagaaactgctaaagcagcatgggagaaagctgccttagtaccagaggtccaggttgatacaactcttgttaatgagctcacagctgaaaacgagaagctcaagacacttgtggcttctctcgagacaaaaattgatgaaacggaacagaggtttgatgaagtgaagaaagctagagaagagttgctgaagaaagccacagatgcagagtcaaagataaatggactaacgaacacaatgctaagtcttcaagaaaaactaacaaacatggaactggaaaatcaagttctccggcagcaggcactgtttcgttctcctgtgagaacaatacctgaaaacacgtctccaaaagctacacctcatggtacacctccagcttctaaagaatatgggaagttcgcacagccaagaccatccttttttgagaggcagcatgagagtgttgatgcactgataaactgtgttactgaaaacattggcttcagtgaaggaaaaccaattgctgcaataaccatatataaatgtctggttcattggaagatctttgaaacagagaaaacatctgtttttgatcggcttattcaaatttttggttctgcgatgcagaaacacgatagcaatgaggatcttgcatactggttatcaacttcatcaactttattgattatgttgcaaaagagcctaaaagctgctggctcatctggaggaactccacggaaaaaaccacagactcagtcatcattcctagggaggatggtgttccgctcgtcaaacatcactgttgatatggaccttgtgcgccaaattgaggccaagtatcctgcttttctttttaagcagcagcttacagcttttgtcgaaggattatatggaatgatccgtgacaatgtgaagaaagaactatcttcactactctcacatgctattcaggtcccaagaatcatgaaagccagtatggtcccggcaatttttatgaggaagatatttacccaaattttctcattcatcaatgcccaactttttaatagccttcttgtacgccatgagtgctgctctttcagcaatggagagtatgtgaaacaaggattagcacaaatggaggtgtggtgtggagaagtcaaaccagagtacgtaggatctgcattggatgaactcaagcacataaggcaagctgttggtttcttggtcatatttaaaaaattcaggatttcatatgatgagattgtcaatgatctgtgcccagtactaagtgtccagcagctgtacaaaatatgcacacagtactgggatgacaaatacaacacagagagtgtatctgaagaggtacttgatgaaatgaggacgctgataacgaaggaatcaggccaagatagttcagagaatacctttttattggatgatgaaataagcatgcccatatcacttgaggagattggggattctatggattctaaagaatttcagcacatagccccaccaccagaacttgttgcaatccccgcattccaattcttgaagagctga

SEQ ID NO: 42741 - DNA, 497 bp, Oryza sativa
  Clone ID: PAT_MRT4530_45963C.1
ctatgcctctttttttttttttgcccttttttttttttttttggtactaatactatttctctttattcttgggaaaaacaaatgaaatatgttaaaaatacaaagcctgagtacacgtcaccatttgagccgcaaaatttgattagcaaaaggtcgaatgcaatctctacatacactgcccacataaatacctgctattaacatcagacaaaatttccatctccaaaacaggaattccttccgcctatccagcttcaaggtcacccagcatctataagctaatggcaagctccgtcagcattgttctgcagtacgcactatgccgtgcctgcttttggttacagacttaccctacacactggccggatcgatctcggcatcaaattgagaagccaaaatcagccctttactcggcgcagcatttcgatgttcgaaatgctccaaggtcgtatcttttactcatgcatgtccacagactagagtctcaggatggttcg

SEQ ID NO: 42742 - DNA, 342 bp, Oryza sativa
  Clone ID: PAT_MRT4530_45964C.1
atgtgccgccgcggtggcgtcagacgaccggaggagggagaccccaacgccaacgtacgctgcctggctgcctctgtgtgcgcgatgagttgggagacgttgcgttacgacggccatgtgacggcgcggccccccgcccgcgcgcgcaccaaccgcgctacgctacagcggaatcgctggaggtacaggaaagcccagacaaagctctcgtctcgtccaggtgttagtgtgttacaacagggtaatggaccggacgaatggcgatgttacgtgacagcatcaattctgcagtggcatattgctgattcaatttcatccgtcaccgattacagtccgttttga

SEQ ID NO: 42743 - DNA, 357 bp, Oryza sativa
  Clone ID: PAT_MRT4530_45965C.1
tgacgtatgctgccggcggtcggctggtagcctcctgtgcggccgccctcctttttttttttttttgttcagacttattgccactggggggggctcaaaatgaacccgggggcttgatactgggagatatagcctgattatctttctcacgactattggagggcatgcgatcattaaaccactggcaggtcttttacggctcaaggtaccaccaaaacttctgggcctgcctaacagcgcaagcactttggcacactcacatggggacacccctcaacggatggacttgaaaacacagttagtcttactggtgttgtcgaggggcatgatcagggaagatcccttggagcatattaa

SEQ ID NO: 42744 - DNA, 113 bp, Oryza sativa
  Clone ID: PAT_MRT4530_45966C.1
ggaagcaaaataacatcaccatatatccttccctataaagggcctggcttaaccttacaacagggtacaaagccccccgactaattccaagttccatcgacgggggcgttaat

SEQ ID NO: 42745 - DNA, 2103 bp, Oryza sativa
  Clone ID: PAT_MRT4530_45967C.1
atgtcgtcttccgccaacccacttggtgcaccatcggccgaacacgctgagcacctttccaacctagttgcgattcccagcctggcgcatgaaaatcactactttcttggcccagtcggcaatccagaccccactgagtttattattggtgaaaccaataggatccccttcagattaaccaacccggatctaggtcactggaagaacaccttcaaatcctggccatccctagagaaagttccaccagaaaagagctggaccacatggttcaaacgtgtatcagccagcaagagggttcactgggatgaaattggaatcggccaagcacttgaccttactatagcgaactcagccaaagatgaacacctgatggcagctgcttcttacttctggtcaaacactaccaatgcctttctgttcaatcaaggaccgatgactccaactctcatagatatcagtatgatcacagactctgcacaacttgagcacccagtggacttcagattcgaagacatcaaccatgaagtataccaatcatgcagggaaatcttctcggctgcaatcagcccatgtatccttcctgttggcattcatcaaggaagaaacatccaagcttcttatgaattctatcatccaatgagctcagctagacaactcggaatgggccaactcccaattggcttgttctttgctgacaagatccaatgccgaggagggatttcatcaaccctgatgatggatcggctgcttagccttcaaggaccccctctgggcagtattgacaacatagaactggcaacattcagaagcaaaagcttcgataggtggtggggtgaatggaaactgcatttattccaccaaccagcttcaatatatatgacagacctctttccagatgttgtccctcaaacaacggaatcttcccctcctcatcaaagcaacagtggcaaagacatccaatatgccccaggtttaattcctaacggaggtgggctatcccctccagttatcggctatgatgcccccaagacctcagctcttcttcaagggctcgttagagaaccagccgatgccagcaaaaagaggaaaaccagatcgtcggctgtaagcatcgtagccccaattaagaagaagaagacaaagaaatccaagccagctgatgatctgcctaccctggatccatccatcgaacaagctctggatgaagaggccattgaagacgaggttgatcaggccgtagccgagaaaaagaagactgcggtgaagaagaaatcggctgcagcaacatctaaaccagctccaccaccttcacctcctccttctccttctgttcaacaatcatcaagtgatcagactccctcagctgcgggaagtcaccacgtcgaggaagaagaacaaccagctgctcctgctaccctagtattagccgatcttttctcttttgacatcagggactaccttgatgaaggagaagaagataccacaagcaaagccttggctcctttatctgatgatgtgaagaaaactctaggaagcattttagatcggctagaggcatcatcgctaaacagcttggtggttgactgtggctcaatcaaggctcggctacatgagattcaagctttaatcctagatgagttagccgatatccttactccagccgtttctcttgagcaacaccaattcaaactggagaaagccatgttaagattagccgaacggcgagaacgtaaggatattgaggccactatccaagccaaccgacaacttgtgcatgaagagaagtccaaacttgatcaactatctgaaggcctaatcaagtctaacattgatcggcttgaggctcgcaagattgacctcttaacacaacttgaagaatgtaacgctgagctggatatggaacacaagaaactagccgatctccccaagtctattgaagaacagaaagcgagactcaaatcggctataaagcatgttgctgaactgaccaagtccctgaaagttatccctcgaaccgatgctcaagatgcccaagccatagaggaagtagagcagattaggcagaaggctatatcggctatccagcgatacttatcgcggtaa

SEQ ID NO: 42746 - DNA, 350 bp, Oryza sativa
  Clone ID: PAT_MRT4530_45968C.1
aaacaacaaaggggaacatccggccctaattttattttttttttttatcattttcacaaacatggggaagcggcttccaaacatgatcctggtggctggtcctagcaaacttggttatttaattaagcaagggcctaattaattaattaacccctaaggaaaaaattaatttaatccgggccccccccaaacatggggggggcaaaggaaccggccgtgtgctgaaggttgccccggccgtattccgtaagggggttcgcaatccggggaatggtgggggggtccaacccgggggccggggggtgggagataatccgggaaacgggggggcctttttcggggaccacccc

SEQ ID NO: 42747 - DNA, 258 bp, Oryza sativa
  Clone ID: PAT_MRT4530_45969C.1
ctgccgtgcagcttccttttctgcttcaatcaccttctcaagctgctgctggaactgcgcgagcttccggcgctgcgtcttgagggtgaggatggccctgtccacgtccgtcaccttgggcttcttcacgaagatgttccccatggccgcgtgctgctgctacctacccggcgccctcttcttccttccgacgcggcggcggcggcggcggcggagatggccggagaggggaggtggataggggagggcggcacggtg

SEQ ID NO: 42748 - DNA, 804 bp, Oryza sativa
  Clone ID: PAT_MRT4530_4596C.1
atggcagtcgacgacatcagtcacaatccttctgctcttcctccaattctagccccggtggacgccaaccatggaagaagcaacgtcgctagggatgttcataaatcgctgcttgttccagtttcagctgccaaagtgcataatcagaagcctgcaccccaggaccaagcaagtcgattctgtcgcaactgtcgtaagccaggacattgtttcagtgattgtcctcttccaagagcagcaaaggcagttcgtcgtgattcacaagttatcagcactgcccacgaccccaatcgacacctgaatgtgcaacctccgcctcaacggatcatcgtcaagggcaccgtaagaggccgcattgttccaccggccatcgtttcaagcctacagcaccagcgccagcagggtaagcaatgcaaggagaacaacagctcgctacagttacaaagaggcagtatgctccttcatcagcacccgcagcaagtgtcgtcagcaccaggtcgctcgactgttgtcagttctagcaatgcacctcgtattgctccaatccggaggcccatcgacaaaccaccgctcggcaatcccgcgagtaagaagtcccacctgctacggcagtcaagagagttgttactccaccatcgaagaccaacaagcagagcaacgttcccggtgagacttcagctagtaggaactaaagggacaagtcagtcaggtttgaatgatggaagcaacaacagttccagtcaagacctctacttttcaggtctaaaaggcagttctaatcagcagcagtctacaatggtttga

SEQ ID NO: 42749 - DNA, 937 bp, Oryza sativa
  Clone ID: PAT_MRT4530_45970C.1
atgtcgtcttccgccagcccatctggtgcgccattagtcgaatacgctgagcatctttctcaccaagtcacaattcccagtctgacgcatgaaaaccactactttctcggcccaatcagcactcctgaccccaccaagttcattattggtgaaaccaataggatctccttcagattaaccaacccagatctaggtcactggaagaatactttcaagtcctggccatctctagagaaagttccaccagaaaagagctggactacatggttcgaacgtgtatcagccagcaagagggtccactgggatgaaatcggaatcggccaagcacttgaccttactatagaaaactcgaccaaagatgaacccctgatggcagctgcttcttacttctggtcaaacactattaatgtctttttattcaatcaagggccgatgaccccaactcttatagatatcagcatgatcacgggtctggatgtcacctcatcggccaaccctatgagcttgaacacaaataaccattatgacttcaagaccaaaagcataggagctgaagctctagaaacaaagagacaatttcccttgggcaaaattctcctcggctatctataccagatgttgaacaatgcatcggctaagatagccgtcggctcagtagttggagcaggggatgatggagaagagcgtactcatcggagatgcacatcatacggagaatacgcttctacaccaactgatgccggggcaaaactatcggctgaactgctcaaagattggttctgcagcttctatgaaggctttcaaaaagatgctcgagtttcgttcctttatgaagattctgcagaacttgagcacccactggacttcagattcgaagacatcaaccacgaaatataccaatcgtccacggagattttctcagctgcaatcagcccat

SEQ ID NO: 42750 - DNA, 2370 bp, Oryza sativa
  Clone ID: PAT_MRT4530_45971C.1
atgtcatcttccgccagcccacctggtgcaccatcggccgaatacgctgagcacctttccaacctagttgcgattcccagcctgtcgcatgaaaatcactactttcttggcccagtcggcaatccagacctcaccaagttcattattggtgaaaccaataggattccctttagattaactaacccagatctaggtcactggaagaataccttcaaatcctggctgtctctagagaaagttccaccagaaaagagctggaccacatggttcaaacgtgtatcagccagcaaaagggttcactgggatgaaattggaatcggccaagcacttgagcttactatagcgaactcagccaaagatgaacccctgatggcagctgcttcttacttttggtcaaacactactaatgcctttctgttcaatcaagggccgatgactccaaccctcatagatatcagtatgatcacaggtctggatgtcacctcatcggccaaccctatgagtttgaacacaaagaaccaatatgacttcaaaaccaaaagcatagggggttggtcaggctatgtggcagcatacatgggccagggctcggtcacccctcgagaacatgtggcctttctattaatgtggctagaaaaatttcttttctgtggatcaagttgcggccccacaaccaactggcaatttctggctgaagctctagaaacaaagagacaattccccttgggcaaaattttcctcggctatctataccagatgttgagcaatgcatcggctaagatagcagtcggctcagtagttggagcaggtggaccctgcttctatgaaggctttcaaaaagatgctagaatctggttcctttatgaagactctgcacaacttgagcacccagtggacttcagatttgaagacatcaaccataaagtataccaatcatccagggaaatcttctcagctgcaatcagctcatgtatccttcctattggcattcatcaaggaagaaacatccaagcttcttatgaattctatcatccaataagctcagcaagacaactcggaatgggccaactcccaatcagcttattctttgctaacaagatccaatgccgaggagggatttcatcaaccctgatgatggatcggctgcttggccttcaaggaccccctctgggcagtattgacaacatagaactggcaacattcagaagcaaaagctttgacaggtggtggggtgaatggaaactgcatttaatccaccaaccagcttcaatgtacatgacagacctctttccagatgttgtccctcaaacaacagaatcttcccctcctcatcaaagcaatagtggcaaagacatccaatatgccccaggtttaattcctaacggaggtgtgttatctcctccagttataggctatgatgcccccaagacctcagctcttcttcaagggctcgtcagagaaccagccgatgccggcaaaaagaggaaaaccagatcgtcggctgtaagcatcgtagccccaattaagaagaagaagacaaagaaaaccaagccggccgatgatctgcctgccctagatccatccatcgaacaagctctggatgaagaggtaattgaagacgaggttgatcaggccgcagccgaaaaaaagaagactgcagtaaagaagaaatcggctgtaacaacatctaaaccagctccaccaccttcacctcctccttctccttctgttcaacaatcatcaagtgatcagaccccttcagctgcgggaagtcatcacgtcgaggaagaagaacaaccagttgctcctgctatcccagtattagccgatcttttctcttttgacatcagagactaccttgatgaaggagaagaagataccacaagcaaagccttggctcctttatctgatgatgtgaagataactctaggaagcattttagatcggctagaggcatcatcgctagacagcttggtggttaactgtggctcaatcagggctcggctacatgagattcaacctttaatcccagatgagttagccgatatccttactctagccgtttaccttgagcaacaccaattcaaactggagaaagccaagttaagactagccgaacggcgagaacgtccaatcaagtctaacattgatcggcttgaggctcgcaagattgacctcttagcacaacttgaagaatgtaacgctgagctggatatggaacataagaaactagccgatctccccaagtctattgaagaacagaaagcaagactcaaatcgtctattaagcatgttgctgaactgaccaagtccctgaaagttatccctggaaccgatgctcaagatgcccaggccatagaggaagtatag

SEQ ID NO: 42751 - DNA, 445 bp, Oryza sativa
  Clone ID: PAT_MRT4530_45972C.1
ttttttttttttttttttttttttttttttttttttttttttttgttttgttttttttttttttaatttatacctgcgggggaacccgcgggaacaacgggaaaaacccaaaaggcccccgaaggcaccccaaaagcccccaaaggagagaaaggggaaaacagggacaaacccagacaacaggggaaccggggcaaaaagggaaaagccgacaaagcccaaaccgaaacaaaccgaaaaaacccggggagagaaagggggggctaacgagcaaaaaaacccaaagagcccccggggcgaataaaccccccaaaacccggggaaaaagtgtaagaaaaaagagcgacaaagagcgtcaacaagcacaaaaaagacgggcaacagggggaaccctttacccccaggaattcccaaaaaaaagaaagcggagcactcggggtaaccg

SEQ ID NO: 42752 - DNA, 2283 bp, Oryza sativa
  Clone ID: PAT_MRT4530_45973C.1
tcaagggataactttcagagacttggtcagatcagcaacatgcttgatagccgttttgagtcttgctttctgttcttcaatagactttgggagatcggctaacttcttgtgctctatatccagctcagcgttgcattcttcaagttgtgctaagagttcaatcttgcgagcctcgagtcgatcaatgttagacttgattgggccttcagatagttgatcaagcttggacttctcttcatgcacaagttgtcggttggctttgctcaaggtaaacggatcatcagataaaggggctaaggctttgcttgtggtatcttcttctccttcatcaagatactctctgatgtcaaaagagaaaagatcggctaatactgggatagcaggagcagctggttgttcttcttcctcgacgtgatgactccccacagctgaaggagtctggtcacttgacgattgctgtacagaaggagaaggaggagggggaggtggtggagctggtttagatgttattgcaaccgatttcttcttcaccgcagtcttctttttttcggctgtggcctgatcaacttcgtcttcaattatttcttcatccagagcttgttcaatagatggatctagggtaggcagatcatcggctgacttggttttcttcgtcttcttcttcttagttggggctgcgatgtttacagccgacgatctggttttcctctttttgccggcatcagctggttctctgataagcccttgaagaagagctgaggtcttgggggcatcatagccaataatcagaggagatagcccacctccattaggaattaagcctggggcatattggatgtccttgccactgttgctttgatgaggaggggaggattctgttgtttgagggacaacatctagaaagaggtctgtcatatacattgaagctggttggtggaatagatgcagcttccattcgccccaccacctgtcaaagtttctgcttctgaatgttgccagttctatgttatcaatactgcccagaggaggtccttgaaggttgagcagccgatccatcatcagggttgatgaaattcctcctcggcattggatcttgtcggcgaagaataagccgattgggagttgtcccattccaagttgtctagctgagctcattggatgatagaattcgtaagaagcttggatgtttcttccttgatgaatgccaacaggaaggatgcatgggctgattgcagctgagaaaatttccctagacgattggtatacttcatggttgacgtcttcgaatctaaagtccaatgggtgctcaagttctgcagaatcttcatagagaaaccaaactggagcatctttttgaaagccttcatagaagctgcagaaccaatctttgagtagttcagccgatagttttgccccagcctcagttggtgtagaagcgtattctccgtatgatgtgcatctccgatgagtacgctcttctccatcatctcctacaatcggctctagtcttggaaactcagcttctgatacggatggccgagtgacaaccttcataactatcaggtttaaccaggtttgtagcagccaccagggcccacctactccaactactgagccgacgactatcttagccgatgcattgtttaacatatggtatagatagccgatgaggattttgtccaagggaaattgtttctttgtttctaaagcttcagctagaaattgccagttggttgtggggccgcaacttgatccacagaacagaaatttttctcctatgctctttgtcttgaagtcatattggttctttgtgttcaaactcatagggttggccgatgaggtgacatccagacccgtgatcatgctgatatctatgagagttggagtcatcagcccttgattaaacaagaagggattaatggtgtttgaccagaagtaagaagcagctgccatcaggggttcatctttggccgagtttgctatggtaaggtcaagtgcttggccgattccaatttcatcccagtggaccctcttgctggctgatacacgtttgaaccatgtagtccagctcttttctggtggaactttttctagatctgggttggttaatctgaaggggatcctattggtttcaccaataatgaactcggtggggtcaggattgccgattgggccgagagagtagtggttttcatgcgttagactaggaattgcgacttggtaggaaagatgctcaacgtattcggttgatggtgcaccagatgggctggcggaagacgacat

SEQ ID NO: 42753 - DNA, 240 bp, Oryza sativa
  Clone ID: PAT_MRT4530_45974C.1
atggctgcttataattttaaggttaatgggaggtacaagattaacgcggaggatttgccaagattagaacgtcgaacaagctttgacgatacagacatcacaaatgtccagcgtgatctgtgccatttcatccaccatgagtgctgtcatgtgaaaggagatttcttcgacccagagggtgccctagcgacaagtgacgaattcaaggatctttgggagtggaacactgctatgccataa

SEQ ID NO: 42754 - DNA, 512 bp, Oryza sativa
  Clone ID: PAT_MRT4530_45975C.1
atggcgatcaatggcgtcgccggcgccggcgccggcgacgtcgacgtcgacgtcgacgtcgatgcatcagcacctccacctcctctccacctggtgatgttcccgtggctggcgttcggccacctcatcccgttcctccagctcgccaagcgcctggcggcgcgtggccacgccgccgtcaccttcctcgccacgccgcggaacgcctcccgcctcgccgcgctcccgccggagctcgccgcctacgtccgcgtcgtctcgctcccgcttccggtgctcgatggcctgccggagggcgcggagtcgacggccgatgtcccgccggagaaggtggagcttctcaagaaggcgttcgacggcctcgccgcgcccttcgccgcattcctcgccgacgcctgcgccgccggagaccgggaaggacgaccagatcctttcagcaggaggcccgactgggtcgtcgtcgacttcgcccacggctggctcccgcccatcgccgacgagcaccgggtgcc

SEQ ID NO: 42755 - DNA, 1053 bp, Oryza sativa
  Clone ID: PAT_MRT4530_45976C.1
atggctcttccacgaggcgtccgctcccccaagccgatggccgccgccgccgcctccgcctcgccgccgcagccgaggcccgggcacatgctcgtgctcggcaccggcttcgtcggccgctacgtctcccagcgcctcctcgcgcaaggatggagggtgtccgggacgtgcaccagccctgccaagaagacggagctcgagatgctgggcatggatgcttcgatcttcgatgccacaagcagcaggtgctgcttcttcttcttcttcttgctcttcttgttctttgttccttcgagtctgacaaatctccggtctttgcaagatgcaactcatttgctcatctccattccacccatcccgggaattggtgatcctttgctttcttcacattccaacctgcaaactacactaagcaatagtaaccttcaatggctatgttacctttcttcaacaagtgtgtatggtgattgtggtggtgcatgggttgatgaggatcatacggtgaatccgaagaccgagtctgtgaaattaagatatgctgccgaaaaaggatggttgaatgttatagatgacttagatctatcagcctttgtatttcgtttaggtggaatatatgggccaggaagaagtgcagtggacacaatagccaagagcaaatctttgtcacgaagacagaaatcgagggaatccaaacagtacactgcacgaattcatgtggctgacatttgtcaggctatcctggctagcatgagcatcagaagtgcaaggaggatatacaacgtagtggatgacgaccctgccccaagatctgaggttttcgcatttgctcggagcttggttgagaggaagcatcctggcctgataatggattctgtagtactaccagctactcaggacagaatcgtagctgctgagaagcgggtctctaatgctcggctaaaagaggaacttggtgtaaagcttcttcacccaacctataaatcaggcctgcagagtattttggattcttggagtgtcgaatcttctttttcaaataggaatgttgacgtttag

SEQ ID NO: 42756 - DNA, 2205 bp, Oryza sativa
  Clone ID: PAT_MRT4530_45977C.1
atgtcgtcttccgccagcccacttggtgcaccatcggccgaatacgctgagcacctttccaacctagttgcgattcccagcctggcgcatgaaagtcactactttcttggcccaatcggcaatccagaccccaccgagtttattattggtgaatccaatagtatccccttcagattaaccaacccagatctagccagcaagagggttcactgggatgaaattggaatcggccaagcacttgaccttactatagcgaactcggccaaagatgaacccctgatggcagctgcttcttacttctggtcaaacactaccaatgcctttctgttcaatcaagggctgatgactccaactctcatagatatcattatgatcacagctctagaaacaaagagacaattccccttgggcaaaattctcctcggctatctaaaccagatgctgagcaatgcatcggctaagatagcagtcggctcagtagttggagcaggtggaccctggtggctactgcaaacctggttaaacctgatagtcatgaaggttgtcaatcggccatccgtatcaaaaactgaattcccaagactagagccgattgtagataatgatagagaagagcgtactcatcggagatgcacatcatatggagaatacgcttctacaccaactgatgccggagcaaaactattggctgaactgctcaaggattggttttgtagcttctatgaaggttttcagaaagatgctagaatctggtttctttatgaagactctgcacaacttgagcacccagtggacttcagattcaaagacatcaaccctgaagtataccaatcatccaaggaaatcttctcggctgcaatcagcccatgtgtcctccctgttggcattcatcaaggaagaaacatccaagcttcttatgaattctatcatccaatgagctcagctagacaactcggaatgggccaactcccaatcggcttgttctttgccgacaagatccaatgccgaggaggaatttcatcaaccctgatgatggatcggctgcttagccttcaaggaccccctctgggcagtattggcaacatagaactggcaacattcagaagcaaaacttcgatgtatatgacagacctctttccagatgttgttcctcaaacaacagaatcttcccctcctcaccaaagcaacagcggcaaagacatccagtgtgccccaggtttgattcctaacggaggtgggctatctcctccagttatcggctatgatgcccccaagacctcaactcttcttcaagggctcgttagagaaccagccgatgccggcaaaaagaggaaaaccagatcatcggctgtaagcatcatagccccaattaaggagaagaagacaaagaaaaccaagccagctgatgatctgcctaccctggatccatccatcgaacaagctctggatgaagaggccattggagacgaggttgatcaggccgcagccgagaaaaagaagactgcagtgaagaagaaatcggctgcaacaacatctaaaccagcttcaccaccttcacctcctccttctcctcctgttcaacaatcatcaagtgatcagacccctttagctgcgggaagttatcacgtcgaggaagaagaacaaccagctgctcctgctatcccagtcttagccgatcttttctctttcgatatcagagactatcttgatgaaggagaagaagataccacaagcaaagcattggctcctttatctgatgatgtgaagaaaactctaggaaatgaatcagccgatatccttactccagctgtttaccttgagcaacaccaattcaaactgaaaaaagccaagttaagactagccgaacggcgagaacgtaaggacattgaagccactatccaagccaaccgacaacttgtgcatgaagagaagtccaagcttgatcaattatctgaaggcccaatcaaatctaacattgatcggcttgaggctcgcaaaaatgaactcttagcacaacttgaagaatgtaatgctgagctagatatggaacacaagaaactagccgatctccccaaatctattgaagaacaaaaaacaagactcaaatcggcaaaagcgtgttgccgaactaaccaagtccctgaaagttatccctggaaccgatgctcaagatgcccaagccatagaagaaatagaacagattag

SEQ ID NO: 42757 - DNA, 1077 bp, Oryza sativa
  Clone ID: PAT_MRT4530_45978C.1
atggcggccgccgccgcctccgccttgccgccgcagccgaggcccgggcacatgctcgtgttcggcaccggtttggtcgcccgatacgtctcccagcgcctcctcgcgcaaggatggccagctacttacttcccctgctcctccattttggatcggattctgctgctattgccgccaagggtgtccgggacgtgcaccagccctgccaagaagacggagctcgagatgctgggcatggatgcttcgatcttcgatgccacaagcagcaggtgctgcttcttcttcttcttcttgctcttcttgttctttgttccttcgagtctgacaaatctccggtctttgcaagatgcaactcatttgctcatctccattccacccatcccgggaattggtgatcctttgctttcttcacattccaacctgcaaactacactaagcaatagtaaccttcaatggctatgttacctttcttcaacaagtgtgtatggtgattgtggtggtgcatgggttgatgaggatcatacggtgaatccgaagaccgagtctgtgaaattaagatatgctgccgaaaaaggatggttgaatgttatagatgacttagatctatcagcctttgtatttcgtttaggtggaatatatgggccaggaagaagtgcagtggacacaatagccaagagcaaatctttgtcacgaagacagaaatcgagggaatccaaacagtacactgcacgaattcatgtggctgacatttgtcaggctatcctggctagcatgagcatcagaagtgcaaggaggatatacaacgtagtggatgacgaccctgccccaagatctgaggttttcgcatttgctcggagcttggttgagaggaagcatcctggcctgataatggattctgtagtactaccagctactcaggacagaatcgtagctgctgagaagcgggtctctaatgctcggctaaaagaggaacttggtgtaaagcttcttcacccaacctataaatcaggcctgcagagtattttggattcttggagtgtcgaatcttctttttcaaataggaatgttgacgtttag

SEQ ID NO: 42758 - DNA, 2154 bp, Oryza sativa
  Clone ID: PAT_MRT4530_45979C.1
atgtcgtcttccgccagtccatccggtgcgccatcagccgaatatgctgagcacctctccaacctaattgcgattcctagcctgtcgcatgaaaaccactactttctcggcctagtcggcaatcctgaccccaccgagttcattgttggtgaaaccaataggatccccttcagattaaccaacccagatctagggccgatgactccaactctcatagatatcagcatgatcacgggtctggatgtcacctcatcggccaaccctatgagtttgaacacaaagaaccaatatgacttcaagaccaaaagcataggaggttggtcaggttacgtagcagcatatatgggtcaaggctcggtcacccctcgggaacatgtggcttttttgttaatgtggctagaaaaatttctcttatgtggatcaagttgcggccccacaaccaactggcaatttctagctgaagctctagaaacaaagagacaatttcccttgggcaaaatcctcctcggctatctataccagatgttgaacaatgcatcggctaaaatagccatcggctcagtagttggagcaggtggaccctggtggctgctacaaacctggttaaacctgatagttatgaaggttgtcaatcgaccatccgtatcagaagctgagttcccaagactagagccgattgtaggagatgatggagaagagcgtactcatcggagatgcacatcatacggagaactactcaaagattggttctgcagcttctatgaaagctttcaaaaagatgctcgagtttggtttctttatgaagattctacagaacttgaacacccattggacttcagattcgaagacatcagccatgaagtataccaatcgtccagggaaattttctcagctgcaatcagcccatgcatccttcctgttggcattcatcaaggaagaaacatccaagcttcctatgaattctatcatccaatgagctcagctggacaacttggaatgggccaactcccaatcggtttattctttgccgacaaaatccaatgccgaggagaaatttcatcaaccctgatgatggatcggctgctcaacttgcaaggaccccctctgggcagtattgacaacatagaactggcaacattcagaagcaaaaactttgacaggtggtggggcgaatggaagctgcatctattccaccaaccagcttcaatgtatatgacagacctctttccagatgttgtccctcaaacaacagaatcttcccctcctcatcaaagcaatagtggcaaggacatccaatatgccccaggtttaattcctaacggaggtgggctatctcctccggttattggctatgatgcccccaagacctcagctcttcttcaagggctcatcagagaaccagccgatgccggcaaaaagaggaaaaccagatcgttggctgtaaacatcgcagccccaactaagaagaagaagacaaagaaaaccaaaccagccgatgatctgcctaccctagattcatccattgaacaagctctggatgaagagataattgaagacgaagttgatcaggccgcagccgaaaaaaagaagactgcggtgaagaagaaatcggctgcaacaacatctaaaccagctccaccaccttttcctcctcctgtacaacaatcgtcaagcgaccaaacctcttcagctgtgggaagtcatcacgtcgaggaagaagaacaaccagctgctcctgctatcctagtattagccgatctcttctcttttgacatcagagactatcttgatgaaggagaagaagataccacaagcaaagccttagcccctttatctgatgatgtgaagaaaactctggaaagcccaatcaagtctaacattgatcggcttgaggctcacaagattgaactcttagcacaacttgaagaatgcaacgctgaactggatatggagcacaaaaagctagccgatctcccaaagtctattgaagaacagaaagcaagactcaaatcggccattaagcatgttgctgatctgaccaagtctctgaaagttatccctagaaccgacactcaagatgcccaagccatagaagaagtagaacagattaggcagaaggctatatcggccatccagcgatacttatctcaataa

SEQ ID NO: 42759 - DNA, 207 bp, Oryza sativa
  Clone ID: PAT_MRT4530_4597C.1
atggcgagccggcgactaaattgtcactcgctgcacgcgtgctccaagagcgttgaagctttcctgtcgccggcccgcagccgatgccagcagcaccccaggcgtggcgatggtgcgtcggccgcgcaacgacgcaaggtcgcctcgtctcctcacaacggtgcagcgcttcgccacagctacggcccagaacaagcttcgccgtaa

SEQ ID NO: 42760 - DNA, 2091 bp, Oryza sativa
  Clone ID: PAT_MRT4530_45980C.1
atgtcgtcttccgccagcccacttcgtgcaccatcggccgaatacgctgagcacctttccaacctagttgtcattcccagcctggcgcatgaaaatcactactttcttggcccaatcggcaatccagaccccaccgagtttattattggtgaaaccaataggatccccttcagattaaccaacccagatctaggtcactggaagaataccttcaaatcctggccatccctagagaaagttccaccagaaaagagctggaccacatggttcaaacgtgtatcagccagcaagagggttcactgggatgaaattggaatcggccaagcacttgaccttactatagcgaattcggccaaagatgaacccctgatggcaactgcttcttacttttgttgtggccccacaaccaactggcaatttctggctgaagctctagaaacaaagagacaattccccttgggcaaaattctcctcggctatctataccagatgctgagcaatgcatcagctaagatagcagtcggctcagtagttggagcaggtggacattggtggctactgcaaacctggttaaacctgatagtcatgaaggttgtcaattggccatccgtatcagaaactgaattcccaagactagagccgattgtagatgatgatggagaagagcgtactcatcggagatgcacatcctatggagaatacgcttctacaccaactgatgccggagcaaaactatcggctgaactgctcaaggattggttttgtagcttctatgaatgctttcagaaagatgctagaatctggttcctttatgaagactctgcacaacttgagcacccagtggacttcagattcgaagacatcaaccatgaaacaacagaatcttcccctcctcaccaaagcaacagcggcaaagacatccagtatgccccaggtttgattcctaacggaggtgggctatctcctccagttatcggctatgatgcccccaagacctcagctcttcttcaagggctcgttagagaaccagccgatgccggcaaaaagaggaaaaccagatcgtcggctgtaagcatcatagccccaattaaggagaagaagacaaagaaaaccaagccagctgatgatctgcctaccctggatccatccatcgaacaagctctggatgaagaggccattggagacgaggttgatcaggccgcagccgagaaaaagaagactgcagtgaagaagaaatcggctgcaacaacatctaaaccagcttcaccatctttttcttcgttttgcgtgttagcttgtcgtttccgtcgttgcgaagtttgtgtacctcggctgattcctggacgaggattttatgcacaaataagttcggaaattactagtgaatttccgggcgtgacactgcaggtcttagctgatcttttctctttcgatatcagagactatcttgatgaaggagaagaagatactacaagcaaagcattggctcctttatctgatgatgtgaagaaaactctaggaagtattttggatcggctagaggcatcatcactagatagtttggtagttgactgtggctcaatcagggctcggctgcatgagattcaagccttaattccagatgaattagccgatatccttactccagctgtttaccttgagcaacaccaattcaaactggagaaagccaagttaagactagccgaacggcgagaacgtaaggacattgaagccactatccaagccaaccgacaacttgtgcatgaagagaagtccaagcttgatcaattatctgaaggcccaatcaaatctaacattgatcggcttgaggctcccaaaattgaactcttagcacaacttgaagaatgtaatgctgagctagatatggaacacaagaaactggccgatctcccaaaatctattgaagaacaaaaaacaagactcaaatcggctattaagcatgttgctgaactgaccaagtccctgaaagttatccctggaaccgatgctcacgatgcccaagccatagaagaagtagagcagattaggcagaaagctatatcggttatacagcgatacttatcactgtaa

SEQ ID NO: 42761 - DNA, 2691 bp, Oryza sativa
  Clone ID: PAT_MRT4530_45981C.1
atgtcgtcttctgccagcccatctggtgcgctatcagccgaatacactgagcatatttcccaccaagtcgcaattcccagtctgacgcatgaaaaccactactttctcggcccaatcggcaatcctgaccccaccgagttcattattggtgaaattaataggatccccttcagattaaccaacccagatctaggtcactggaagaatactttcaagtcctggccgtctctagagaaagttccaccagaaaagagctggactacatggttcaaacgtgtatcagctagtaagagggtttactgggatgaaattggaatcggccaagcacttgaccttactatagcaaactcggccaaagatgaacccctgatggcagctgcttcctacttctggtcaaacaccattaatgcctttttgttcaatcaagggccgatgaccccaactctcatagatatcagcatgatcacgggtctggatgtcacctcatcagccaaccctatgagcttgaacacaaagaaccaatatgacttcaagaccaaaagcataggaggttggtcaggctatgtagcggcatatatgggtcagggctcggtcacccctcaggaacatgtggcctttttgttaatgtggctagaaaaatttctgttctgtggatcaagttgcggccccacaaccaactggcaatttctagctgaagctctagaaacaaagagacaaatctccttgggcaaaattctcctcggctacctataccagatgttgaacaatgcatcggctaagatagccgtcggctcagtagttggagcaggtggaccctggtggctgctacaaacctggttaaacctgatagttatgaaggttgtcaatcggccatccgtatcagaagctaaattcccaagactagagccgattgtaggagatgatggagaagagagtactcatcggagatgcacatcatacggagaatacgcttctacgccaactgatgctggggcaaaactatcggctgaactgctcaaagattggttctgcagcttctatgaaggctttcaaaaagatgctcgagtttggtttctttatgaagattctgcagaacttgaacacccattggacttcagattcgaagacatcaaccatgaaatataccaatcatccaggaaaattttctcggctgtaattagcccatgcatccttcctgttggcattcattaaggaagaaacatccaagcttacgaattctatcatccaatgagctcagctagataacttggaatgggccaactcccaatcggcttattctttgccgacaagatccaataccgaggagaaatttcatcgaccttaatgatggatcggctactcaaccttcaaggaccccctctgggcagtattgacaacatagaactggcaatgttcagaagtaaaaactttgacagatggtggggtgaatggaagctgcatttattccaccaagcagcttcaatgtatatgacagacctcttcccagatgttgtccctcaaacaacagaatcctctcctccccgtcaaagcaacagtggtaaggatatccaatatgccccaggtttaattcctaacggaggtgggctatctcctccggttattggatatgatgcccccaagacctcagctcttcttcaagggctcatcagggaaccagccgataccggcaaaaagaggaaaaccagatcatcggctgtaagcatcacagccccaactaagaagaagaagacaaagaaaaccaagccagccgatgatctgcctaccctagatccatccattgaacaagctctggatgaagagatatttgaagatgaagttgatcaggccacagccgaagtaagcgatactgaaagaacatcatcagataactattttgtcttatagccgatcactcccaggtcttgtaattgcagaaaaagaacactacggtgaagaagaaatcggctgcaacaacatctaagccagctccaccgccttcccctcctccttctcctcctgcacaacaatcgtcaagtgaccagaccccttcagctgtggggagtcatcacatcgaggaggaagaacaaccagctgctcctgctatcccagtcttagccgatcttttctctttcgacattggagactaccttgatgaaggagaagaagataccacaagcaaagccttagcccctttatctgatgatgtaaagaaaactctggaaagtatcttggatcggctagaagcatcatcactggatagcttggtggttgattgtggctcaatcagggctcggctacatgagattcaggctctaatcccagatgagttagccgatattcttaccccagccgtttactttgagcaacaccaattcaaactggaaagatcaactatctgaaggcccaatcaagtctaatattgatcggctcgaggctcgcaagattgaactcttagcacaacttgaagaatgcaacgctgagctggacatggaacacaaaaaactagccgatctcccaaagtctattgaagaacagaaagcaagactcaaatcggctatcaagcatgttgctgatctgaccaagtctctgaaagttatccctggaaccaacgctcaggatgcccaagccatagaagaagtagagcagattaggcagaaggctatatcggccatccagcgatacttatctcaa

SEQ ID NO: 42762 - DNA, 231 bp, Oryza sativa
  Clone ID: PAT_MRT4530_45982C.1
ggagaaccaggtggtcttcttcctctcgacgacctcttcttccctttcctctcctccgtcggggctcccccgactgcggggaggccccttccccccacccatcggcgcgtaggacgtttcctggattagcgttttctcttctatcggacgctatctttcggagcgctcccgtttgcccttgctcttcttgagaatccggcttttttcagtttttaggagtacaagttatag

SEQ ID NO: 42763 - DNA, 2736 bp, Oryza sativa
  Clone ID: PAT_MRT4530_45983C.1
atgtcttcttccaccaacccatctggtgcaccatcagccgaatatgctgagcacctctccaacctagttgcgattcccagtctgtcgcatgaaaaccactactttcttggcccagtcggcaatccagaccctaccgagttcattattggtgaaaccaataggatccccttcagattaaccaacctagatctaaatcgctggaagaatactttcaagtcctggccgtctttagagaaagttccaccagaaaagagttggactacatggttcaaacgtgtatcagccagcaagagggttcactgggatgaagttggaatcggccaagcacttgaccttactatagcaaactcggccaaagatgaacccctgatggcagctgcttcctacttctggtcaaacaccattaatgcctttttgttcaatcaagggccgatgaccccaactctcatagatatcatcatgatctcagatctggatgtcatctcatcggccaaccctatgagcttgaacacaaagaaccaatatgacttcaagaccaaaagcataggaggttggtcaggctatgtagtggcatatatgggccagggctcggtcacccctcgggaacatgtggcttttctgttaatgtggctagaaaaatatctgttctgtggatcaagttgcggccccacaaccaactggcaatttctagctgaagctctagaaacaaagagacaattccccttgggcaaaattcttctcggctatctataccagatgttgaacaatgcatcagctaagatagccgtcggctcagtagttggagcaggtggaccctggtggctgctacaatcctggttaaacctgatagttatgaaggttgtcaatcggccatccgtatcagaagctgaattcccaagactagagccgattgtaggggatgatggagaagagcgtactcatcggagatgcacatcatatggagaatacgcttctacaccaactgatgctggggcaaaattatcggctgaactgctcaaagattggttttgcagcttctatgaaagctttcaaaaagatgctcgagtttggtttctttatgaagactctgcagaacttgaacacccagtggacttcagattcgaagacattaaccatgaagtataccaatcatccagggaaattttctcagttgcaattagcccatgcatccttcctgttggcattcatcaaggaagaaacatcaaggcttcttatgaattctatcatccaatgagctcagctagacaacttggaatgggccaactcccaatcggcttattctttgccgacaagatccaatgccgaggagaaatttcatcgaccctgatgatggatcagctgcttagccttcaaggaccccctctgggcagtattgacaacatagaactggcaacgtttggaagcaagagctttgacaggtggtggggtgaatggaaactgcatttattccaccaaccagcttcaatgtatatgacagacctctttccagatgttgtcccccaaacaacagaatcctcccctcctcatcaaagcaacagtggcaaagacatccaatatgccccaggtttaattcctaacggaggtgggctatctcctccggttatcggctatgatgcccccaagacctcggctcttcttcaagggctcgtcagagaaccagccgatgccggcaaaaagaggaaaaccagatcgtcggctgtaagcgtcgtagctccaactaagaagacgaagacaaagaaaaccaagtcaaccgatgatctgcctaccctagatccatccattgaacaagctctggatgaagagataattgaagacgaagttgatcaggccacagccgaagtaagcgatgctgaaagaacaccatcggcttcacctaagcaaacccctccaaccccttctgctccggttcacttttcaaggaaaaagaagactgcggtgaagaagaaatcggctgcaacaacatctaaaccaattccaccaccttcccctcctccttctcctcctgtacaacaatcgtcaagtgaccagaccccttcagctgtggggagtcatcacgtcgaggaaaaagaacaaccagctactcctgctatcccagtactagccgatcttttctcttttaacatcagagactatcttgatgaaggagaagaagataccatgagcaaagccttagcccctttatctgatgatgtaaagaaaaactctagaaaggctcggctacatgagattcaggttctaatcccagatgagttagccgatatgctcaccccagccgtttaccttgagcaacaccaattcaaactggagaaagccaagttaagactggctgaacggcgagaacgcaaggacattgaagccactatccaagtcaaccgacaacttgtgcatgaagagaagtccaagcttgatcaactatctgaaggcccaatcaagtctaacattgatcggctcgaggctcgcaaaattgaactcttagcacaacttgaagaatgcaacgctaagctggatatggagcacaagaagttagctaatctcccaaagtctattgaagaacagacagcaagactcaaatcggctatcaggcatgttgctgatctgaccaagtctctgaaagttatccctggaaccgacgctcaagatgcccaagccatagaagaagtagagcagattaggcagaaggctatatcggccatccagcgatacttatctcaataa

SEQ ID NO: 42764 - DNA, 166 bp, Oryza sativa
  Clone ID: PAT_MRT4530_45984C.1
atggggtcgttcaggcagtggtggcgccgggtggccgcggccgtgaaggaccggaggagcgtgctcctggcgcgcggtgatccgcgcgacgagccacgacgagcggtgggtggactaccggagcgccgggctggtgttccggtgggcgcggacctcgccgtcgctg

SEQ ID NO: 42765 - DNA, 370 bp, Oryza sativa
  Clone ID: PAT_MRT4530_45985C.1
ccgtccttgaggccggggccgctcaagatccagcgacctgttgtcacacccagaaattctcgaaccagaatttttaagcttgacggcagtgacgaaaccaacctctctgagatagctccaactgagaagaacttcaactctggtgtgggggaaaagagagcaagactgagtactacccactgtactcagcaagtcatatcggaagaggaggtatgatgcaggatataaccaaaggaagctaggggttcttttgcataaagcaggcatttcaaagcagtagttgaaagcagtaaaactgctgtagtaattaatcaatattaaccaatcactgtccaacgctacaccacgtttcaaaaggcatgcggcggcg

SEQ ID NO: 42766 - DNA, 1317 bp, Oryza sativa
  Clone ID: PAT_MRT4530_45986C.1
atggcagttaaggaccggttcacgggaaaccttgtgagacttaccgtgcttaccacaagcgagagcaccggtggcgagggtgggcgtgatggagttgggtcggttggggtgtctggttgtccagctgccggattcaccgcggcgcacgaggggactgcccactgccttttgaggggtgggggtgaaaccttagcgtggtgtgaatggttaggggcgggttatacgaagggtcttgtcacgatttccccctttgtagtgccatgttcaggtggttggttgggcctgttgcaacttggtgtagcgttggacattgattggttaatattgattaatttctacaactgttttactactttcaactactgtttttgaatgcaagctttatgcaaaagaatctctagtctcctttggttatatcctgcatcatatctcctcttccggtatgacttgctgagtacagtgggtagtactcagtcttgctctcttttcccccacaccagagctggagatcttcctagtgggagctgtcttgttgaagttggtctcgtcgctgccatcaagcttagaaattctggttcgtgaatttctgggcgtgacagctgccacctccactgcctccgccccgctgccttatctacttctgcttttggaatgtattccggaccgctcgcgggcgactccattccacaggcaatccttgacggcagcgacgaaaccaacctcttcgagtcatcttcaactgggaaggacttcaactctggcaacgggcagcccccctttcgtgccgcggtgaatccggcagccgatcaaccggacaccccggccgacccaactccatcacgcccaccctcgcctggcgacggcaaccggcgacgggaggcggcggcggacggcgcaaagacggcggcggcggccgaagcggcggcgcgagcgaccctagcggtggcgctacgcggcgggcggcgcggcaaagggagagagaggaagagagggagaccgattctcaccgaggggctcggccggcgcgagggaggagcgacggcgaacagcaacgatgagagacgggaggacgacggcgacgggctccgggaggacctagagagaaggttgggaggggttagagagagggaggtggtccatggcgcacgacataaccgatcgaaggcggcggcaatgggtggaagctcaccggagcgcgaggagaagcaagctccggcggcgagattgaccggggaaacggcggacggggtggcgcacaagcttgcgaacccggcggcgtcgacggcgcagtgcggcgacggctctagcggctgctag

SEQ ID NO: 42767 - DNA, 189 bp, Oryza sativa
  Clone ID: PAT_MRT4530_45987C.1
gcctgatctgcgccgctggactgctggccgcactgggcggctgcgccacctacgattacgccggaggcggcgagggtggctactaccgtggcgccccgtcggtcgaataccgctacccggccggctactccgagtactactcgggaaaagaattaaaaaggaaaataataaaggaaaaaaaaaaaaaaa

SEQ ID NO: 42768 - DNA, 696 bp, Oryza sativa
  Clone ID: PAT_MRT4530_45988C.1
tcagtggatggtccaatagcttttggcttgatgacctgaacatctcccaagtccaccaagcttgaaacccggaagtctcacacatctcagatctattttatcacgcccagaaattcacgaaccagaatttctaagcttgacggcagcgacgaaaccaacctctctgagacggctccaactgagaagaacttcaactctggtgtgggggaaaagagagcaagactgagtactacccactgtactcagcaagtcataccggaagaggtggtatgatgcaggatataaccaaagcaggctaggggttcttttgcataaagctagcatttaaaagcagtagttgaaagcagtaaaacagctgtagtaattaatcaatattaaccaatcactgtccaacgctacaccacgttgcaacaggcccaaccaaccacctgaacatgatactgcaaagggggaaatcgtgacaagaccctccgcataaccctcccctaaccatccacaccacgctaaggtttcacccccacccctcaaaaggcagtgggcggtcccctcttgcgccgcggtgaatccggcagttggacaaccggacaccccggccgacccaactccatcacgcccaccctcgccactggtgctcctgcttgtggtaagcacggtaagtctcccagggtttcccgtgaaccggtccttaattgccat

SEQ ID NO: 42769 - DNA, 876 bp, Oryza sativa
  Clone ID: PAT_MRT4530_4598C.1
aataaattttatttttaggcatgccgtctagcctctctcaggccacccgctgcgctgctcctctcccctgccggtgcgacacgcgctcctcctctcctgtcgtcgtcgtcgcgccggccgccacctctcctcctctcccgccactgccatcgcgtcggcctcttctctctccctctcccgccgttggccgcctctctccccctctcccgccgcctccgctccgccgctggccgcctctctcccctctgtcaccacgccccccccccccccctcagtgacccgtttttaccccccgtccccggtttcccgttactctagcccccccctttttcccccctctcctttttttttccatccccgtctccgctccctttccttttcccccctttctcatttccccgcttttttttcgcccttttttctgtgttacccccttcccgttttcccggctgtttcttccctcttccccgcgtcccccccccccccccccccccgttttccgtcccccccgtccccgttgtgccccccggagtctcccccccccccgttccccagttttttgtcccgcgtttttcgctcgggcccgttttgttcctcgccccctccgtctttatctcccccccccgactcccgtcccccccccccgtttttccccgtttcccgttatttttccccgctgttcccctgctccccccggcttgtcccgcccggtttccgccattagcttgacgtccccctttttgccgttccacttccccgtttccgcctttcctcgatcgccctcccagtcccccccctccggcattatttctatttcgtcccccttctccctcctttttttaccgctcctcggctggtctgtcttttccctgcgtt

SEQ ID NO: 42770 - DNA, 809 bp, Oryza sativa
  Clone ID: PAT_MRT4530_45990C.1
atggcagttaaggaccggttcacgggaaaccctgggagacttaccgtgcttaccacaagcgggagcaccggtggcgagggtgggcgtgatggagttgggtcggccgaggtgttcggttgtccagctgccggattcaccgcggcgcaagaggggaccgcccactgccttttgaggggtgggggtgaaaccttagcgtggtgtggatggttaggggagggttatgtggagggtcttgtcacgatttccccctttgcagtatcatgttcaggtggttggttgggcctgttgcaacgtggtgtagcgttggacagtgattggttaatattgattaattactacagctgttttactgctttcaactactgctttgaaatgcctgctttatgcaaaagaacccctagcttcctttggttatatcctgcatcatacctcatcttccggtatgacttgctgagtacagtgggtagtactcagtcttgctctcttttcccccacaccagagttgaagttcttctcagttggagccgtctcagagaggttggtttcgttgctgccgtcaagcttagaaattctggttcgagaatttctgggtgtgacatccccggagcagctcgaggagcatcatcagagacagcagctgagtggctatcaccctcttcctcttccatgtgctcatcctccatctggttcgaggatgctgcctcattatggcgacctctaccacgacctcttccacggcctccagcacggcccctaccacgacctctgttggtaattcttacgatcacagataaaatccgcaagcgcat

SEQ ID NO: 42771 - DNA, 592 bp, Oryza sativa
  Clone ID: PAT_MRT4530_45991C.1
acaacatccatcaccaaacccgcattcaaaacaagcaaccctcctcccgaatcgaacaaggaaacagatatcgcctctaaaacccccatcgtctcgtctcgtctcgttcccctctccatcttccgcggctttccgcgcgatccaccgatccggtttccccgcgccgtgcccggagtcggcgctccattcccgcgccgggttttggggtggtgtgttgatgcggcgggattcgagccctggcctgtgagttgggcgtcggctcggcggctgcggggtcggcgcgggcgcggacgcggcggatgtctgctatgaggcggcggccggtgctgccgactcaccaggacgacatggagaaggtgggccggaaagccgccgcagtcgcgcctctgcttcctcgccacgctctgcgccatgttctgggtcctcatcttctacttccatttcttcgtcatcgccaacgagcctggctccgcgggggcggacaccgccgccggcgccgcggcgagcattgcccgcgcagaacttccgctccccgaacccgagcgcgtctccgatcccgcggttcccctccctccgcctgccctcgtctcgg

SEQ ID NO: 42772 - DNA, 683 bp, Oryza sativa
  Clone ID: PAT_MRT4530_45992C.1
atggcagttaaggaccggttcacgggaaaccctgggagacttaccgtgcttaccacaagcgggagcaccggtggcgagggtgggcgtgatggagttgggtcggccggggtgtccggttgtccagctgccggattcaccgcggcgcaagaggggaccgcccactgccttttgaggggtgggggtgaaaccttagcgtggtgtggatggttaggggagggttatgtggagggtcttgtcacgatttccccctttgcagtatcatgttcaggtggttggttggggcctgttgcaacgtggtgtagcgttggacagtgattggttaatattgattaatttactacagctgttttactactttcaactactgcttttaaatgctagctttatgcaaaagaacctctagcctcctttggttatatcctgcatcatacctcctcttccggtatgacttgctgagtacagtgggtagtactcagtcttgctctcttttcccccacaccagagctgaagatcttcctagttggagctgttttgtcaaagttggtttcgtcgctgccgtcaagcttagaaattctggttcgtgaatttctgggcgtgacacctacttcctttttattagaaatccagcagctatgaacaccaccggaggaagttctagtgcaaatgcatctagaccaataccg

SEQ ID NO: 42773 - DNA, 330 bp, Oryza sativa
  Clone ID: PAT_MRT4530_45993C.1
atggccatcaatgcgacaggtcagcacggggggctgtacacgcggcaggtcctcgtgctttggagcctgaccagtgaccaccactctgctacagctcagctgcactactggccctggaggacggccaccagtcctggaaccaactgccacggggtgaagagagggcagaccagccagaaggcggcaacactcggagccagacctgccgagcaacgaggaggatgtggttcgccgtctcaagatcctgagcgcaaaaagggcaagccgagctccaaggtgcagagcatgtgggacaaggacaagagccacacggacactgtgccatgctga

SEQ ID NO: 42774 - DNA, 786 bp, Oryza sativa
  Clone ID: PAT_MRT4530_45994C.1
atgcaaagagaccagacgcaccagggagtcgaagttgtcgcggaggtgctcaggaccctttgcattccagagaagatcagcatatgcaaaggaatgctggccatagaagaatgcatgctgtacatgaagcaccgcatcccaaataaggagaaattgggagatgaccgggatagtgagggcaccgcggatatcagagacccaagagttgttgctaggccagaagcaactgtgcgcgaacctcggagacactggggaacgacgaagaggagatctagagccaaggacgccaccgagcggccgtcgatccgttggtcagaccagaagagcatagactcaccatttcccagcaaaaagaaggtggatgccatgaacatgtcggagacggaaggcgcgacacttcttgtaaaaggccttaataacccagactggaaggccgatcgccatagatacatggaccggaatggaggagagaactgtctggaccagcacagaatggccagccagagtcctggacgcggcaccaaaaacataaagaataccctggatgaactcgagatcctgatgaatcggggagaagaagaggaccagatcatcagcatagagggaggcgcggtgttgcaaggcccgatcattaagcggaaggaaaccaccggagtcggaggcgtggcggagcatcgcattgagtacatccataaccagaatgaagagcatgggagagagaggatccccttatctcggaaagtcaaaaatctaacgagagtccctaaagcacaaacatttccctaa

SEQ ID NO: 42775 - DNA, 235 bp, Oryza sativa
  Clone ID: PAT_MRT4530_45995C.1
gaaaccatagaaacttcaagaaagagggatggtcaatttagcgaattatcgacaaattcttttttgacgagatcaagcagtggagcagctgtagagaaaaaggtggctactgtattgcctttggcttcggttctattttgttacctcctatcaaaatttgtacaaaacagacagtcacgcaccatgtttacaagtaatgataatgttggttatataaaaaaaaaaaaaaaaaaaa

SEQ ID NO: 42776 - DNA, 1639 bp, Oryza sativa
  Clone ID: PAT_MRT4530_45996C.1
ctgtcggcaagaactcgaatttctagttacccatccgtcgttggtaggaaaagtcaaaccgacatcactgatgcccatcatgcagatatggtggcctaagctatttactattaatttcacgtggcaatcagacggagccacgagctgaggcggcggcggtccgaccggccggccggccgccggcggcgtgcatgcacgcacgcgcacgagtaattgggcggcgccgctccgcgtcggcggctggcccggcttgtcgtccccggccacgcggctgtcggtggcctgcacctgtccgcgccagctggcatggccatcaatgcgacaggtcagcacggggggctgtacacgcggcaggtcctcgtgctttggagcctgaccagtgaccaccactctgctacagctcagctgcactactggtccccatgcacgcgttgaacttgccggccaatcgggattcagaagatcggttcgagtcaacgcgttcacaaaattaagctcctcaccagctcgaaatggagattggacgtgtacagctcgatccttaattactcgctgacgtggcacaacactgggaccgaagagagagcgtagtcgaaaacctagagttccgctccttccacagacaccaagagaccaggagctccagggagtcgaagctgtcgcagaggtgctcaggtaagcaggccctggaggacggccaccagtcctggaaccaactgccacggggtgaagagagggcagaccagccagaaggcggcaacactcggagccagacctgccgagcaacgaggaggatgtggttcgccgtctcaagatcctgagcgcaaaaggggcaggccgagtgactatcgatgccacgcttctggaggagatcagccgtccagcagagctggttaaatgagatgatccttgacacccggcgagagctgtacatgaagcaccgcatcccaaataaggagaaattgggagatgaccgggatagtgagggcaccgcggatatcagagacccaagagttgttgctaggccagaagcaactgtgcgcgaacctcggagacactggggaacgacgaagaggagatctagagccaaggacgccaccgagcggccgtcgatccgttggtcagaccagaagagcatagactcaccatttcccagcaaaaagaaggtggatgccatgaacatgtcggagacggtttgctcgactggggccttcaggccatcccaataggggtgccctgagcactggagccagagccagcgaacatgcaggtcaaaccctgtccacaggaaggcgcgacacttcttgtaaaaggccttaataacccagactggaaggccgatcgccatagatacatggaccggaatggaggagagaactgtcgcgtagggaaagcaggactgaaccaactccaggtcctcagccgagcaacggatcggggtgatcgaacatttggcaaagttggtgcgtagcctggacgcggcaccaaaaacataaagaataccctggatgaactcgagatcctgatgaatcggggagaagaagaggaccagatcatcagcatagagggaggcgcggtgttgcaaggcccgatcattaagcggaaggaaaccaccggagtcggaggcgtggcggagcat

SEQ ID NO: 42777 - DNA, 450 bp, Oryza sativa
  Clone ID: PAT_MRT4530_45997C.1
aagggaccctacaaaacttgaacccattagcagcacaaacaccattggatatatacacaaactaggggggctaaaattttgctcataacccactgacatggttttttgaaaacatggatagggtctacaccaacaaatagttttatttttccaaaaaaaaaacaaagatttaagttttttccattggggaaggaaaaacccttttaggtaaggggacaaacccccgaattaatcttagggggaaaatacccaacaacatgccccatttacgcaacccctcttttaaaaggataaatcccaaccgtggattggttttccgaaaagccaagggctcgatttgggaccacccttccgacttggccggacaatgcctaggtgctttaacaaatttggtgctttaattaattatccccttacattgattatctaccctggaaggaacccaattaa

SEQ ID NO: 42778 - DNA, 363 bp, Oryza sativa
  Clone ID: PAT_MRT4530_45998C.1
atggccggaatagcttttcccccaattgctcccatagcggcggcgaccggagttgattccggtgaaatccgccggctcaggtggtccaccgcccaaggcatcactaggcgtagaatcggaacacggcgaacgaggtaccgcggtgagaatgctggtgaggtcccaaattggacgtcgagagggaaggggttctctacggcgggcactggactaggagcggggaaagaacgggggcaccgggcggcgggcaaggcgcggggccacgggcacggctcggctatcgggccgtgccatgctttggccaggccaaaattgcgggctttggggtgggccgtgggcctcaggccatatggctatctatag

SEQ ID NO: 42779 - DNA, 1731 bp, Oryza sativa
  Clone ID: PAT_MRT4530_4599C.1
ccggccggaattgaaccgatggttgaagtgaaccaaaatccgtaggtcgtatcgtagggagggcctgcgccgatccccatccgtcccgcgactcgaactcgagcgagcagaggcggcgccggcgctcgtcctgccgcctgagccgatcccatccatcccgcgagcgagcgagcgcttccgccgcatcctggtcctggatcaggtagaaggagatggcgactcttggtcttgccccaaacatgaatccaaacaagtcatttgaggtactgcctaatccaggtgactccgtatcgagcctcagttttagcccaaagagcaaccttctggtggcaacttcctgggataaccaggtgcggtgctgggagattgttggtgggagtagtcaaccaaaggcatctatatcgcatgaccagccagtcctctgttcagcttggaaggatgatggaactactgtgttctctggaggctgtgataaacaagtaaaaatgtggcctctgttgtctggtgggcaggctcagactgttgcaatgcatgacgcacctgtcaaggagatcgcttggattcctcaaatgaatcttcttgtctctggaagctgggataagactctaaggtattgggacacaaggcaatcaaatcctgtccatgttcagcaacttcctgagcgctgttacgcacttacagtgaattatccccttatgattgtgggaactgctgatcgtaatctggtcgtcttcaacttgcagaatcctcagacggagttcaagcgcatccaatcgccactcaaataccagactaggtgtcttgctgcattcccggatcaacaaggatttttggtgggttccatagaaggaagagttggtgtgcatcatattgatgactcacagcaaagcaaaaatttcacgttcaaatgtcacagggaagggaatgatattttctctgtcaattcactcaattttcacccagttcatcacacgtttgcaactgctggatcagatggcgcatttaatttctgggataaggatagcaaacaaagactgaaggcttttagtcggtgccctcttcctattccttgcagtaccttcaacagtgatgggtcgatatttgcttatgcagtctgctatgactggagccgtggggctgaaaaccacaaccctgccactgcaaagacatccatctatcttcacagtccacaggaatctgaggttaaagggaagccgagaatcgcaacaagtagaaagtgattacatccagctacgcaaaaccaaagagtgcacaagaaatcatgtacattggaagaccaaaacgtttctccaggacctctctgtccatcgtgtaggatgcttttctcttggttggtcatcaattttgttgtgtccagtctggtgttagcatctggtagatgtaaatgtcagcctactcgtagtcactgaagatagggggtttagtcgcaggttttagcatgcatcagtttgcagtgactagttctatttaagttatgtttaccaagtttatgcgagtcttatgttgtcgatataatcagatcagcccgaaccgtttctaagggaggtgttgcaagtgatgtaaattattgcaaatgtagattcatatttcgttagaattatcgccacgttctgagatgtactaaatttacccgtgagaaaccagtggatgctgactttctggttttggcccgtgaatctgaatggcctacttgaatttgcagcccggggg

SEQ ID NO: 42780 - DNA, 814 bp, Oryza sativa
  Clone ID: PAT_MRT4530_459C.1
atggcggatggtgcaattgatagctcagaagtgcaattatccacaaatgctcatccttctcacacttacacagttagacctagccaaatagaggttgaactgcgtcaagagcttgctaatttcaagcatcagcgacaagaggattgccaatcaatacaaaatgctctatctgagttcaataatcagacaaaggagtatatgattaatggatctgcaagtacacctccacctcagatcaatttggctgcattatttcctagccattcatctccaactactcagcagaatactacaaataatagctccagaaatgtgttcaaccaaatagatggaaataatagtggaaactgcagccaacaagatgctggtttgagcaacaatgaacagggtgacatgggaaacaactctgaaaatgtggtgttacaacgcatggatggaagcacatttggttattctagccaacaaactgctcctgctactaatcaaggcaacagtaagcgagggagagatggagactatgttgatagtgaagatgattatgctgatgatggaaactatgatgatgctgatgaaactcctgaaccgttcgttgctgcagttatagttgattatccttgtacaaagtagtgctcactgttttatgttggttaggaacttcaatttacttatccttagtgcaagacaattacttttatttaggaacgatgatttatgtttttattgtgaaacctaatgtcagtacaatttctgattatatgtgatattattaattaagtcatgagatcactggttcaagttaaaaaaaaaaaaaaaa

SEQ ID NO: 42781 - DNA, 1363 bp, Oryza sativa
  Clone ID: PAT_MRT4530_45C.1
ggggatggcaacactttatttaatattaccacacattctgcgtgcaatgcacaagcttatgaaacggcgcttcactcaagtaagttttacgcgcaaattaaacatcacgaaagcatatgacacaacacgctacgcatagatcgacaggtcagctcattccaaatacacgcgatgtagaagaacaggagcaagcaacgcgtctgatgaaacacttctgatgaaatcttgggcaacgctcttccattttgaaccagctattttgaaccaggaactgtatttgaacagacgaaaacgattaattgcctgatctccacgatgacagcggaggagtttcagagttcttccaggtgttcagaaaagtaccatgatacctgtcaccttgcacaacgtcagctgaagcatacgactcaagttcagacatctcgtcaggtgtgagcttcactgacagtgctcccacattctggtcgaagttgtggatctttgtggttcctggtatgggacagacatcgctcccttggtgatgaacccaggccagtgcgagctgcgacgatgtgcatccctttctcgctgccatggcattaaccttctcgaatatcgccgcgttcttctcgaggttctctggctggaatctaggtaggctcttgcggaaatcgtcgtcaggaagttcatcgaccagtttagctccactggagaagaaccctctccctagcgggctgtacgccacaattccaatgccaagttctctgcaagttggaacaatgtcttcttcgacatcccttgaccacagtgaccactcgatctgaactgcggtgatcggatgaaccacgtgagccctccttatcgtcgacgcagaggcctcagataatccaatgtatttgatcttgccttcttcaaccagcttcttcagctcacccatcgtgatctcaacgggcaccgtggagtcgattcgatgctggtagtagaggtcgatgcagccgacgccgagccgccggaggctgccctcgcacgccgcccgcacgtacgccgggtcgccgcgcacctcccacgccggcgtgatgccgaacttggtggccacctgcacctgcacctcctcctccgtcgccgccgccgccgccaccgccttgccgacgagcacctcgttggtgtgcggcccgtagacgtcggaggtgtcgaggaaggtgacgcccgcggcgacggcgtggcggacgagcgccaccatgtcggcctccggcttccgctccccgtacaccgccgacatgcccatgcagcccagcccctgcgccgacacctccatcccctgcgaccccagcttcattcgccgcaccaccgctgccgccggagctgtcgctgctgctgccgccat

SEQ ID NO: 42782 - DNA, 251 bp, Oryza sativa
  unsure (1)..(251): unsure at all n locations
  Clone ID: PAT_MRT4530_46000C.1
acgacatcgaacggctcgatcgatgggtcgtcgtcgcgtgtgaagatgtttgtcatcctctttctcctcgccctcgcagcgagcagcgcctcggcacagtttgatgcttgcacctatgggcaatgccagnagcagncgnttatgccancgatcatgaacccgtgcnatgagtnngtgaggnnncagggnanncngatgagccttccttggaagcagttttccaggttttgtttgtggggggggggggggat

SEQ ID NO: 42783 - DNA, 549 bp, Oryza sativa
  Clone ID: PAT_MRT4530_46001C.1
atgccgcggcgctgcctcatggctcatgccacccgtggcttcactctcatcctgtcaattttcttgaaaaaaaatattcgttcagaaaaaggaaaaaacaaacttagtactagtaccagtactaccctaagagcaggcgctcaagctgttcacttcttcccggttgacaccaccaggaggaatcatttaaagcctgacggaacacggcctgattattttgttggcaacaacctttgtttggacccctcctctcctcccaggtcaatcaatcaaccaattcaagccgatgctgatgctgatgccgatccatccaaaaagtctaccgctactccaacacaagtgtacgagaatttgataaaagatcaactatttccctttcgaagcgagcgtggtgaaaaggatggcaccaaccaatcaagtgtcatgaacggcaaggaaggacatatcaaagaaaagaaaaacccgcaaataaggacaactagctatggatgtacggacgaattccaatttaccattgtctgtttaatgcagattactcctagaaataga

SEQ ID NO: 42784 - DNA, 1213 bp, Oryza sativa
  Clone ID: PAT_MRT4530_46002C.1
cacgcgtccgacgacaatggcggcgacacgcggctccgtgcggctcctcctcctgatcctcctcctccgccccgccgcggcggggagcccactgatgatgacgtgcgccaagacgccgcacccggacgtgtgcatcaccgtgctgggcgccatcccggagtgcaggaacaccggcgacccgcgcgtcctcgccgagaacgccgtccgctccgccgccaccatcggcgcggcggcgggcacgttcgcgcgcgcggagctcgacatcgtgaaggacaccgacatgtggcagtgcctggacgagtgcgcgcaggacatcgaggaggccgtctcccacctcgacgacaccgagggcggcgtcgtcgacctcgacgccaagttcaaggacgtgcggctgttcatggacgtcgccgagagggacacgtggtcgtgcgaggagagctgccgggacgcgccggactccaccgtcaaggccaccctgctcgacaagaacgaggcgttcgagaagttcatgcgggtcaccggcgcgctcatcgagatggtcatcggaacggccggcgagccggcgccggagcccaatttcctcctcccaccaccgattcttctcctcccacgccgtctgctcccgccacccccgctgctcccaccgtcaggaaaggcggacccgtccgccgctgcccgccgccggtgctcccgagtccgcatcgaccaccacatccgccgccctgccgctcccaccatcgagaaaggcagatccatccgccgccgcccaccgccggtgctcccgagtccgcatcgaccaccacatccgccgccgcggccaccacatctacctcgtacgccgaggggagaatgggccgccgcggcggaccgggaggtggagcggtgggcggcgacgaggccggtgatggtggttgacgcgacgggtggtggtgggctggtggccgacgcggcgggcggcggcgaggccggtggtggtggccgatgccgccacggcagccggagatgcctcccgccgacaagagccggcggccacgcgcgcaccggcgagctgccgccaagaacgagggagaggaggtggcagatgccgaggacgagcgtgccgaggagagagcgggccgtcgtgacggaccgggaggaggagcggtgggtggggcggagtggaaggaggcgagctcgcgatgggatggaggaaaacgggagcaagggtgggtga

SEQ ID NO: 42785 - DNA, 398 bp, Oryza sativa
  Clone ID: PAT_MRT4530_46003C.1
tttgccgcggggtcagccgcgctgcatcagggggagggtaagctacctgttgcgcgctacaaagatgctgaggcacaaggcacatctctcacatagaaccctttagctactgcacataacatacagggtgcaacagagctgccaagatgctgttgcccacgggatgtggaccatatctgagtatctgtgccgaagaccatctctgatgaaggtcaacctcctggcatctggatgctcagaacgggcatgattgcgcttacaggaaatgtggatgtatcccgccatgtcgatcattgcctatgaatagctgatcccaacgtgagtggcatgagtgttgaatgggcattcaatttgactggacatacaaggctttctgtgacttgcctaatgggtgagca

SEQ ID NO: 42786 - DNA, 699 bp, Oryza sativa
  Clone ID: PAT_MRT4530_46004C.1
gcacgcgcgccttgttttaccgctccttccttgcccccacccccgtctcctcaccactggctccccgcgcgccaccgcattttcttgtttgcgccggctgtgcccccggcgccgccctctcgtggcccttcacccagaggttcgcgccagctcggcacctctccccccggggtaggtgctgcccgccgcatgctgatcgtcagtatctggccgcgttgctcgccgagcatcagaagctggggccgttcatgcaggtgctgcccatatgcaccaagctgctgagccaagaaattatgcgggtatcaagcattgtccacaaccatggatttggtgattttgacaggcatcggtttagaagtcctagccctatgtcttcgccaaacccaagatctaatcgctcttggaaatgggtttagtccttggaatgggctacaccaagagaggattaggttttcctcaaggacccagcatggatttgcagggcgcaccaccaggccctagttctcatgttgtaaaaagtcttccgcgtttggttgtcccgcttggtccttatccctgactgtaataaacaacttgtatattcattctgacctttatgctactcagaaattatgcgggtatcaagcattgtccacaaccatggatttggtgattttgacaggcatcggtttagaagtcctagccctatgtcttcgccaa

SEQ ID NO: 42787 - DNA, 366 bp, Oryza sativa
  Clone ID: PAT_MRT4530_46005C.1
atggcttccaacggctgcggcggcggacacagtggccagccggcgaaggtggcggcggcgggggaggcgagacagtgcatctgctcgcccacgacgcacgagggctccttccggtgccggctccaccggcgcggcggcatgccgaggtcggcctcgtgccagcagcttcagcttggcgccgagagctcgccgctgctctgctccgcggccgccatgcggaggtccgcgtcgcagctgcagttcgcgaaccagcaccctttggaccccgggatgtcgaggtcggcgtcggagaaggagctcccgccctgcgccggcgtgccaagatcggcgtcgtggcaagattttgctcaaaaggaggatcactga

SEQ ID NO: 42788 - DNA, 693 bp, Oryza sativa
  Clone ID: PAT_MRT4530_46006C.1
atggcggacaccgacaagccgggcgtcatgtacgacgacatcaatggttgcgaggcgcagaagcaggagctccgggagggcgtcaagctgccgctgacacacccagtgctcctgcatggaccaccaggcgccgggaagagcatgcgggccaaggtcatcgtgtgcgagacctcggacacagccatcgtcttcatcgacgaggtggacgcaatagtggcgggccgactgagaagtggtgggtcaggatgggatcctcctgcaaaatcaacgcttcagacgcgcgccctctcccctttcggctccctctatcgcgcccctcttcccaactgctctccccgctcccttcgccgctgcccccgctcgctcccgattccccagcgcaatcgcgcccgcgcacccaccccttgcgccgcccctccgcccgcgaccccagcgccgccgacgcctccctccctcctcgtgtaccaccggatcgcgacaccggcccccgacgacgcgtctgcctcccctcactcctcgccatccgcaaccaccgccggattgcgggagctagcacccgacgacgcgaccctgcgccgagcagcagacgtcgccactggatcatgggagctggcccccgacgacacgaccccgcgccgagcagcaaccgatcaccccgccgtggcagaaggttgcctcaaagctctgaattga

SEQ ID NO: 42789 - DNA, 1141 bp, Oryza sativa
  Clone ID: PAT_MRT4530_46007C.1
tattaaccctcactaaatgctggtggttcgttcttggttcttgccagagaagatttgcgtggttgcatattgcgatgacgacacgtggtctgtgttacccccgcttaataaccctgtcggtttctctgttcatcttggcgaatttggtcgttgatttgatgatgataaccgttttgcgtgatatcgtgtgtgaagatgcagttatgtttctccgtttgcggtgggaggtttcgcgatctctttctgttggctgtgataaatccccgcggtgtcagtggaaggtttttgcgatctctttgttggttgcgataaatcccgcggtgtcaggttggaatttgggtgcccttggttgcgttagtctttcctgttcatgatgccgatcgaattggttcaggatacgtgtgatattatactccatcgatcgagttcgttgtttccagtttctaccgcataacaaaacccaggacattttcgtttgaatcgttgaacagcagtccgattgtgaattttcttttctctttacaatgaaatttcacaaagtatctgcactctgctatcgctgttcttttgcaagggctatcacaggacactgtactctgttcattttcatgtttctgcctggattatgtgtcaaatcaaccgcatgactaatgccgcatgtagctctgcgcggagatgcgcgtctctccccggccggggctcccttgctggagcgcgtgggcagcgctggttatatagcactgttgtgttggatctgtcaggtctgacagataatttttttttcttccactctggctgttacacaaaagctgctggtgtgcacctctaggctggctgttcaattttcttctggaggaaacccatattgcatttgctggtcatactgtctgctggggttttcctttgattatggttaactctggtagatcagaacgaagcatacagatacactaaccagtatcttgcaattgctcactgaagttgaaaatggttcggttctcttgcttctcttattcgtcccgccatcaccgatcaaaggtgctcgttgccgcccccgtcggtgtctgttgggctgctccgtatgctgcccccagcgttgagggagggttttgtagtaattctaacgttgagcagctcagaa

SEQ ID NO: 42790 - DNA, 279 bp, Oryza sativa
  Clone ID: PAT_MRT4530_46008C.1
atggctccgaacgacgccggcggtgtcgccaaggaggcgccaggaccaaggacggaacgcgcccgccgcaggccgccgatgcagcgggtctacgcgttccagttcatgctgcttggagcgacggccatcattggcgtgtacgccgagccggtgtcgtcattgccgcgcctgttcctggcgcttgcgatcaagattattgacccgaaggcacagtcaattccgtgcaagtcccgcggatttaactgtggatataacgagttcgagtccttgatgaactag

SEQ ID NO: 42791 - DNA, 276 bp, Oryza sativa
  Clone ID: PAT_MRT4530_46009C.1
ctgatgttgactagggttcccgatcttccgaaaggttctaataggtagtcgatttggacggagtcacgacacagttcgatccggcttctaaacaaacacgctcttgagccccgcaatcgcagcaccacgtctcctctggttatcacccgtgttgaaacacggaaaacgcccaaatacgatgacgcagcaccggaatagattatggacgttaaattgttcggtcgattcccgttgacttggaaagaatttgaacgtgggaccagaaccattggaaag

SEQ ID NO: 42792 - DNA, 1710 bp, Oryza sativa
  Clone ID: PAT_MRT4530_4600C.1
atgtcctcctccgcctcctgcctcgcccctccccctcttcgtctcccgtgctcctcctcctcctccccctctcccgccgccgccgcgaggttcggttctcggaggagggcggtagccgcggctgctccggccaagggatggaggctggtgcgcgtctcctgcttcaggcaggaggatgtcccgacgacgtctgacgacgggcccggcttcgagcacatctcgcggccggagagctcgcggggcgcggaggcgagtggggaggagggggaaggggaaggggaaggctcgagcgggcagcgtgagcgcggttccggggaaagggatgattggttcctcagagcgcaagagataaagagaaatttacgagaaagaatattcagatttcagactcaacgatggactgtaccttggaccggaaaaaccattgctcaggtcatgattttatggattgccacattttggtttgtgggttcctggatagtgccatttttggctcatgctgctggctttagcaaggaatcattgacacataggggccaagcactctatagcctcttgacggacataactgaaggccttgctggaattgctattcttcaccattgtcttggtagatttcgtccccttcctccaggctggtttgagttcaatttgaagggcagatggtatttggatgtagcgttggggtgcctgttattcccgctggtcaattttctctctcacatcaacatcaacctaataccaatgtcatcagggccagtccctggggtttccagtgtagaacagtccattgtggcccgtgatccagtggcgatggttttgtatgctgtggtggtcactgtatgtgcacctatatgggaagagattgtgttccgaggtttcctccttccatctctaacgcgttacatgccacttccatggtcaatcctggtaagcgctgcagcttttgcactggcacacttcaatgcacagagggttatgcctttggtttttcttggtgttgtgatgggaggggtctttgcaagatcacgcaacttgttggcgtcaatggtgttgcacagcctatggaacggttttgtgttcttggatttgatgaagtgagctattctggtgagactgcaacttcgggcacctgagacaagttctactaagactatgttttgcgtctttcgtggagatgatgaagaccagtctattcaggacacaggggacacaaggtggtagtcagatttttgtggagaaattgtgtagagtaaagagaaaagagcagtttgttggcgcgctagtgcaggaggaatagtctttagggtgttattccttggcctgaggcccagaagcgtctttgttgctttcgtgtaaattacatacgcatgagaataattgtctcatcgtgtatagatttcccatttcgtattaaattgtgtattcgtttcccctagtgtgggctctggaaaataaattcatttagcaagacggccactatgcattcgaccgattcttttgcccattagattaataagctgtagtgattctaaattcagagaaaactatcagtattatgtgttgagatgctttgagcgatgttatgtatctaaacgtgaatgagcattggtggtgttctgcatatctcgtgtgagcctcgtgcatccaggagaatgcctcgatcgatggaatattattttcatggctctcttacaaaaaaaaaaaaaa

SEQ ID NO: 42793 - DNA, 200 bp, Oryza sativa
  Clone ID: PAT_MRT4530_46010C.1
gaatcccgaggaattattcgataaagataagcttacattatgaagagcagcatattacagccgtatggggtcgtacttgacagtaaaatttgaagagcatcggaagcctgttgatgtagaggtcgcagtttcagcatgccaagttccaaggcagcgcacacaggtggcatgggtcaggttcatcatcagggcatcatagc

SEQ ID NO: 42794 - DNA, 335 bp, Oryza sativa
  Clone ID: PAT_MRT4530_46011C.1
agttcaagctggatcagactatctattatggagaaagtgcaaggctggcgtgtgcttcccatgactactacactcgatgcacaatagcaagaggttgaacgggaattacatgcagcaggtgaaaacaaatgtgatactttgtatcacacgccataagccgaactgtccttgctcccggtgacattactactgagcttctgcaacaccttgctgtttgataggctttacaaaccttttgcgtctagaactggctcaccgcaccaccaaagcttatgaaaagatctaagttcttcgtcgcacggtcgccttaccgaggatccggaccttaagggggc

SEQ ID NO: 42795 - DNA, 136 bp, Oryza sativa
  Clone ID: PAT_MRT4530_46012C.1
ggtcgaggccagggtggagttgtgcgccagtcggctagagagcaggttcagctttggccgcggcggtgccctgcaggaggacggtgtggcgctggtgccaataaaggggagaggaggggcagctggttttatttaa

SEQ ID NO: 42796 - DNA, 1056 bp, Oryza sativa
  Clone ID: PAT_MRT4530_46013C.1
aacggctgcgcgtcttcccgttcgtcctcctgtccggtccgagtccctctgacgacgcgactttccccacgccgggatcgagctccggggaggggagctgcgagctgaaacactttgtcatatcagtcaacagtagagaggagaccagatgcaggcatctagagctaggctctttaaggagtataaggaggtgcagcgagaaaagtcagctgatccagatatccagttaatctgcgatgattcaaacatattcaagtggactgctcttatcaagggcccttcggagacaccttttgaaggtggtgtatttcaacttgcattctctattcctgagcaataccctctccttcctccgcaagttcgcttcttgaccaaaattttccacccgaatgtgcatttcaagacaggtgagatttgcctggatatcttgaagaatgcgtggagcccagcatggacactacaatccgtttgtagagccataattgcattgatggcccatcctgaaccagacagtccacttaactgtgactcaggcaacctcctgcgctcaggcgacatcagaggctatcaatccatggcaagaatgtatactaggttggctgccatgccaaagaaaggttaactccagggtgcaaaaggaaatatgcgccaagcgaaggcatggctgattcatgtgatttgctctgttaagtgtaactcttactgtcaccatgtgaacatctggtacttattttcttacctcactcttatggatgtatgccctggagtgaagagaagaaaaacatgcattgtaatgcttggtctatatgatgtcataaatataactgggttcggtacttctaatgcaaaaaaaaaaaagccattgttggttattagcatttatactaatgagctaagatgtgcagtgtcacttatattgtatagttcctcattatgaattagaatgtaattttcccagtaaatttgtattggtcccattcatcccacctgctctaccgcctcacggtttatgtttgagattttttcagatggcactttggtcacattgcatccaaa

SEQ ID NO: 42797 - DNA, 1324 bp, Oryza sativa
  Clone ID: PAT_MRT4530_46014C.1
gtggatccccgggctgcagccttgccttgctgcatctgtatctgctactaccactgctagtgccactctccaacactccactgaatcattcatcttttgaagatttttttttttacctctcttcctcctgtgctctcctctcaatgcaaaagagcacacttgactcttgccttctcaccacccaatctctcttgctctaagctctagttcttcatctctctttctctatcactttcttgaagacaatgcaggctctggtgagctccaacaggaggccattggccattgtggttgcagcaccagtactccagatgctactaattgctgcattgctccatctgggttcttgcaatggaggagacaggatcgagaggctaccagggcagcctgaggtgagctttgggcagtatgctggctacgttggtgtggatgacaagggccagagggctctcttctactactttgtggaggctgagcttgatcctgccacaaagccccttgtgctctggctcaatggaggtcctggctgttcttcacttggtgttggagctttctcagagaatggcccattcaggccaagtgggcaggtgctagtgaagaatgagtacagttggaacaaagaggccaatgtgatctacctggagacaccagctggtgttggttactcctactctgctgatgctgcatactaccagggtgtggatgataagatgacagcaatggacaatatggtgttcttgcaaaggtggctagaaaagttcccacagtacaaaggcagagaactgtacatttctggagaaagctatgcagggcattacattccacaacttgctgatgtcatggtggaatttaacaagaagaacaaaatcttcaacctcaaagggattgctctgggcaatcctgttcttgaattcaccactgacttcaactcaagggcagagtacttctggtcccatgggctgatttcagactcaacatacagaattttcacctcagtttgcaactattctcgctatgtcaccgagtactatggcgggtcgcttaccccgctttgcgcaagggtgatgaaccaagtgacaagggagactagccgattcgtcgacaaatacgacgtcacattggatgtctgcctgtcatcagtcctctctcagtccaagatcctcactcctcatcaacaagtaggacagcgaattgatgtttgcgtcgaggacgagacggtgaactacctgaaccgggaaggatgtgcagggaagcactccatgcgaagctcatcggtgaaagaattgggcagtttgcagcagtgttcttgagtatgagctactca

SEQ ID NO: 42798 - DNA, 1869 bp, Oryza sativa
  Clone ID: PAT_MRT4530_46015C.1
atggccggcgtcgccttccggttggggcagcgcgtgcacgccgccggcgaccccgcccgcgtcggcaccgtgcgttacctcggccctgtcgacggccaccccggagactggctgggcgtcgactgggacgctggccccggcggccgccatgacgggtcgctcgccggccgccgctacttcgctgccgccggggaacgctccgcctccttcgcgcgccccaccgcgctcagcgccgggatcacgctccccgacgccatacgcaacagctaccgtgtcgaggaattcatgaaggaggatcaagatgaaatgtatgtcttctcatcaagtcagaatcgcgttgcataggaactggttgaaaagtgtaaagtttaggtacagttgaaaaacctcaatgacctgagccgaggctgtgtatcctacatgggaataagcacgattgggtcagtaaatgaattaacgaatagatgtggtcatttctgagggctcacttaacctggttacgagctttccaggtgtcaggctttctgataatcctgtaactgaccctgctcagggcaaagtgcctcgttgactgataatcgcctgactaataaaagtaaagacacttaatggtagtaagataactccacgtgagcgaagggaagcagagatacgatatgttcgccttgttatgggaaaagctgattcatatgatcctgaagagatcaaacggctgcaccctagatttgctgagctgaaagcctttcatggtattgaggatgagaagccgagttcaaaggacttctggtcctcaaaaaagtggcttctgggcttataagtaatgaaattgtgaaactatcttacttaagaagcttggaacagctccatttgaataagaacatgctaaaacatgtaacatatccatccaatcctcctccactaggatctcttggcgatgcagctgttttgccttttgaaaaactacgagttcttctcttaggatctaaccagatagatgaggtcctttctgtggattcacttaacctctttccgagtttaacattatggcttagcacgccaatactaatatctacttttctaaaggatgtcaggctttctgataatcctgtagctgaccctgccaagggcggcgtgcctcgatttgtgcttatcgcccgactaggaaaagttaaaatactgaatggtagtgagataagtccacgtgagcgaagggaagcagagatacgatatgttcgccttgttatgggaaaagctgaatcatatgatcctgaagagatcaaacggctgcaccctagatttgctgagctgaaagcctttcatggtattgaggatgagaagccgagttcaaggacttctggtcctcaaaaaatggcttctgggcttataagtatcaccttgaaatgcgtagggccatctatgggtgagaagcaaccattgacaaagaagctgcctcctgcaactactgttggaaagttaaaatctttgtgcgagagcttctttaaactgaaggacgttaaactgagactgtatcttgaggaagagggttgccctatgccgcaattcttcgaggaagacacggtttctctcatggagcttgggatcggcacgggatcgaccattatcgtggacgaagaaagctagcctaatctagtttactggcattctttgtgtgcgttttaatttgatttatttgagtaaatttggtgtgttgagctggagaaaacaaagtccctgtaacatggtacaaatgctcaagtaacttacactcggcagcttaacgccatcaaatgtgtgtgcatgtacgtgctctcgagtctcgactcgaccccattatgagtcatgacagaaagacaatcattcttgctgttt

SEQ ID NO: 42799 - DNA, 312 bp, Oryza sativa
  Clone ID: PAT_MRT4530_46016C.1
ggtggggaggaacaaagttcagcaaggaaaaccaagaaaagttggatggtttctatgctgggtccaaccaagcttgggcaaagagtggatggccacacccacctggggattttttagtgtggctgcattgcactgagtatgtgcccaaaataaggtggtggtattggttgtgacagattacagcagatggatatttccctttgtagtaccgtggagctctgtctgttcacacactgaacaacaacttttgtggctctggaaatggtccacaaaactaaatgctgatctttaccggtaaaaaaaaaaaaaaaa

SEQ ID NO: 42800 - DNA, 620 bp, Oryza sativa
  unsure (1)..(620): unsure at all n locations
  Clone ID: PAT_MRT4530_46017C.1
atcacattgattcatgggatgaaattgtgaaactatcttacttaagaagcttggaacagctccatttgaataagaacatgctaaaacatgtaacatatccatccaatcctcctccactaggatctcttggcgatgcagctgttttgccttttgaaaaactacgagttcttctcttaggatctaaccagatagatgaggtcctttctgtggattcacttaacctctttccgagtttaacagatgtcaggctttctgataatcctgtagctgaccctgccaagggcggcgtgcctcgatttgtgcttatcgcccgactaggaaaagttaaaatactgaatggtagtgagataagtccacgtgagcgaagggaagcagagatacgatatgttcgccttgttatgggaaaagctgaatcatatgatcctgaagagatcaaacggctgcaccctagatttgctgagctgaaagcctttcatggtattgaggatgagaagccgagttcaaggacttctggtcctcaaaaaatggcttctgggcttataagtatcaccttgaaatgcgtagggccatctatgggtgagaagcaaccattgnacaagaagctgcctnnctgcactact

SEQ ID NO: 42801 - DNA, 285 bp, Oryza sativa
  Clone ID: PAT_MRT4530_46018C.1
atggcgagccgcaccccgcgcgcgccgctcctcgccacgcgcgtgggcgtggcgccgcccgtcgcgagcgcctctagctgcgtgaccacgccgcttgccgcctcccgtgtcgcgaaccgcgtgctgcccgcgcgcgccgtggctcgccctggcgacacggcggggtcatgctcgaacagcgacgacaggtcgaagccctcagacagggagattaggtggaaccgcgtgcagacctcgggcggcattgccatgcgtgtaccggcgtcggcacggggtcggcgatga

SEQ ID NO: 42802 - DNA, 211 bp, Oryza sativa
  Clone ID: PAT_MRT4530_46019C.1
accatatagacggacgatcagctgttactattactggttgcagatgttcactacatgatacaatattacattacagagctagctgaatgcgaagccacaatacacgtcagcgcatgacgatcatgagtaaagcttacacaacatagcctgcatgcaaacgattcagactgaccagagatgatgcgccttgaagctggcgtggtgtgccatg

SEQ ID NO: 42803 - DNA, 225 bp, Oryza sativa
  Clone ID: PAT_MRT4530_4601C.1
tcggttcataccctatagctattccaagctgacacaactcccgaaggattcaccttgggggctgctgtaacactgccatgatcgcaaacataaacccctcaaatacttccttaaaggagacacaaaacacactttattgggctgatacggcctcggagaataaaatccaggcattttccactgcaaatgatgaggcttttgagagaacccattctaaaactgatc

SEQ ID NO: 42804 - DNA, 425 bp, Oryza sativa
  Clone ID: PAT_MRT4530_46020C.1
aaatccatagtctcatcaattacatcacaaaagtctcatccatagtcataatcagtggcagatctacaccacaggccacccgatctgtggcccagggcttgatccatgtaactctatataagtctctatttaatatgggacaaaatagttaagataaaataaaaagaagaaaatttggtagatttggcttgggtcatagaaaaattctggatctgccccgggtcataataagacacatctcttgtaatttagtgcatgcctattcacgaacatcctcgcttgagggagttgagtagcttgacaaagatgggcacaggcgcacagcaccactctcaacgaccaccttagtgttctctgatgtgcctgatgcaatgttggtgagtgcccatgcagcctcaaactggagttggggatctagaactagt

SEQ ID NO: 42805 - DNA, 640 bp, Oryza sativa
  Clone ID: PAT_MRT4530_46021C.1
tcagctcccacgcgacgaacaccgtggtggcaacgaagggaagagagcacggccatggtgatccggcagcagcgcgcggagacggagtcgaggaagacgaccaccataccgacggcagcagcgcgcggagacggagttgaggaagacatccgtcgaggaagacgaccaccataccgacgcgcggggtgatggtatggccggcgaggtaagcaagcaaggcggcgaggaggccccgggtgacggagaggagggcggcgcaaaggaagaggtaggcggtgaggagagcctccacacgaggagcagcggctcgccgccggcggagagccagaggaggaccggcgccgtcgccaccgcgagcagcagcgacaggaggatcagcctcgccgaccgggcgtcgcgcttccgctccgccttcttcgcctccctcagcctcctcagctcgtacaggaggcggcggcggaggaggaggtcgtcgctggtgtgcgactccccggccgccgctgcttttctcctatccccgctccggtcagcgtcgacgaggctcaccttctcggcggagtcatcggtgacggtggcgaccggagattcgtccatctcgctggggagaacctgcggctgcgcggcgagccggcgagattag

SEQ ID NO: 42806 - DNA, 570 bp, Oryza sativa
  Clone ID: PAT_MRT4530_46022C.1
atggcgcgtagagcgcgtcatggcgccgatgaggtcgcccaccaccgctccgtcgccgcggcgaagaatctcctcacggagctccacccgttgcccacatccccgctgccacgccccgcgctgctcgcgctccccgccgcgcgcgcccgccacatcggcctgttgtgcccagctgctctttgccgccacagcggcaccgcccgtggaagagaggaagaggagaggggagaggaagccgaggctgacaaatggggcccacgtgggttccatgccgactcagccatcacgtcggataaaaccggagtcaaaaccaccggaggacctaaagtgaacggttttccgcggctatgggaggcagcaacggcaacacccgtggtggcagcggcggtggctgacggtgcggaggcagaggcctcggagctcgtcgcagcggtggtgtcagcggctggacgacggcagcagcggctgctgtggcacggtgggaggaggcacggtggtgcgttcggcagtagtggttgcggtggcagtgaccgcggtggtaccggaggcatggcggcctcggacggctag

SEQ ID NO: 42807 - DNA, 412 bp, Oryza sativa
  Clone ID: PAT_MRT4530_46023C.1
actgccgcccacgcgttcgtctccttctctcactctcgctctcaccggagctagtaggtcggttagatccaacaatgaatcggaggtagtcgcagcatcgcggtggctgtcgctcgtatactgatatcgacagctatacttactttagctgtcttgcataagtaggcctactcaagccctgttgataccaaggatgcagatcgttctagggccaatggtgaggacctatggaacgtgatactatgtgaggtacgactatagctgaaactgcactcggtgtacttgagaaggaacatatcactatagctacagagaattctgcagtagagactcgttgtgcccaaaacatgaattctgtacgacacaaggcagctcttctacccgactctgacaggatgatctatccatcgac

SEQ ID NO: 42808 - DNA, 558 bp, Oryza sativa
  unsure (1)..(558): unsure at all n locations
  Clone ID: PAT_MRT4530_46024C.1
ttcaggtctccagcgccattgccgcgtgtggattggacgcttcaaaagcctttttagccacctcgtagcctctcacaagtactacattttcatctcgaaagaaagtgaaatcatcaagaacttggtgagaatcgatcaaagagcagtgccagctgcagctgcagcaggaggatcggaggaggaagggggagaagaggagatcggggagtggagagacgaaaagcagcagcagtagttgcagcagcagcagcatggaggagagagtgaagattggaggagacggcgaagaagaagaagaagaagaagcagaggaggaggaggcgccattggaggtggtgagggcagcgaaaaggagatttggggtggtggtggtggtgggcccaccccccagctgaggaggagcaggagaaggaagaagagcgaggaggagaggatctcctctcacgtcaaaggagggggaagcagcataaaggcagcagcagctactngaggaggaagaggaagcaagatagcttcantttcactacttcactnggttcggccaacccaagcagcatt

SEQ ID NO: 42809 - DNA, 2180 bp, Oryza sativa
  Clone ID: PAT_MRT4530_46025C.1
atgtctctccggaggcgggagcgccgggtcatcgccgcggccggcgcggcggcgctcgtcgccgtcggcctcaacctcgccttttccgccgtcgccgcccaccgccgcaggaagcggcgagagctcccagggtttactgcgcaagtcaacctctcagctgctgacatcaagagattagctgatcgcgtcgtttctaagtcgaaggaaacatacgacgctgtggctgcggttcccctagataaagtcagcttctctaatgtcattgcacctctggcggaattagatgctcagcagttcccactggttcaagcctgtgtgcttcctagaatggtctcaccgtctgatgatgtacgaagggccagtgcagaagcagagaaacgattggattctcacttccagcagtgcagctatagatcaaagttgaaggtaagagagtttgaacgcaatggtgctaaactaactcaaagcaagaaaacggagatggagaaactgaaatctcacattgatgacttaagtttgaagtatattcaaagcttaaatgattccacaaaatttcttctattgaacgaggaagacctggctgggatgccactagagttcttaaaggaactggaaaatacaaatgggaagtggaaggttctgctgaccagttatcatgttactccaattcttgagcattgcaaggttggctctaccaggaaactgattgctgttgcttatggccagaaaggtggaaaagagaatatagccatcctggaaaaattggtccagctaagacaccggcttgctagattgctggggtatcccaattatgctgattatgctattgaacctagaatgccgaggacgtcaaggaaggtcttggagtttttggaggagatgtcagaacaattaaatggcctagctaatagggagctcagcgtactcaaagatctgaagatggaggaggagggtgatgctcaatttagcgtggaagacctgttatactacatgaaaagagctgaggagctcaaggttgatcttgatattggtgaaattaaacaatttttccctgttgacctggtcatatcaggaatattgaagatgtttcaagatctgtttgcactgcgatttgaggaaatgaaggatgctgagacttggcacgatacagttcgtctcttttctgtctgggatgcaagttcaagtgatcttttgggttacttttttctggatatcttttccagggaaggaaaatatgcacatacctgcgtcgtggcacttcagaatagatgcctgtgttctaatggcacaagaaaggttccagttgcagttctattgtctcaatgcccgaaagagtttgatgggaattcagcactgctgaggttcccagaagttgtaaggatattccatgaattcagtcatgtggtccatcatatctccaacagagccaccttttctagattttcgggtcttcaactggagggggattttgctgaaattccaagtctgttacttgagaattggtgctatgagaacatttctctaaaaatgatgtctggcttccatcaggacattacgaagtctatcactagtgaggcttgccaatcactgaaaagaaggcgtgacatatttgctggcctgaaactgaaacaagagatccttttgtgccttgttgatcagataatacatacaggcgaaaatgtgaacattgatgacttaatcaaggatcttcatccaaaggtaatgctaggtatacctttgttggaagggaatagcccagcttcatgttttccacgtattgctattggctatgatgctgtgtgctacagttacatatggagtgaggtgtttgcggctgatctgtttgcatcaaaatttaaagacgacttgctaaatcagcatgcggggttgcggtttagaaataaggtattggctccaggaggctcgaaaaatccccttgatatcatatctgactaccttggacgagaaccatcattgcaagctttcattcagagccgaacgaggaacagtctgtgaaagatcgtgtaacccttgaaggtttaattagtgttgaattattttctttttctctgagggaatagttagtgctgagatctgattatgatctgttcgtttgttcaaccttttactgcaacgagaatgcttttgcagtgaccaggtaaaaaaaaaaaaaaaaaaaa

SEQ ID NO: 42810 - DNA, 521 bp, Oryza sativa
  Clone ID: PAT_MRT4530_46026C.1
tgaggcttatgacccccgcacgcgagacgattagcacgcacaggagaacggggcagccattgtcccatcgtagggagcctccacgcgccattgcgacgaacctctttggagaagcagagtgccaggaaggggaatgtgccggatatcagcgtgatggctgccattgacaagcatggcgatcgggatgaccggcccgtgctcctggctcttcaggtcaaccttcttgagcgcgatggcgagaagcaccgggcacaccatgatcaccccgcctccgcgaaagagcgggagcgtttcatcagagcatcctgggacagaaaaagtttctgtgagagtggaaaagaagaaacaactgcaaccatcaagccaggggattctgaagaaattaagatagggttactatgatcaggcctgaccatagaagtcagtagaagtgttctcaaatagtgtaccttggttcctgaacttagtagattctaaattgtatggcctatgtcattcactttctaaaaaaaaaaaaaaaa

SEQ ID NO: 42811 - DNA, 786 bp, Oryza sativa
  unsure (1)..(786): unsure at all n locations
  Clone ID: PAT_MRT4530_46027C.1
gcacgagggagaaacgttatctccactacttcacccttgccttcctacgctttctttcctcatcgccgggcggcggcggcggcggccatgtccatccccgggaacggccacctcccggcctccaccgacctccctgaccactcctcctccgcctcggaccccgaggccgacgccgactaccgccccatctccgccgccgccaccgactccgacaccgacacagatcccgacccggcgccccaccaccgcctcggctccatcgggaacggcgtctccgagctggatctcgactccggcggcgatgacgaccactgcgagggcgcggacggggaggatacggtggcggaggaggaggaaggcctggggcttggggaggaggcggcccgtgcgttctcggaggacgagcggcgccgccgcgccccgctccccgcgggcgccgcggcgcggatcgtggacgcgatgcgcggcgtggagttccccggcgcgccgcctccgtgggccggcagcgtccccgaggaccagtggctcgaccggctncgntccctccgcgccggggccgggcatccccactaagaggaggaattcattagctgcttgctgcaaatttcttgtgtcttgcttagatgcaggctgagatgctgctgcttcttgggaaatttgtggacaaatcattcggggtgacatttgtgtgttcttgttgttgtatggagtaagtacttactgcaatcttgattttcttactgaactgaactgtgtcatgttgctttccttaaaaaaaaaaaaaaa

SEQ ID NO: 42812 - DNA, 734 bp, Oryza sativa
  Clone ID: PAT_MRT4530_46028C.1
tcgcacagtggcacatgcgcccttggacaatcaacattgggcgacagatgtcaagggagctctaactgtgcaagtgatcatcgagtatctacaggtgtgggagatggtggatggagtgattctacatgatggcacccccgatcagtttcggtggaagctcttcaagacagaatcatagacctgtaagtcagcttacgagtccttttttgtcgggacattccgatttgctccttggagaataatttggaagagctgggcacctttgaagtgcaagttcttcgtgtgtttggcaattgacaatcgatgttggatggcggattgtcttgacaaacgggaggtgtctcaccccgccgtctgtccgttgtgtgattaagctgaggaatctattcaacacattcttgttaattgtgtctactcctagcaggtttggtctctaattcttcaaaggatagggctgatcttcatctcaccaagccaagataccatccgcttctcgagttggtgggtcaaggctattagaggtttggataaggatagaaaaaaggtctcaaatctctcattatcatggtggcttgggagatttggaatcataggaatgcatgtgtgtttaatgaggctagtcctagtgttatgactgtaattcaaactatggcaaatgagtgtaatctttggtgtttggccggccggagccactaagcttggcgagttccttagaaggtcgattatcccagttg

SEQ ID NO: 42813 - DNA, 1404 bp, Oryza sativa
  Clone ID: PAT_MRT4530_46029C.1
gtgatcggatccccacagctttgcgtttgcactcctctcgatctccattcgtttttgagttcctcgtttgctccgcctctctttcactcatgggcaagattaagatcggaatcaatgggttcggccgcatcggcaggctggtggccagggtggcgctgcagagcgaggatgtcgagctcgttgccgtcaacgatcccttcatcaccaccgagtacatgacatacatgttcaagtatgacaccgtccacggccagtggaagcatcatgaggtcaaggtcaaggactccaagaccctcatctttggcacgaaagaggttgcggtgttcggctgcaggaaccctgaggagatcccatgggctgcggctggtgctgaatacgttgttgagtctactggtgttttcaccgacaaggacaaggcagcagctcacttgaagggtggtgccaagaaggtcgtcatttctgctcccagcaaagacgcccccatgttcgttgttggtgtcaacgagaaggagtacaagtctgacgttaacattgtctccaacgctagttgcaccaccaactgactggctcctctcgccaaggtcatcaatgacagatttggcatcgttgagggtttgatgaccactgtccatgccatcactgctacccagaagactgttgatgggccctcgatgaaggactggagaggtggaagggctgctagcttcaacatcattcctagcagcactggagctgccaaggctgtcggcaaggtgcttcctgccctcaatggaaagctgactggaatggctttccgtgttcccacagtcgatgtttccgttgttgatctgactgttaggcttgagaagcccgccagctatgaccagatcaaggctgcaatcaaggaggaggctgagggcaagctcaagggcatccttggatacgttgaggaggaccttgtttcccctgacttccagggtgacagcaggtccagcatttttgatgccaaggctggcattgctttgagcgacacgttcgtgaagcttgtgtcctggtacgacaacgaatggggatacagcacccgtgtgatcgacctgatccgtcacatgcacagcaccaactagacgagccctcctcatggaggcctgcagatacaggggagttgtgttttgccccagagaagagtagatgaagcctcttccgagaataaattttaaattctgtatggttttatgtccgtcgaaacctaaaactatacttggttgtatcatggtggttggttgggcctggtcatggctcatattttgtgtctaattttcttgcgcttaatctaaatcgaagtgttgcttcgcagatgcatatttgctctgttttctggttgcttcttaaatacgcgcgccctaaaccctaaaaaaaaaaaaaaaa

SEQ ID NO: 42814 - DNA, 1258 bp, Oryza sativa
  Clone ID: PAT_MRT4530_4602C.1
gggctgcaggtttagtaaaatcgtctgacgatgttgctattaacaaataatctatatccgaactttgaagtactttagagtcggtgacaacatgctttcttggagcatgccacagtaaactattgagagcattaggagcaaaaggaagggaatttgagaatcacaggattgtcacagaatcttgccaaactattcaaacagtgtttataaaagatggcaaaaccaagaggaattgaaagaacatatattggagagcctccataacatttccaagaattgacactcaataaacatcccgttagcactaaaacggaggcaattgcagaagcaaattatgattctgcaagaacctattcaagcttccatgcatataggatcagcgagaaaccaagaccctgcaactgagactccctaaaaacctgcgagtatgaccaaggcatcgacttctcaggtgcttggcatgtctgaaacatgaacaccgcattgcttgtcgtcaatccaaacagccaactgtggacatcccagaacacctccacgggcaaaccatccacaagaattgtctggtttcccctaaatttccaagccagacgcttcacctgcatgacgggcttcttgtcgacccgtatctcaagacatggatccttgaggctgacggtgtcacactctatcacaacatcatggaattgaccattttcacagaattgtgccttggcagtgtaaatcttcttcccatatatgtgctccctcctagccacaaatgcagcattcagcatcggccggtttgcgccggtcttccggtatgcatccttcttcatgtcgccgagcaggagtatcagctcaaggtcaaacaccacggcgacatagaacccttccattggctctggcccagcaccaaacttggcaccggacaggtcccagaagatctcaatcttgccgtcctcgacgtcaagcctcttggagcccttcttcttggagaagagccatggcttgatgtctgccttgcacaggcactggttggacagatcgtccacgccaatgctgagcccttgccccatgaggctcttgctccaggtcaccgagatcacgcatggccggcccgagaactgcgcctggtagaggcaggtcaccagattctgcgccgcgccctttccggcgctcgacgacgacgacgacgcgtccgcgatctggacgccgctctccccgaagcaggaagggaagtccctcatgctcgcttgtcgcgcctttcaccgaacacctg

SEQ ID NO: 42815 - DNA, 312 bp, Oryza sativa
  unsure (1)..(312): unsure at all n locations
  Clone ID: PAT_MRT4530_46030C.1
atgtcggcgggagggagacgcggtggctccacctccaccgtcgagcggtggcaggcacggcatcggcggatccggcacggcacggatacaggcgcagcagcgatgggtgatggcatgtgggaggcgggttatccggctgccgctccgtgccccacgcgtggtgatccggctgcggtacgccggatccggtgcgacggcgaatccggcgctgaacctgcacggggaggcgcggcggctccacctccaccggcgagcggcggctggcgcggcgtcnccggatccggcacagcacggctgcgggcaaggcggtga

SEQ ID NO: 42816 - DNA, 294 bp, Oryza sativa
  Clone ID: PAT_MRT4530_46031C.1
tttttttttttttttttttttttttttttttttttttttttttaacaaaacgggggttatttaaaaaaagtaaacgggctccaccaaggataataaaaattgcccccaggaatacagtgggggaaatccttttcctatcccaatccaaactttaaaaaaaaggggaaaagggaaaggaaaattaaggacccccagggacggtaacagactgaaccactattttcctaatataccccacccaaaactgtctttggcaaaggaatataaaccaaattttggccaaatacaaggggc

SEQ ID NO: 42817 - DNA, 708 bp, Oryza sativa
  Clone ID: PAT_MRT4530_46032C.1
atggcggcggcgcgagacgagggagcggcggacgggcggacggcggcgcgcggggccgggcggtgggcaggtggcggcgcgagacgagtggacgggcgctggacggcatacggctgcatgcagcggcggaggtgtcggtggatggcggcggcgcgagaagagggagcggcggatgggcagacggcggcgtgcggggcagggcggtgggcagcggcgagagacgaggcagcggcgcaagacgaggcagcggcgcgagacgaggaggcgggcgctgacggcggacgactgcatgcggcgacggcgagtacaaccgccgccgctgccgtggccggaatcccggggttcctcttcgccaccatcccggacggcctaccggagtccgacgccgacgccaccatgactacctgcctcccccactttaggaagctgctcgccgacctcaacaaccgtgccgccagcgatgacgacgacgacgccgtgccgccggtcacctgtgtcgtggccgaccacctcttgggcttcagcctcgacgcctccgccgccgtgctcgcctcgcgctgccgcccaccgcccacccctgcacgccgccgtccaccaccccgcccccgcctcgcctcacgcctccgcccaccgcccgcccgccgccgccgctcgcgctaccgcccatgcaaacagtcatacaacaaacataccaaaaatggcatgtag

SEQ ID NO: 42818 - DNA, 540 bp, Oryza sativa
  Clone ID: PAT_MRT4530_46033C.1
atggcatcggcgaatagcgcgagcaagaagcgaagcataggtgcaccatcccagcaacagggtagcgtgagctgtgcattgggcaaggaggtaagtctggatgcagtgcccttatatttggaagaaacagaatggcatggtgaggagaaaggaactcgattgcgctgcaagcatggattgtgtctagcacggagggtggcttgggaaggagaagacacaggcaggaggttcttgggctgtccattagaggaagacgaggaccaatgcaagttcgttcaatgggtggatcctgaatgggactcgagggtgaagaagacactagctggcatgtgggatatggtggaccgtggagtgaaacgtgaagcaattattcaagctgacatgtttaaggcttttgccctgaaagaccgtttggagaaagagaagaatgatgagttagcccacaagaatgctctgcttgacatgagggaagcacaattgaaagaactgctctacaaatctgcctccgaagcaaacgagctatgttctccctcctcctag

SEQ ID NO: 42819 - DNA, 514 bp, Oryza sativa
  Clone ID: PAT_MRT4530_46034C.1
acattgtgaaacggagggagtatattttattgctcagtggatgttacaggatacttcacatagataacttgtgatttgcatttagttatctatctatctatctggtattatgctagtttttatttccgagacattaaataatctgtgtgatgcaacttttgagaaaaataatatgtaggaagtgatatcaatatttgtgaaatcagcatattttatgaacttttaacatgtgtctaaccttttttgtatggaaaacaggttactcaatttcagagtagaaatatattcttcgttcatagaacatatcatgtttattgttgttctgtaggatgacaatttagtcgtcatcgctaatggagttgtagcaactaaggagcatgcttctactgtcttttcatttgaaaactatcgtctattttccacaacataaagcaatttaacttctactaacctcaatctgtacgcgcaatggatatcctgctgtaggaacagataagttatatgattcatctac

SEQ ID NO: 42820 - DNA, 1169 bp, Oryza sativa
  Clone ID: PAT_MRT4530_46035C.1
atggtggaggggagagagcgtgaacgtctctcctccttttgcagaagaaacaccggggcggcgttgagtgatcagttggccggcagcgggcgaagcggcgatgggggagcctggcagcggagcagcggctggctgctggcggagcggacggcggtggccagtgcgccgacgggcgtcgactcgctgctgctaccaccaccatgggcaactggcgtctcgcggctgccggtgagaacacggttaggttggagagaggatctggtagttgatgcccttgctgttgtgcggaggtggatgcggctgaggagctcctctgtcctcgagagcggcggcgcggcgacagagggggagagaggtggccggcggcggagcggggacggcggcagcgggagagggagagagaggcggtccgcccgatggcagcggcgggagaggaggaaaggtggcggccggctcgacggcgagctcggcggcggagatgttcgaacgcgccgggtgctcgaccacagccccgacctcaagcgcggcaacttcaccgacgacgacgacgagctcaccatcaggctccacgcccttctcgggaacaagtggaacacgcgcatcaagctcaagctcttgagccagggcatcgatccgcagaagcatcagccagttagtgcccggaccagcgttgctgcggcaagcgagctaaccacgacggccagcactgtcagctttccgcccctagcaccggcgccggtgcgagggagctcaaggaggaaggagggaaggctgggaggggtcttcctcgtagtcgtcgctggcggcagaagggtcgccgcgtgctcgcccattgccgctctgccaccgcgctcgccctccgcttctctgcccgctgtcgcgctcgcgctccactgctcggcccgccgccgctccgctgccgcgctcgccctccgttgcgccacccgcatcctggctcgcactccgccgctccacccgccgccgcgctcgcccatcgccgctccgtcgccacgctcgccctccgcttctttgcccgccgctgcgctcgcactccactgctcggcccgcctcgctcgcgcccgcggccgctccgctgccgcgctcgtcctccgctgcaccacttgcatccgcgcgcgcttctccgcctaccgccggcctccctcactaaa

SEQ ID NO: 42821 - DNA, 777 bp, Oryza sativa
  Clone ID: PAT_MRT4530_46036C.1
atggaggagggacatggtcttcgtcgtcacaagcggcggcgactcgtcggccaacaagctgctacgacgcagctggttgaagaagttgatgatcagcagcagcagcagcaggaggaggaggcgccgacctgcagcatttgtctgcaaccctggacctgcaatggcgaccatcgcatctggtatactccctccgtttcacaatttgcattccctgtggacatgtttacggcagatcgtgcctggagaagtggctggtacatgttcttcaacgcggcactggacaagcaaagttgtgcgttgccagcaactaatcagctagtgactatactgagcatgcagtgtcctcaatgcggtgaagagttggagccgcaccgcattaccaacctctacgcgccaggaatcaatatatgggacggttgctgcaaaaaccatgcgaatgaggtaggagagtattacaaccgtgagtacgaggggctgaaaacacaaatggagtcgacgatcgctaaacaaggcaaggatttggaagaattggatgtgctcgtgaaatcggtgggcaggcagtttgagagccttgaatcaagtctcaagacattcctgctatcaatgacggagcggatgaagatgatggctacacagctgcctgcagccatggatctcgttcaatatttggagaaggatgtccatgatatcatatccgcgctctcccaaaaacctccatatctagctcgtctcatgcatccatctactgatcgatatatgcaagcatgtttttgctag

SEQ ID NO: 42822 - DNA, 959 bp, Oryza sativa
  Clone ID: PAT_MRT4530_46037C.1
gtttggaattttggataaaaattccgggcgtgacaaagaatcatccaatttggagttcatatgattgagataaactagtttatttttggggtccttgtacagaaaattctttttttagtagtgagattattcaaaataacaacgaggataaactgtgttggaagcatacttctaatggcacatgcaacacaaaaagtgcatacaaggatctatatgatgagaactatccgtctcgtgggcaaatgtggaaagccaggaatgacttgaaatttcagggaaagctgaaagagccaactaaagtttgttttgtatctgaagctatggcaaatacatacaccattttctctgctcataagtctttgcaggatgatcatcaggatatggagcaagaaagaagaataaaaaacattcccaatggaaacagatgctatgtggatgctgcatgggaaaatggcttcaccggcacaggaatcttgtttcacatgttgtcttcacataatgctcttttcatgctttgtggctcattcatctttgcaagccgaactggtgggtttgcaactagtgatggaggtggccaattttctaaactttacagggattacctttctcacaaacgatgcaacaattactgacacttgccaaagttgtggcaaagtatggtcaccatccaatcaaccccttagacttctttgaagccaaattaagagtgtgatcccagaaaatcctatgcatgtggtttggatctcaagaaaaatcaacagtgtagctgataaaatggcctaataagctacttcctccgaactcagcataacactgatccttctcaactgtaacatctcgcacattgcatctcgcacattgcttatcctaatagagattgtcatgctagaaatcttcaaaatgatttcgtttcggtgaactatactattaactatgtactacctctgaaattactatta

SEQ ID NO: 42823 - DNA, 627 bp, Oryza sativa
  Clone ID: PAT_MRT4530_46038C.1
atggcgccggtcgtagcgatcgtgctgtgtaccctggtcaccatcgccgccatcctcttcctcagcttcttcggctcatggatgggccccgtcgtctccatcgacggcgtcaccgccacggggctcgacgccgccggcgccgctgggaacgccaccaccaccaccatctccccgtccttcgacgtcgccgtgcgggtcaagatgcagcgtttccacctcgcgcccggaggcgtacgcgaggggctccgtcgccgtgtcgtgcgcggggggcgcggtcaccgcgcgcggcgagctcccggacttcctgctctacgtcacctcgccgtccgtggtgtcggcgacggcgcgcgccgcgccgcccaccaccgcgctgtccgccggcgcgcgcggccgcctcgccggcgagctgcggcgcggggaggtgtggctggacgtgtccgtgtcgtaccggagatcggaagacgaccctggctcgatgctgagcaacgggtttcgcgcaatgtgcgccgccacggcgtcgctcggccatgggaattcaacggcgacagcggtggcggcggcggcggcggcggcgtgcaccgtcgtgaagcagtagccaaacctagtcattactacaaatctagatga

SEQ ID NO: 42824 - DNA, 921 bp, Oryza sativa
  Clone ID: PAT_MRT4530_46039C.1
atggaggaggagaacaactgtcaaccagcaaggagagcaggtcgttgcaagcgttcagaggtttgggatcactttgagcagaaggcagggtgcaactactgcaaggcgctgctgtgtgtagatccagctagggatggcacctcgtgcctcaagaagcactacgaggagacttgcccggtgaggcatcctaacaagtctgggcgtggtagacagaacgggcacggctcgcccgttgcgtcgtctgagcgacaagggaatcacgtcttgcagaataatgcatcgatgatatccaaatccacctctgacggtcagaaaatggagactgctgctgctgctgctgctgctgaagatcattttatcaggatgatcgcactgcacgggttcccttcctcgatggtcgaagacaagcagttcataagatttgttggaatgctctgccctgattttaagatgccttcgcgagatgatgtggaggagaggtgtgatgcgctcttcgaccaagaaacgagcagcctgaaggatgctattgcacgtacgtctgggctggtaagtttgtcaataggccgagctcgaactgccatggtggatactgtgtacctagcggcccacttcattgatgatgaatggaatctctgtaggagagtaatacgggtgtttaaggacaacggtatgttctctgatgaattcaaaactccctatggttacatattggacgtcaaagattacctttacaacaagacactttatgatacagtggagggaactatttcttcctgtggtctttttcctaagcttgttggcgctatattagataatgaaaactatacggacatagtcagaaacaaattgtacaagaaaaatcatcttaagaacctctctgcaagccaacgaaagttgttccatgctaccgacatgcattga

SEQ ID NO: 42825 - DNA, 496 bp, Oryza sativa
  Clone ID: PAT_MRT4530_4603C.1
cccgggctgcaggaattcggcacgaggctagtagtgtgtagcaatggcgacacgggatcgtctcctgttcgaagtgcatttggccggcgagctgctcgtcggcgggggacgaaaccaagtgcttggcggtcggcggtggagcagcaaaggcagccggatctggagattccggcgacaacggcggcgctgtacggacggcgatgcctctacaaccatcccgtctgacagacaggtctgttgaatggaacaggatcagccgcagttgtagttttgactgcaacttttaacttcagcagtcaccatgatccaatcattcaatactcaaccaagatcaagaggctatttcttttttcattcctttgattagtttgcaggttaagtaggcgatatgtatgaaaacatttatacatggggtaaggataattacttaattacctagttatgctcgtttgtgtcaaattggattttagattctagttcagagaaaaactagcct

SEQ ID NO: 42826 - DNA, 323 bp, Oryza sativa
  Clone ID: PAT_MRT4530_46040C.1
ccaaaaaccccgacccccaaaacccggaaaatgggcggccaacccaaagaccccaggaaaacaaaacccacctgggatacccccgggggaaaagaaaagggaaaggggccccatggggaagaccacaaaggggaacccatcccggggggcaggatttttggggggcgccgcagtgggcccattccccctcatcggggccccgggggataaaacagcccaattgcaaggcgggcccactcatcagggggggggccccctggacgatttggggccgctcccgcccccggggggcccctttaacaacaccccggcctccaaagggg

SEQ ID NO: 42827 - DNA, 378 bp, Oryza sativa
  Clone ID: PAT_MRT4530_46041C.1
ttggcgttatgaccgtctcgatccccaagaacaccagggttactaccaagtaggatcatgccttgtgcacatactgtgacaaccagactgaactgctcattcaggtgtatgaggtctagaggaccaggacacgcgacaacaacctggtgagcaagtcttagctatctgtaatggctcgtgcttccatgggtgacgcacattatcaccgttaggtgaaacattgatgccgatggtattctgaacgtgtcagctgtggacaagaccaccgggcaatataacaagatcaccattagcaactacaggggcggggtcagcacggaggagattgtgaagatggtgcaggacgccgacaagttcacgtgagatgacgaagaacac

SEQ ID NO: 42828 - DNA, 549 bp, Oryza sativa
  unsure (1)..(549): unsure at all n locations
  Clone ID: PAT_MRT4530_46042C.1
cacgnncgtccgggcttttgtattcagccctgtttctagcttggattgtgacttacaagcgtgcaaatctaagggggctcacgggactatttgggccaattggtttttgaaccaagctcgatgaccaattgcgtgaatgaacgactactgtctaactacggttaattactattattggacggtcatcaatacagcaaaaggagactgtttcaccacagtgtaaacccaactcaccttccctattggagggagaacaatccatcacttcgctaattttgcttaacacagatatgaatagccgacatttaatgatcacaatacatcgtaactatgaacgcttgaatgatcacataccacatattcctgcggttacttttctgactcctatagcttcaaactccagatgtctaaatgatcgataagacaagatttcacggctcgtattcctactgttaatacaaatgaaacaagcttttacacttttgctccacacgacatacttgctatctgagagcgtattttaggacaactgggctatgtttttacaga

SEQ ID NO: 42829 - DNA, 222 bp, Oryza sativa
  Clone ID: PAT_MRT4530_46043C.1
ctacgactccgagaaacgacaccccgccgacgattcctcccatgcaagtggagaacggaacatcgagggccccaacacctgggaggaatcctcaagcggccgaattatgttctctatacaagagatcagagccgacaaggatgacaacacaaaaaccgagatcttggtgtcgatctcacaagctgcaagatcttcctcaggaccttcaaagtgccgcatcat

SEQ ID NO: 42830 - DNA, 2826 bp, Oryza sativa
  Clone ID: PAT_MRT4530_46044C.1
atgactaaccactgttacctgatgaggatcaaacctgtcagagagagagtagataagtacattttgcccttgattcatgcatggcttcatggtactaatagctgggttatggataaagcatacctcctaccctacgacttatgggtcgcactacgtagaccctcgttccaacgtaccccaatattcagctcattcggtccacgagtattactcgtcgatagtggcgtgccaggtagagggacttggtgcttaaggttctgccagtatgacttcaagccttcacgacagcagtaccaacaccagtgtcaatcaaggagcctctacctcgacatcgttggtgtggactcaagtcggatctattgtgtttccgatctataccattacgccaatctcgaatggcccaatcattaccgggaacgagaaaggcacggctacgactccgagaaacgacaccccgccgacgattcctcccatgcaagtggagaacggaacatcgagggccccaacacctgggaggaatcctcaagcggccgaattatgttctctatacaagagatcagagccgacaaggatgacaacacaaaaaccgagatcttggtgtcctgttcataagacatccaaacatactctcgaggactacccactgatagtccatgtgaaggctaaactctacgcttgttgggaacgtggaattcaacgcacttcaccaacgggcgccatctactgtccaattcacaaatccagatctcacgatctcacaagctgcaagatcttcctcaggaccttcaaagtgccgcatcatcgtgtccaacagccacgagttcaagctctgtgtgttgccaaggaacgagatgtggagccggctccagatcggtttgtaggatatgttggcactaatccaaacgagccatatgtgttacacctgctggaagactatgaattctcttcggagtcaccacgggatgtgaacgtggtcgacaacatcgagacaagtccgtccgcagcagcgagaacgcctgtcaacagttgtgaaacctagatgcgatattgagggaaagtccctttgatcccgtaacaaatccagacgtcggccaatgagccatcaccacgagatcagccctgagggaacggcgagccaaccgccgagaatgcggaggcaaaaaacgccaacagagaacatccctccggtaatcgatcacctcgggcgacacgtgaacctattgaaccgcatcgcgagaatcgcgatctccgcgaacacttggatgactgacggagagacagaagagatcggaacaataatgatcgtcatcgacaccattccccttctcgccgccggcgggcccacagcgaccgccgcaatgacaccaactacaacaaccagcaagatcaggggggccaatcgctgagttcaggacgatgcccaagatcaggagcgagacggcaacgaccaacgagatcacaattcgcaatctcccgcgcctagtcgagatcggggacacaatcattgttcgagaagccgggctcctaaaccaagcgacccctcatcctcgtcttcgtcattttcttcatcagatatacctcccctacgacgtcataaccatgggccgccttccgtcccaggaggcaggtgtagagcattcacaccctcactccgaaatgtgcgatggcccgagaagttccgaccaagagaaatcgagaaatatgatggaagtacaaacccagaaaaatttttgcaagtctactccacaattctctacgctgctggtgcagacgacaatgcactggcaaattatttaccagctgcattaaaaggatctgctcgctcatggctattccacatcccgtcccgcacaatctcctcatggaacttacaagcgccacgcgattaaggatgtcctacatgccctaactcagaacctaggagaatcattgagggactacattcggcgattcaatgagtgcaggaatacgatcctcgagatcaccgatgcttctgttatccgcgcattcaagtcaggcgtccgagatcgataacaccacctaggagttggcgacgcgacgaatcatatctgctcggaagttgttcgagattatcgacagatgtgcccatgcagatgatgctttaagagaaaaggagggaaagagcaaggtgggtgaggagaagaagtcaaccaaaagagacgcaccagagtcgagcaaaaagagaagtcgcaaaagtgggaagcgcaaactctcgggagaggtcctcgctgctgagcaaacggacccacccaggcgcccaaacccccagaacgacgactcacgcaagtaatggtgcccgatacacaagactaacaatcacgccacggaggattgttatgttttcaaaatggagctcgcgagacaactagcgatctagagagggaagccagcggctactgccaagatgaaatggtctcagcataagatcgagttcacgaaggcagaccaccccaagatcgcaaccacaccaggtagatatccgatcgtagtcgaacccactattcggaatatcaaggtggcacaggttctcattgatggcgggagtccaatcaacttgctcttcgccagcactttggacgttatggggatacctcgaagcgagctgacgcccacatatcagcccttccatgtaatcactccagaatgatcgtctaaaccgttgggtaacgtcacgttacccgtcacctttggataggccaataacttccgaacagagcatatcacctttggtgtcgcagaattcgacaacgcgtacaacgccatcattgcactacaagaagcaacaatgattatggctgtgtttag

SEQ ID NO: 42831 - DNA, 425 bp, Oryza sativa
  Clone ID: PAT_MRT4530_46045C.1
cgaccgaaagggggcgcctcgcggtataccatacgatttgcacggtctcggccgaagctccctactcacccttgctcgtgaggggcttgttggaggtatactgcgaaaggccttcggccgggcctgccgaaaccgaaaacttgggcgacatgttcaaaccggaagcaagcggcgaaggtcgaagagggataccataagggcgaaagccatggctcgggaagtacgcgtgcttcgtcggacagggaccccgtcaggaggccacgcaggcgaagatggtgaggcgaaaagcttcagcccgaaggcatgggtttcgccaaggtaccataccccactgtgaggaagcccagcgggctgttgcgaccctgtggggattcgccaagatcaattggccgagccatttagcccaattggggccatacgtgtaa

SEQ ID NO: 42832 - DNA, 657 bp, Oryza sativa
  Clone ID: PAT_MRT4530_46046C.1
atgacgtcatgcatgtgtgctgggctagcccaaaccatcccagctagaaccccatgtgtcgaaggcctagccatctcttcagaaggaaacctcccgccggagcactccgacgacctccgaagtcggcgatcgccggaaaacgaaggcgatgacgtcccctccccatcacgaacccgagactcctccatcggttccttcccctcacggcgaactgtgctccccaccgtatcaccggagggggctctatcaccagagggagctctcgccaccggcgtaagcacatcggcgtgcgtgtacctcgccggccaaccatgcgaggggatcgcctccctcgtcgccttcctcatcacctcactcgtcgcctctctcattgcctccgccacaggtcaatccaacggcctcccaacatcaaatgagctcagtgtgctggccgggccgagattaggtaatccctgcgtatgcatgactgttgagattgaagccggcgtcttggagttcatggcgacatgtgctcggcgctgggaagaagatgaacaggacacatgggagaaagaagaagcgaagcgtcgttcacggcacctcctcctggcgcaccagctcctgtcggcggcggcgcaccagctcctgtcggcggcggcgtaccacctccaccggtag

SEQ ID NO: 42833 - DNA, 408 bp, Oryza sativa
  Clone ID: PAT_MRT4530_46047C.1
atgaggtggcgcaagatcacgctgtccatagaggtggacgcggggaaggaaagggagggagaaagaatcgctcggtcagggtggaggaggttcgtcgtgatctcggtggagaggctactggttcttgatttcttggagagaaaagcagagggggagggcgagcgagttggaggagttcttggagggagtcgggaggaagaagacgacctatttatttgcgagttgggtggaaatgggccgaaactttataggcctcgtggcaagactttcctagagaaggaggtgagcctggagatacttattaaacttccgccctcccctcctctgtctcctcctcagccctccatctcctaccactcttcgtcaaggccaagatatgaatatctcaagtgtggggctcgagcctaa

SEQ ID NO: 42834 - DNA, 109 bp, Oryza sativa
  Clone ID: PAT_MRT4530_46048C.1
tatgtttatatggagatgaaccagaaagctaatgggtaacaagatgagatggactctaaagtataaaatatgactcccgtagaactgatagtagaagcacaaagaaaat

SEQ ID NO: 42835 - DNA, 347 bp, Oryza sativa
  Clone ID: PAT_MRT4530_46049C.1
gttgatagaaaacacgagacctgggagatctgcttaactccagtgtaggtccaaaactcgccatcggatatatgagcgtgctagttgatttgatcctgcaatcaacaagaaacaaagacaaagaaaccgtgattaaatccataaatgatagccgatcggctaagactttatccatgtgtggcaatcatcttgaagcacatcaactcgatcctaatgtcgcacacaggtcgtattgtcggaatcggctgtatcacttaaccagtccaactcagacttagccgatcccagtcgtagccgatccggactccagccgatccttactctgtttccgcaacaatcctcatctt

SEQ ID NO: 42836 - DNA, 217 bp, Oryza sativa
  Clone ID: PAT_MRT4530_4604C.1
gtaacgggatcccgaggccgcaagcggaaggttccaagtgaagccgaagggaaaaccggaaaaggagccgcccccataattaccccaatccccgcccttttcccccggccggccggttggccccggaatttccaattttaaatgccaagccttgggccaccggaaccagggttttcccccggaccttgggaaaaccggggccagttgaaggcgccaa

SEQ ID NO: 42837 - DNA, 1484 bp, Oryza sativa
  Clone ID: PAT_MRT4530_46050C.1
aaacggcactcctctcatttcagaggaataaatcctcgttgatcgattgcttgccttctatgcgatcttgttcgttgcttgcggctttaattcatccatcaatcgattgatctctgaactttctgagaagcagagaggaggtagcttgacagcagctgcttctcgcatgtacaagaagaagaagctgaggttcttagccaccgtcgtcatcgctgctgcatcacatgggcggcgtgatcggagcgttattccgcggtggtggtcaccgtcgtgagatgcacagagcgccgatgaaccagccgggatacggcggcggcggcgagaaccaccggagggcgatgctgaccaagaagtactcgtacatacctgacaactaccagtctctcgatcaggtgacagcggctctgcgagatcaagggctcgagtcgtcgaacctgatacttggcatagacttcaccaagagcaacgaatggacagggaagcgttcgttcagtgggcagagcctgcacaagataggcagcacaccaaatccatatgagcaagccatcagcatcatcggcaagacattggcacctttcgacgatgataatctcatcccatgctttggcttcggcgacgcaaccacacatgactacaatgtgttcagcttccatcctgacaactcaccctgccatggattcgaggaggtcctatcatgctacaagaagattgtgccacacctcaggctatctgggcctacctctttcgcgccgatcgtcgaggcggccgtcgacattgttgacaggagtggaggacagtatcatgttcttgtcatcgttgctgatggacaggtgactaggagtgttgatacaagcgataatgatctgagcccccaggagaggaggacagtggactccgttgtcatggcaagctcctaccctctatccattgttcttgttggagttggagatggcccatgggaagacatgcagaagttcgacgacaagatcccggctcgccagttcgacaactttcagtttgtgaacttcacgtcgatcatgtcgaggagcacgacgcagcagcagaaagagtcggcgttcgccttggcggctctcatggaggtgcccatccaatacaaggccaccatggagctcggcatcctaggccggtcgacggggaaggctaagaggatcatgcctgctccgccgccgctgccgtcggcggcggggaggcagccatcgctgaggagggaagacagcgccgccgccaccgctgccgccgccccaccgtcaccaagagaggatcaagtgtgcccaatctgcctgaccaatgccaaggacttggcatttgggtgtggccacatgggaatgtggggagagcctgaccaaatgcccaatttgtcgacagacgattcggtccaagctgaggctgtactcaggatgatcaaatgcttatggactgatggaatggagcttaaatctgttcttaatgtacagaatgcatga

SEQ ID NO: 42838 - DNA, 347 bp, Oryza sativa
  Clone ID: PAT_MRT4530_46051C.1
gttgacgtaaaacacgaggcctgggcgatctgcttaactccagtgcaggtccaaaactcgccttcgggtatgctagcgtgccagttgatttgatcctgcaatcaacaagaaataaagacaaagaaaccgcggttaaacccataaacgatagccgatcggctaagactctatccatgcgcggcgatcaccttgaagcatatcaactcaacccgatgtcgtacaccaagtcgtattgtcggaatcggctgtatcacctgacccagtctgactcggacttagccgatccaatcgtagccgatccggactccagccgattcttgctctgttctcgaatcgatctccgtctt

SEQ ID NO: 42839 - DNA, 481 bp, Oryza sativa
  Clone ID: PAT_MRT4530_46052C.1
cacagcttacaactgttgtattcagaaaaaaaaaacagtatttcacagcttacaagaaaccatcatttttttttcacggctaatatgagtagccaaagttactaataaacatcatcaatacaacatcaaatgacagcacctctgtactgcaaagcatcctcactctcatcaactatgccaaatctagagaagggttctgaggtgaggcgaaaaaagaaaaaaaaattaccggcccaggtaggatacacaaagtcctcctagatgagataaacaaagtaataacataggccataggctacatcatattcttcttcacttgagaaaaaggaaatccaggacttttccagggatgtatttgcgatggtgatacaaaatgaaacttaggagtggtcatgccatggacatggcctctatggtttcttactttcttcactctgttgttgtatggcacaatgctcttcttagcttggaccttcatgtt

SEQ ID NO: 42840 - DNA, 344 bp, Oryza sativa
  Clone ID: PAT_MRT4530_46053C.1
tgacgtataacacgaggcctgggagatctgcttaactccagtgcaagtccaaaactcgccttccggtatgctagcatgccagttgatttgatcttgcaatcaacaagaaataaagacaaagaaaccgtggttaaatccataaatgatagccgatcggctaagactctatccatacgtggcaatcatcttgaagcatatcaactcaactcgatgtcgtacataagtcatattgccggaatcggctgtatcacttaacccagtctgactcggacttagccgatccaatcgtagccgatccggactccagccgattcctactctgtttctgcaacaatcttcatctt

SEQ ID NO: 42841 - DNA, 292 bp, Oryza sativa
  Clone ID: PAT_MRT4530_46054C.1
tttttggggtttttttttttcttggtttttttatttttttatttttttttgtttttaggaaaaaccccaagccctaattaaaaaccccccaagcggatttggccaaattggggggggcacccaaagggcaatccttttaaaccccaaagacagggggggctaccaaaggtgaaatcccagatggtaggggtccaccaaataacaccggaatgggttcccaataaaaccccattgtttaggccttgggccccggtgactacccttaaaccatggggtttttttatgaaagaac

SEQ ID NO: 42842 - DNA, 346 bp, Oryza sativa
  Clone ID: PAT_MRT4530_46055C.1
ttgatgaaaaacacgaggcctgggagatctgcttaactccagtgcaggtccaaactcgccttcgggtatgctagcgtgccagttgatttgatcctgcaatcaacaagagataaagacaaagaaaccgtggttaaatccataaatgatagccgatcggcttggactctatccatgcgtggcaattatcttgaagcatatcaatctgacccgatgtcgtacaccaagtcgtattgtcggaatcggctatatcacctaacccagtctgactcggacttagccgatcccaatcgtagccgattcggacttcagccgatttctactctgtttccgcgacgatcttcacctt

SEQ ID NO: 42843 - DNA, 349 bp, Oryza sativa
  Clone ID: PAT_MRT4530_46056C.1
gttgacggaaaacatgaggcctgggagatatgcttaactccagtgcaggtccaaaactcgccttcgggtatgctagcgtgccagttgatttgatcctgcaatcaacaagaaataacgacaaggaaaccgcggttaaacctataaacgatagccgatcggctaagactctatccacgcgtggccatcatcttgaagcatatcaactcaacccgatgtcgtacaccaagtcgtattgtcggaatcggctgtatcaccaaaccaaaagtctgactcgaattcagccgatccaatcgtagccgatcaggactccagccgattcttactctgttctcgcgataatccttatctc

SEQ ID NO: 42844 - DNA, 514 bp, Oryza sativa
  unsure (1)..(514): unsure at all n locations
  Clone ID: PAT_MRT4530_46057C.1
gcgagagagaaatgttagcggcttgtgcagcttgcaagcaagaagtgacaaggtatcatcaaagtggtttatggatgggtcatcttgggggagccaaaaataaacccatttctacatcatccatggctttgcttgctttgggtgcttgccaagaagtgaagtaccagcgcacacccagctataaggtctctctccctcctccctcctttttgcagtcttttacttgcaaaagaagcttgccgtgggctccgtgaataagggcgttcctttcttaaggaaaaaaaagaaaaggaaactatgaatttaattgccatttttcttgtactagcttataggtgccctaaccttctgttttggttcggtacaataagattcttatttaggggtgtagtagttcggtgcttagccgcagcagcagcaaagttgggctgggtgttgttaaacaacagttgtatttgtaccatcaaagccttaatatatgaatcatggtgagtatttcnnncnngttgacaat

SEQ ID NO: 42845 - DNA, 348 bp, Oryza sativa
  Clone ID: PAT_MRT4530_46058C.1
gttgatgtaaaacacgaggcctgggagatctgcttaactccagtgcaggtccaaaactcgccttcgggtatgctagcgtgccagttgatttgatcctgcaatcaacaagaaataaagacaaagaaaccgtggttaaatccataaacgatagccgatcggctaggactctatccatgtgtggcaatcatcttgaagcatatcaactcaacccgatgtcgtacaccaagtcgtattgtcggaatcggctgtatcagcttacccagtctgactcggactcagccgatcctgatcgtagccgatttggactccagccgattcttactctgtttccgaatcaatcttcgtctt

SEQ ID NO: 42846 - DNA, 1812 bp, Oryza sativa
  Clone ID: PAT_MRT4530_46059C.1
atggccggcgagcaccgtttctacgactccaatggagatgtgagccgctacatgctcgacgacatggagtttcttcccttgttcggtgaggcagaagcggctaccacattgcccctgcccgtcctccccgacgtcgagccgcttcctacggcgccggcgccggcggcgacggctcacgtcgagcccgctccggcggcggatttcggtctcgggaacccggtgcttgcagatctcggcttcgatgtcgatctcgacttctttcccgagttgaattttcagtctccgccgccgccgccggcgatgaatgccggtggatacactcatcaggttcaggcgtcgccgccggtgatgcatcaccagcaacagcaacagcaaccgctggctccgttgccggcggcgcacggcttcgccggccagccggcgccggcgacgacgatggcgccctcaggcggtgacgacggtttgttcttggccgccccatcacgggacgctccatgctcccccgtgatgttcaatttcatggacttcaacgtcgacatgggcgacgtcgacatggatgatgtcctgatgtgggctgaccaagacacacacggcgccgccgccggcggcgacactgctccgcccgtcgtcgtcgatgagtacgccgacttcgtcccatttcaggccggagatctggactgctccaactgccaccttgtcagggagatgatgcatgcaaacgctagccggacaatatacttcttggttcatgcaaccggggttggatcatttcaacatgcgattgtggatcgcagatacactgctactggtgctgaaggactacacttccccgggagacaactgctatacttcgaccttaccaatcataccattgagtccgcgagcgacttcatcgcaagcaacgttgagaagctgaaaaatgatacgactgggcatcattttctggacactggctacaacttctccggagcggtccgcaccgacatggccaacagtcacacggcgatggaaatgaacatgctccatacgatcgtgtcagccccatttgagaacgtaactacagatgcagcgtccccgccggcggcacagttcatcggagctcctccagcagcagagcttccagcgccggtgccggcgccggcgccgccagcagcccatgagcagaatgctgttgttgctaccttactgttcaaagttgaagaattctatgccgctgcaaacagtcgtccagcagcgaaaagggcagacgtgaagatactggaatcatctcaagtgacccagcaagctggaggtagctctgctgctactgctaccatgtacccgagcatggtagacaggaagaggaagagggcgcaggcgacgccatcaagaatggctccacacgaggtgatacagtatctgcgcgccacagcggtggaaactgacaaggaactggagactctgaacaatttcttcaaggtttgtgatggggaagacaaagctctaataaccttctcggtggagcagataagaagtataaagaagaagatagggaggatcatcaacaaaccggtcactgcaatgtcaagtaggcggatggcgagatttattgatgaaattgatactatcaaagaagagaaggcaagagtgtttgaagaaattataaaaatcttgaaaaatcctaggaggaagagagagaatgatggatcttctggcagcaataggaaaaacgttggtggatcttctggcggcaaaaagaaaaccgttggtggatcttctggcagcaaaaagaaaaacgttggtaggccctctgcgaaaaaagctcaaaaatag

SEQ ID NO: 42847 - DNA, 578 bp, Oryza sativa
  Clone ID: PAT_MRT4530_4605C.1
tctgctgctgctgctgcacactcctcggcgcgagcccaactccgtccccaccggcccccccgatccggccgccgccgccgcgcattcccaaaaccccctcctctctgctcttgccctgacccccgccacggaactcctctccgccggcgtggtggtagccccccccccccccccccggcgctccggccggcggcctccggatcgcgcgatctgactttgtgctggaatccccgtcgcgtgtgatattatagctgttgcccttacctcgctgtttcggttgcggtgcggggggttagggttcttgcacaccgctgtggaattgtggatcctagcggctgggatctctctccctcggtccacccacacgatcttcgtggggaatttggtgtggttttaccaccattacgtgtagggagactagggctcgtgttgtcgtgtgtttgttgttgtactagcttggaggaggctgctgctgcttgctgcttattctcgcgtggttgaccatgaaatcctgaatccccgttttgctttcgattggcgctattgatttgagttttagttttcagctatctttgact

SEQ ID NO: 42848 - DNA, 346 bp, Oryza sativa
  Clone ID: PAT_MRT4530_46060C.1
tgacagaaaacacgaggcctgggagatctgcttaactccagtgcaggtccaaagctcgccttcggatgtatgagcgtgccagttgatttgatcctgcaatcaacaagaaacaaagacaaagaaaccgtggttaaatccataaatgatagccgatcggctaggactctatccatgcgtggcaatcatcttgaagcacatcaactcgaacccgatgtcgtacacaggtcgtattgtcggaatcggctgtatcacttaacccagtctgactcagacttagccgatcccaatcgtagccgatccggactccagccgattcttactctgtttccgaaccaaccctcatctt

SEQ ID NO: 42849 - DNA, 207 bp, Oryza sativa
  Clone ID: PAT_MRT4530_46061C.1
atggcgcgacggatgggctggcggaggacgacatctctgcgggtggaagatttggccggaggggaagtcgctttgaaatcgccttgcgccgaggggatcgccagagagagagaagacggggttggcttaagcggtgaaaacggaactaacggtgtgaaatctctcgggggcaacgcggaattcgagatggagatcgctcggaaatag

SEQ ID NO: 42850 - DNA, 279 bp, Oryza sativa
  Clone ID: PAT_MRT4530_46062C.1
atgtcgtcgacccccgaggctctccccatcaccttagtgactcacgagcgaaccagccgcgccgagtgccgaactgccgctgcgctcgccttcgctccgcctcaaccacgttgcctcgggcctcttgccaccagcggagccatcagatctgcagctctctccgtgtccccggccgcgtccggcgtgctctctgcgcagacctctattgtctttgcggaattctatcgaacaccttggcggcaaccacgagaatggggaatcggggatgactcggatgat

SEQ ID NO: 42851 - DNA, 963 bp, Oryza sativa
  Clone ID: PAT_MRT4530_46063C.1
tttttttttttttttttttttttttttttttttttttttttttttttaacgggataaatgatgccagatgcgaagcacaagcaccaaaatggcattccagttttattcagaggagcagtaaaaaggatttccaagggaacatgatgctgctgatcaagcacttcattacataggacagaggagctcgagagcactgaaccaccaaacattaaatatgcgtaaatttgctaatacaatcaatgttcaataagcgtgattggcactgacggaactcctaaatttccctgtcccagagctcctcatgggtcttgtaaacgctctgtggattgacaatgaagttgcccctgagcagcctaacctgcttaatctccgagaacttagcaagcaagtcctctggaatagaccagtcataaacatctaagttctgctttatcctttcttcactcacactttttgggagtacactgtgacccatctgaatgttccagcgcagcgccacttgtgcaggagttttgccaagcttctctgcaatcgagataatgatgggttccttaaggacgttgccgttcatccatgttgaaccaggtgaacctagaggcgagtatgcagaaagatgaacgccagttgactggcagaagttatgtagcttcgtttgctgccaaccaggatggcattctacctgatcaacagctggaggtacacaggctacagcaagcaggtcacccagtttttttgatgagaagttacttacaccaatggcacgagatttaccagaatcatatagcttctccattgctccccaggtagatgggatgtcaggtggtatgtagtcttcagtgttactaatgcctgagcccttcttgactctgaatggccaatgaatctgcataaacgtaatggtgatcagtttgacgatggaaagtacagaatctagcaagtcactcagagttttgtccctcgtgc

SEQ ID NO: 42852 - DNA, 421 bp, Oryza sativa
  unsure (1)..(421): unsure at all n locations
  Clone ID: PAT_MRT4530_46064C.1
cccacgcgtgcgctctaggcgaccttgaattcgcgtgcctgaaacgcgctcaacgtattctacacatctgactggtacaggacgggctgagtgggcacgcgcagaggggatacggctatctgccggaagtccagtctcggcagaggtgagagggancgagctacatacccccgtgatgatggtgatcactctcgcatacgcaacttgcgcaacgacatcgcaggcctgctaacatcatgacgagaaggaaatgactgccggtcttctttgcatagattgcatgttgagctgcttgggataggacagctgcatcggtatggtgctaactatgcacctctgcaagaacgtgctctacggcatggcatcaacgagatggatcacacgggcaactttcgtgctggcaagtgagcgccttctgcgc

SEQ ID NO: 42853 - DNA, 231 bp, Oryza sativa
  Clone ID: PAT_MRT4530_46065C.1
atggcagcgacgatacccgcagcaccagacgacaccagctgcggacctctgtggatcgaaaagaaaattagatcagcggctttagccaaagaagaatttctcggaggaagaagagaccccgtggaagtgagagatctccacagtggattaagcccgccgtcctcacctctcgcttcttggcgcggatttctcacttctcttcctcccccccttggcgacaagctcgcgtga

SEQ ID NO: 42854 - DNA, 197 bp, Oryza sativa
  Clone ID: PAT_MRT4530_46066C.1
gggaaggggcaaaccaaagctttattagaagtggggaccgggacacaagctagcaccggcccttaaaaaaaatgcgcacgtccgggtggggggaataagagtcctccaaagaaaacaaagggggggggcccgggggaatccaaacgggtgccgggatacgtacaaacaggcgggatggccgatcgaacatgcgttgg

SEQ ID NO: 42855 - DNA, 245 bp, Oryza sativa
  Clone ID: PAT_MRT4530_46067C.1
caaacgaaagacaaggcacgatcgacctgtagcatccagacaatccaaaacgatcccatccttgcattagtaaggcaaaaccgaatgcaaaactgtcacacaaagcatactctacacagcgcaaataaaaagccatccttgccactacaattaccctgcaaaaacgcctaacaacgaaaaggtgaggatggatgggccactctcatcacctgaaaaacttacgcctgagagcatgaacataagac

SEQ ID NO: 42856 - DNA, 2141 bp, Oryza sativa
  Clone ID: PAT_MRT4530_46068C.1
ggcgggaacaaccccgcattaacacaattcatattactcagctggcaaaggatgcaatttgctaatattagaaaacatgcaattttttttcactccgggacccctattcagtggccaaatatgaagggcaacaaaaactgggggggcatgttccattaagtatcttagaatatgtcagacatctggattgtttgatgccggctcttcccaactttcacaggcttattagcagagacaacaaacacataccctggtgaaatgcttccgatagctaatactatcaatgagatgcttccaatcaagtaaggaaccaaaaagccccaatcatcatttctgacactcggaatcaccaggttctccacgtgctttatcccaagcctggtgagctcttgcagagatgtcgtgcggcacgacacgtatggctgcgagctccaccgcttggcccacccgagctccttcagctggtccatcgatggttcgcggcgcgtgaggaggattctatcggacgcagcggctggctgcgcgtgaagaggcggagcccgtaaataatagctatcttcacaggttcgaataactatcggatcaggcgcgacaatttcatcacatctatcgtccgtacatggatatagccactccgccttaggtacaggccatctgttcttcctactcatgtcaaccacttcagcattgacaattgcacggaaggttaaaccgttacttggccttagaatagacaccttgaaaagcatctcttcatcacgtcgcaaaatatcttctgatttccccaaaataagctcatagaactcttgtgcatggaatagatcgactccatcaagcttggtaataacatcaccaacgttgattccagaatctgctgctggggatccatcaaaaactgtctcagcatagacaccaatcgagacaaacagggtaacaactcccatactccttgtaagcaagaaaggaagaagtcttttaatggcccatgaattgtcgttgtctggattatggaatacaagaaagctggtcttatacgtagaggagggggggtcggataggggggtgctggccccctccggcacccccgatggctccgccactgttgacagcagaagacgctcttttacataaatgccacctgtgttggagaagcttccatgtatttgttcacggatatccagtttttcatgtttcagtgatccaatcctcaggccaagccatggctgaacaactctcccaaacatatcaaagtgctttaaacatttccgaattatattgattggtaagaaaggagtttccttcttatcacaaaagttcatgccaacaaagtttccatcaaacccaacaaggggaccaccaatcccagcctttgtgatcttacaagtggaggtcatgagttccttgcagtcaagtttgctaggtttgtacagcagtgtcccacctgtagccattagttctccagattcatagccacgtccaacagcgaccagtttactttgagataatttaacattagattgcccttgattatgtatctgtgctgtactaagttctgggaaatacttgattttgacaacagcaatattataatataaatcatagttccacagttttccttcggtaagcttgccattgggtaggcgcaccttaatctttaatttttcatctgtcttgttttcatctttagtgcatctaaccaaactagcggaagtcagaatgctcattttagatggtccatactccataattgtacccgtgcatgcaaacagtctcgttcgccccttaaacgaagcaagtgagacaacggactgagatattcttagagcaactaaattaactttgctgtattcttcattgcagtcatccaagtctccaaaagattcttcaaagttattcaccatgtgcataccatcatccacaactggtgacgaatcttctctgttggagttagagtatgaggtcttccgcttcttagttgcgcttgctccttctacttgtgtgttttggttgtttctcatcatcttccgaacctgatagtacttaacatggtaatgagtaatgacttgagatgacataaaaatatataagagccgatgactatcatatgcacgcaggcaggcattccaactaacgttggtcat

SEQ ID NO: 42857 - DNA, 954 bp, Oryza sativa
  Clone ID: PAT_MRT4530_46069C.1
aaaaacagaaaagccaaacaaaacatcttgctggaacaactccgcattaacacaattcatattactcagctggcaaaggatgcaatttgctaatattagtagacatgcaattttttttcactcctgtagccctattcagttgccaaatatgaatgtcaacaaaaacttgcggtgcatgttccattaagtatctcagcatatcttctcgattaatgcaagatttcttctcgattaatgcaagatttctccacctcattcttcaccgtaatatagtcttagttcagactcatcaagggcgggtaaataatagctatcttcacaggttcgaataactatcggatcaggcgcgacaatttcatcacatctatcgtccgtacatggatatagccactccgccttaggtacaggccatctgttcttcctactcatgtcaaccacttcagcattgacaattgcacggaaggttaaaccgttacttggccttagaatagacaccttgaaaagcatctcttcatcacgtcgcaaaatatcttctgatttccccaaaataagctcatagaactcttgtgcatggaatagatcgactccatcaagcttggtaataacatcaccaacgttgattccagaatctgctgctggggatccatcaaaaacctcttttacataaatgccacctgtgttggagaagcttccatgtatttgttcacggatatccagtttttcatgtttcagtgatccaatcctcaggccaagccatggctgaacaactctcccaaacatatcaaagtgctttaaacatttccgaattatattgattggtaagaaaggagtttccttcttatcacaaaagttcatgccaacaaagtttccatcaaacccaacaaggggaccaccaatcccagcctttgtgatcttacaagtggaggtcatgagttccttgcagtcaagtttgct

SEQ ID NO: 42858 - DNA, 639 bp, Oryza sativa
  Clone ID: PAT_MRT4530_4606C.1
atggcgtgggcggcggcgcgcgcggcctccgatggcggcgaccagcagcggcagacggcgcataggacggcggcgtcggccgagggtgatggcaagcgtgcggaaagcggtggcgcatacgggagagagggaaggaggaaggagagggagttctcaccgtggggctggccggcgcgggaaggcgaagctaacggcggcggcggccctagcggcggctggagttgggcggaagtaatcaggagagtacacgtggagccctccgagaacgtgcaaacccttcgtggaggaactcgaggtgcagctgtgggcgactccagccatcgctgtataacaactcctgaggtacgagttgaaccacacctcgcgacctcggagtgcttccacggcttggtccttcttcacttccaccatagtcctctcgagttcggccacctcgaacttcgtcctccaatattggattcgacgatctcggtcggccaacgtactctcgaggctttgatcgacatcgtcccgcggcacgtacggctcaagcgcaagtgccggaacgactaccggcgactcaggctgcccacgctgctggacatcctcgatatcaacatctctacaatgacagcaaagtactcggaatcaacatgctaa

SEQ ID NO: 42859 - DNA, 270 bp, Oryza sativa
  Clone ID: PAT_MRT4530_46070C.1
aaaagaagtcggacaagcagggtgaggaagacaagataaaggagcatcagttggagaagaagccaagcttcatggcatccgtggctctcatcattctccttctcaaccgaaatctgtacgggccgggcataaagtgctatgcgctctttgtctgcatggtagcgggcatgttcggcctcatcgatgcctatgctgctggaagaatattggctgcgagtgtggcctacctcacgggcctaaaaccacctggtggcctgtggagggatgaag

SEQ ID NO: 42860 - DNA, 552 bp, Oryza sativa
  Clone ID: PAT_MRT4530_46071C.1
gccgtcgcgtcgcgccgatctccacatcaccggcggcgacttgcgagcaccgtgccgggcgcctactgcttccggcgcgtactcgactccttgcgccaaagtcaatctcccctcgcaccgtcttctcggcctcagactcccttctccgactcgctagttcgccccgccccgccgcgcctcgccctcgcctcgccgcctgcgccggtttccatccatcccgcgacggacgggagcatccgtcgggtgccgtcgtcctgctgcctccgcctccggttcggaagatgatgagaaacaaccaaaacacacaagtagaaggagcaagcgcaactaagaagcggaagacctcatactctaactccaacagagaagattcgcaccagttgtggatggcctcacacgcatattgcgcagaaatcttctccccgtggttatcctatgccatctgagttcactgatggtatgcacatggtgaataactctgaagaatcttttggagacttggatgactgcaatgaagaatacagcaaagttaatttagttgctctaagaata

SEQ ID NO: 42861 - DNA, 366 bp, Oryza sativa
  Clone ID: PAT_MRT4530_46072C.1
atgcctcctgccgacgccgcgcaagccgctgccgccggggatgcctcccgccgccaccgcgccagtcgtctccgccggggacgcctcccaccaacgccgcgcaagccgccggggacacctctcgccaccgccgcgccagccgcctccgccggggacgactctcgccaccgcttcccatcggcgtcgcggagagggaggaggaggcgaggcagcgcttggtaccctgactatgggtgcttgcactgtgggaagggtgtccttggaccaagttttgaggctaaggctatgggtcccatagcttgcattgtaaataccctaagagcaggtacaatagcaggctataagccagctgcaaacatattttaa

SEQ ID NO: 42862 - DNA, 2142 bp, Oryza sativa
  Clone ID: PAT_MRT4530_46073C.1
atggagtgccagctgaagaagtacctggtgctgctggccaccctggtggcgacggtgacctacgcggcggggctgaacccgccgggtggctcgtggctggaggacggcggcggcggcggccggtggcagctggccggcgacgccatcctacaggacaccaactactggcgctacatcgtcttctactggttcaacgccatctccttcgcggcgtcgctggtggtggtcagcctcctcttcctcctcctgcacaagggccggccaccaccagcaccaggggaccaagctgctcacgctcacccgggcgctgggctcaacccacccggcggcttctggcggagcaccgaggccgccggcgacccggtgctgccgggcctccatccaatccggtacaagttcttcttcttctccaacgccatctccttcatcgcgtccctgctcgccatcacgttcaacgtgtactacgagaagcttgacctcaagcgcatcaagttcccgctgtacgggctcaccgtcacggcgatcttgggactcggcggcgcctacgccgccgggagctgcagggacagcaggcacaccggctatgttcttggcctgattgtcccggttcttgtctgcatctttctccagtggtttcttgtaggatctaatgccatcagtctcccttttggtaccaggggaagtaaacaatacaacaatgatctagacaagccttgtgaattaattcagctccttgccattcttgcggcgatcgttgcttaccaagcaggaatagatccacctggaggcgtctgggcagacaatggggctagccacagtggagacccaatactcctgacaacacaccctaggcggtacaaggtcttcttctattttaactcggtggcttttgtggcatccctagtcatcatggtgatgttgcagaatgaatttctagttagaagccatgtactggaggcagccatgatacttgatttgttttgcctcataggcgcgtacgctgtcggaagttgcagggacacaagcacttccatttacacagttgccttggctggtggtgtccttatctatgtggtgattcacattctcttctccacactagaaaagaagtcggacaagcagggtgaggaagacaagataaaggagcatcagttggagaagaagcgtgagttgttgctgcttgttgaaatcttggctgcaacactcacttaccaagccggcttgaccccaccgggtggcttctgggaaaatgatgagtttgggcaccgtgcaggcttccctgtcctactagacaagttccctatccgttacaaggcatttttttattgcaatgcagcaagcttcatggcatccgtggctctcatcattctccttctcaaccgaaatctgtacgggccgggcataaagtgctatgcgctctttgtctgcatggtagcgggcatgttcggcctcatcgatgcctatgctgctggaagttcgatgcatctgcgaacctccatcgttgtcttaatattggttacggtagtttttgcagctgtagtctatgtggcaatcatcggtcgtggacaacgtgcaaacataaatcaacatcagtcaaaacaaacacaaaatcaacaaaccaacaaggaagatggcatgatggacacaccaagacaaacacaagatcaacaggaagctgacatgaaaaagaaagccgacatgatggccaagtacttaatgctagcaggaatattggctgcgagtgtggcctacctcacgggcctaaaaccacctggtggcctgtggagggatgaaggtaatgggcactctgctggcaacccggtcctctacgacatcgacaagcgtcggtacaatgcttttttctatagcaactccacttccttcatggcatccatcactgtcattgttttgctgcttcgaaggatgaccaagggcgatgaacataaattgcctctttggccaatgcacacagccatgttgctggacatgcttgccctcctgggagcctacgcggcaggcagtactcggaattggtgcacattcaaggatgccatcctgcttctcttacctgtgttgggctttgttgttattcttttcttctggaagaaaggaggtgaagaaaaacatgatggctccaaatag

SEQ ID NO: 42863 - DNA, 507 bp, Oryza sativa
  Clone ID: PAT_MRT4530_46074C.1
ccagatctgatggcacgaactcaaggccgcctgatctgatggcggtgagctctgcgtccgatagaatcctcctcacgcgccgcgaaccatcgatggaccagctgaaggaaccgggtgggccaagcggtggagctcgcagccatacgtgtcgtgccgcacgacatctctgcaagagctcaccaggcttgggataaagcacgtggagaacctggtgattccgagtgtcagaaatgatgcagcattttttttcactgttgtcggttcaaccggattcctacccattcgtgcaggccagcttagtagggattggggctttttggttccttacttgattggaagcatctcattgatagtattagctatcggaagcatttcaccaggtcttctgcaagcagcaattggcgcatttttaactgtttttcctgactatcaagacagagttgctaggcatgaagctgctcattttttggtacttccactgatcagtcttcaattttgggcaagctt

SEQ ID NO: 42864 - DNA, 184 bp, Oryza sativa
  Clone ID: PAT_MRT4530_46075C.1
ttcacgctgaacttaccagagaatttggtggtttcaaaggttgctgtctggaccacggtggcaaatccaataaccaaatatgcattgaccataaccccattggctatgagtttggaagaattgctgcctccaaatcagcagaagtatgcgaacataatcatgcttagatcctccttggtggtct

SEQ ID NO: 42865 - DNA, 476 bp, Oryza sativa
  unsure (1)..(476): unsure at all n locations
  Clone ID: PAT_MRT4530_46076C.1
atactgtattagttaagntacctatattagagattatgtggactgaacttgtgcatccctctgtttaagagttttgttgtgaggaaagttctagcacaaggggaaatcacgttctggatgatctcaagccatntttttgttctgaaattcaggtcagttgtaaatattgtctggtttgcttaacaatggtgtgtaagtgccctacattgctgggaaggtcaaggtgtatgtgctaaaagaaactcattttaacaaatgtggttttgcctttttcagcccaacatcaggcccagcactctttccaaattgtagaaaggaaaacagaactggcccagtaggtgtaaactggatgcaagcatgcacccggcaacatccagcaacacaagcagtaaaatttacacgtaagcctcttcgatagaccggatattttcatttattgaatttgaaattcttttgaaaaaaaaaaaaaaaaaaaa

SEQ ID NO: 42866 - DNA, 302 bp, Oryza sativa
  Clone ID: PAT_MRT4530_46077C.1
cgggtccgcccacccgtccgcccacgcgtccgcccactcgtcctctttaccttttcctcctcggttcggttccgtggtgcgtctagggtttagtgggttgagatggcggcgccggatgtcgagtaccgctgcttcgtcggcggcctcgtctgggccaccgacgaccgctccctcgaggccgccttcttcacctaccgggagatcctccactccaagatcatacaccacccggcgacggggaggtcacctgggtgcggcttatgataccttgtactccgaccaatcaacagcgcgaccccctc

SEQ ID NO: 42867 - DNA, 1388 bp, Oryza sativa
  Clone ID: PAT_MRT4530_46078C.1
gctaaaattttttgaatctaagcaaagcctatattatctaattaagttcaatttgttcctatgaactaataatagattgtactactttctgaccaggccattcgagggaaaagaaagaaggtgaaaaaggtagcatcagaatcaacgtcactttattagcctttttctgtcgtaacgcatggtttggttcctaatttggtggaagggggattactcaccttcaatacgctgatgacaccatcttatttgtgaaggctggggatcacaatgtgttagtgcttaaattccttctattctgctttgaataaatgtcggggatgaaaattaattatcagaagagtgaaatgtatggttttggtatgaataaaggggaagagctgaaatttgctgatatgttgaattgtaaagtgcacaagcttcctgtcacttacctaggtctgcctatgcatgcaggaaaacttggtttgagggattttgcttgtcactcagaaagtggaaaaaaaggttacaatcttggaaaagtggttatctcacctatgggggaagggggattaagatcaactcttacttgtctagtataccaatgtataccatgtgtttctactggttacctaagggttttcatcacaaaatgggaactgctaggagcaatttttactggcaaggcctgagtgaaaaaaacaagtatcatatgatcaattgggaagctctctgcagacctaaagattatggtggaatggggttcttagacaccagggttatgaatatctgccttttgagtaaatggatcatcaagttggaaaatgggtctccagataactatcaacaaggggctctggtgagtgaagtgttcaatggaggagattgggatctagagtttagaagaaatctaaattcccagagagaagctgagcgcaacttattcaggggatttgtctagatgaaggagaagaccaaattgtttggccccatagtaagataaaagttttttctaccaggtctatgtacaggattttgacttttgggggtataagagatgtggatttatgggaaatctagaaatgcaagctccctctcaaaatcaaacattttcttttcctggttgggaaggggaggttaccctatgcagagcaactagtaaagaggacttggaaagggactgtttacgaagctttgtcttttgcgccgaaatggggcgtcctgctaggaaatgaggagcaagcagtgctgggagggtggtatgaggcgattctggagaagtttaatcaacttagagttagaactttgcctgcaactctaccttatttttctattataatatatacaataaataaatgcatgtttacttttattatattgctttgaaagataaatttatatatgttgtt

SEQ ID NO: 42868 - DNA, 933 bp, Oryza sativa
  Clone ID: PAT_MRT4530_46079C.1
atggcattcagccttctctgtccatcacgctcgcaggactaccttctcagtcgtatgctacaggtcttgcccagagggtcccttatataccgcgggtccgttgatctccaagtagaactcggagatatcggacccctcacgatatgggtatctggatacgtcgggttccgacttcgggatggcctgaagtcgcgttacatccccttccagtgcccctcttctcgcagcaagtggcggacgagatggttctatctccagatagagaactcggaccccgccctagttattcctgaggaccagccagaaaagatcccagagtggactgctaaacatgccctcaccctcctcacctctgcatccgcttttgtcgcccctctccctcttgtatccgttaactacaaaattgatttcgatttgattgctcctaaacgttactccctcgcgcgccataaaatcccacctacaggacaagacagaaacatacatctgaagctctgctctgtacctcctctcgttggttcctctccgttatgttcctgtgctagcttctgcctctctggttctgatcatctcatgtcgaccggaggaggcatcaacggaggatggactagaggagatgagaacgacaacaccaacggaggcaacaacaccgacaaagcctcattcagtaccagagcgttctccggtccacacgccttctgcatttccatcatcatcgaccatgtcagaccttgttctgcaacatctcttccatcaagtcaagccctaataattcagattagtttcagacgtttggctcagcaatgtcacgagtcaccaggtggtttacaaaaactgggagggggtcgatccaaacatcagactgacccgggtccctactcaccctactgggcaagatcatgggcacaacgattacatctccgaggaacataa

SEQ ID NO: 42869 - DNA, 1464 bp, Oryza sativa
  Clone ID: PAT_MRT4530_4607C.1
atggacctcgacaaatccacatccaccaatgcgtccctgaagaagctgcaggacgacggtgccctccctggtcgtgggaccatgcagagggaaacaggaggtactgaccccaaacctgtcctaggccacatggttgcggttgaggattacattctttgcggttttcttcctccgccttctgagtttcttcttcttgtcttgaatttctacggcctttccttgcttcatctgaaccccaattctatcgcatttcttagcattttttcctatctttgtgggccctacattggggtagagccatttcttgatctcttttacttctactatgagttgcgctggatggaacctaaaaagatagaaaattcggatccagtctttgttgtccatgaggaacaaccagacaagattccggaatggaccgccaaacccgccctaactccctcccttaagtctttcatcgatatcatcgatgacctccgagtacgagagttgtcggggtatgaagttgctgtcaacttcatcggtttgaacagcaaaaccgtggagcgccgcgtcagtcagcggccctacgacgctctccctctgatagacgtcatcgggccgctcgcggatcacaaggcggaggcgtcgttaaaggagggcgttgccaaggaggcgtccgatattgctgttgctgctgccacgatgaatggcaacaacgttccgaagaaagggaggaagttctcctctgtacttggaaactgttggaaagtgcctactccgtcggcctcggatgcgtctcccccgcctctgcgaaggcaaaggctggtgacgcttggcgagaaaaatccttcgcagggcggcgtgggtgaaggcggcgcaagacgggtccgagatgttgatatcgaggatgtccagcagcgtgggcagcctgagtcgccggtagtcgttccggcacttgcgcttgagccgtacgtgccgcgggacgatgtcgatcaaagcctgtctgtgaaggcggacgtggcgacgacttccttagacctcgagagtacgttggccgaccgagatcgtcgaatccaatattggaggacgaagttcgaggtggccgaactcgagaggactatggtggaagtgaagaaggaccaagccgtggaagcactccgaggtcgcgaggtgtggttcaactcgtacctcaggagttgttatacagcgatggctggagtctgtagagagctccaagtaccccgcgggaatctcgaggagtcagcggctgggtatatctcgtggttgaacggggcctgcactctgcttgaaggcatcgggaagcgtatcgacgaggccttgaaacaggagtgtcgtcggtcgagccgatatgtcggagggcatgtgctggcctgtatccgagatcaccgcccacagctgcacctcgagttcctccacgaagggtttgcacgttctcggagggctccacgtgtactctcctga

SEQ ID NO: 42870 - DNA, 476 bp, Oryza sativa
  Clone ID: PAT_MRT4530_46080C.1
tccacttcaactagtggctggccgtctcctgtagtttcacctgtgccgagcgaggctggtcccttgacgtaggggcgcacctcgccatcgagaggatctgaggccggacctctgaatcttggatctgcccttgccgacaccaacatgaccgatctgcacctgaggtactcgatctgtaatcaccacccttacattggcacgctcaaaaactccgactgatcaacatcgcgaaccctatatacaaaaggaggtagtacttgatttgccctgaagcgctgcactagccaaaccgaggcactgggcttggcaatagacgcagcacaggattgagttagttagttttgcactgtagattattgttttttctttgcaggaaagtctagtgatatatactgattgctttattttatttagagctattaggttactgacctgaaagcatgcaggtttattgggccttgttagatccaaacttt

SEQ ID NO: 42871 - DNA, 1005 bp, Oryza sativa
  Clone ID: PAT_MRT4530_46081C.1
ttgatgctctcgtgctgcacccgctctgctcgcggcccttcaccgccggccgaggaagcgtacgatgaagttgacaagagccgaaggacgacggcgacgatcaagcggcagcggcggccggtcacggaggtgagctcgagacagacatggaaccccttctccggcgccgtcagccgctacaaggtgcacgtggctttgacggaagcctttgtgtacgagttcgggaggaggcggtggttcggcttcggccagacgagacggttgttggtcgcggagacgacgacgacgacgacggcggcgaaggggagagtacggcgagcaggcgcaccggcaggtcatcggggaaggatccggagcaaacctagcgacggcggtggcacggctgccgcggtcgtcgacggccgagaggaggagagcaccaatgtacacttacacctcctcgtggaggacgagatcaggatgtcgtcgtcgccgcccgcgctgccggcggtggatcagaaggagaagacgtggttccctccgggaggatataacgagcagtgcaagccgccggcgcgcatcacgtacgccgatcgctgcggtccggagtcgctcgaggcgttcttggagtccgtcgtcgccgcccgcggcggcggaggaagcgcctcgtctcacggcgtgcacggcaaccgctgggcggagatcgccgaggccaaggcgcggcggcagaggtatctcagagactactgccccttccagagagacgaggagacgacggaggcagcagggtacgatcacgcgacggttaaacagccggcgaactgtccggggtccgagggaggagacgacactacgaccggtgttcgtgagaaggacgcgcgcgccgttcgcggaacggccgagtaccacgtgatgcgccaggaattcctcaagagctaccagatcagaacctttggggagaaggagacgcgggtaccggcgctccggcgcttgttgccacggagaaaaacggcccggattttgtga

SEQ ID NO: 42872 - DNA, 300 bp, Oryza sativa
  Clone ID: PAT_MRT4530_46082C.1
atggcgtgcggccacgccgtcacgtttttggcacctatgtgggtgtttatacagggcgagccagcgtacggatccaacgagagctcctcctccctgccgccgccgagaactcgtcagtgctgtcaccgagaactccacgctgccaccgagaactcctccccgccaccaccccgtcgtgttgctgccaagctcaccatgccgtcggcaagcttgtccgcgccgctgttgtggcacgccagagtaggggggaggagggaggaggcgtcgagctcgcgggcaaatctgctgcccctcgcttag

SEQ ID NO: 42873 - DNA, 1076 bp, Oryza sativa
  Clone ID: PAT_MRT4530_46083C.1
ctcctcctctctgaatgtctactatctacatgagccagctacctgctactctccctctaatggagggggatcaggatcaggggctctacccagccttccatagagcaaaggaccctcctatcttgttccctttcatgatcgacagcgccgtcgagcaccaagggcaaatctatggagatcagggcttgaggaggcagcaggttttgggtgaatccaatcaacagttcaatgatcacatgatgatgggcggatcagatgtcttcctcacaccgtctccgttccgaccaaccatccaaagcatcggcagcgacatgatccagcgatcatcttatgatccatacgatatcgagagtaacaacaagcagcatgccaatggatcaaccagcaagtggatgtcgacgccgccaatgaagatgaggatcataaggaagggggcggcaaccgatcctgagggcggggcggtgagaaagccaaggagaagagcacaagcgcaccaggatgagagccagcaacaactgcagcaagctttgggtgtcgttagagtgtgctcggactgcaacaccaccaagacccccttgtggagaagtggtccttgtggccccaagtccctttgcaacgcgtgtggcatcaggcaaaggaaggcgcggcgggcgatggccgctgctgccaacggcggagcggcggtggcgccggcaaagagcgtggccgcggcgccggtgaacaataagccggcggcgaagaaggagaagagggcggcggacgtcgaccggtcgctgccgttcaagaaacggtgcaagatggtcgatcacgttgctgctgccgtcgctgccaccaagcccacggctgctggagaagtagtggccgccgctccgaaggaccaagatcacgtcatcgtcgtcggtggcgagaacgccgccgccacctccatgccggcacagaacccgatatccaaggcggcggcgaccgccgctgccgccgccgcctctccggcgttcttccacggcctccctcgcgacgagatcaccgacgccgccatgctgctcatgaccctatcctgtggcctcgtccacagctag

SEQ ID NO: 42874 - DNA, 190 bp, Oryza sativa
  Clone ID: PAT_MRT4530_46084C.1
gaacgaaggcaacggtggatgggggagaggaggactcggcggtggagtggaatggagggccgacgcgggtgcacggctcggcgcggccgaggcagagacgacgcgcgacgcgggcgcgttctcggctcagtgccggccggggcgacggagtagggggagccagaggaagagcagtgcgcgggtcggctag

SEQ ID NO: 42875 - DNA, 979 bp, Oryza sativa
  unsure (1)..(979): unsure at all n locations
  Clone ID: PAT_MRT4530_46085C.1
cccacgcgccggccaaaacgaccggttatttgtcgccacaattatattgagctgccattgcttctcacctctgctttgcatccatccatccatcagagatcaggtagaacagtgagagtgaggtgcagaaaaatttgagctgaagctgaggatggcaacatccatgatcacctcgccgctggtggcgccggcccgggccaagggccttccgtccatctcccgccggggatcctccttcgccatcgtctgcagcggtgggaagaagatcaagaccgacaagccctacgggattggaggtggcatgtcagtcgatattgatgcatctggcaggaagagcacggggaagggtgtgtaccaattcgttgacaagtacggcgcaaacgtcgacggctacagcccaatctactcgccggaggaatggtctcccaccggtgacacctacgttggtggaaccaccgggcttctgatctgggccgtgaccctcgccgggctcctcggcggcggcgccctcctcgtctacaacaccagcgccctcgccggctaaatttcacccaaatccagtctatgtatgtaacaccaagctgggtgtctgcatattcatctgtaatctaagatagccttcctctgaatgcgatgtgatgatgcccactgcttaatcaaactgcattgtgattaatctatgtaacactgtacttgcatgatgatgatatactacacttgatacttgaatttggagattaaatgttgatactaaatacatagattacataaaaaaaaaaaaaaaaaacacaagactagttctctccctcccccccgtcgcggctgggaaaaccctggcgttacccaacttaatcgccttgcagcacatccccctttcgccagctggcgtnatagcgaagaagcccgcaccgatcgcccttcgcacaattaagtatgaactacatctagattgaaatatacataataaaaaaaagggggg

SEQ ID NO: 42876 - DNA, 1026 bp, Oryza sativa
  Clone ID: PAT_MRT4530_46086C.1
attcggcacgagggtgcactggacaggcttctagatgatgagcaactagcagaattagttgcggcccatggggcagtcattcctcttgttggccttttgtttggcaaaaactacacgctccatgaggcagttgctagagctttggtaaaacttggaaaggataggccaggttgcaaattggaaatggtcaaggctggtgtaattgagagcattctagatattctgcatgatgctccagatttcctttgcattgctttggcagaaatgcttcggattttgacaaacaatgctagcatagctaaaggtccatcggcagccaaagtagtccagccccttttctctttactatccaaggcagatattggtcctgaggggcagtacagcactttgcaggttcttgtgaatattttagagcatcctgaatgccgtgctgattacaatttgacaccccggcaaactattgagccagtcatttctttactgaattcctctccgcctgctgtccaacaattagctgcagaactcctatcacatcttattctagaagagaacctccagaaggacacaataacggagttggccatccctcctctaattcaagttctttcatcgggtttgccaaacttgcagcaaagggctataaaagctcttgctaaccttgcattagcttggccaaatacgattgcaaaggagggtggtgtttttgagctgtccaaggtgttgttgcaatctgaccctcctttgcctcatgttgtatgggaatctgctgcatctgtcttgtctagcatattgcagtacagtactgagtttttccttgaggtgcctgttgcagtactagtgcagttactcagatcaggaacagaaagtactgtcgttggtgcactgaatgcattgcttgtattggagagtgatgattcgacaagtgcggaggcaatggctgagagtggtgctgtggaagctttgctggatctcttgaggagtcatccgtgtgaggaagctgctgccagactcattgaagcacttctg

SEQ ID NO: 42877 - DNA, 1060 bp, Oryza sativa
  Clone ID: PAT_MRT4530_46087C.1
caagaaaccaagattaccattcacagtttttagtagcatttagcactacaggaaactagtctattctaactgaaatattaacttaactttttatacattcagaacgaagttagctatactgaaaggtgaaacatcctatagcagtcaagtcacatagaatctggctagcataaacagcaatcataaacacattttactctattgtacattgtgaactacacggatatgaaggatttttgtaattaaaccataaaaacacaatggcttattcagcctgttggaaggaaaaaattctgcagcatcgacaagcatcacttctggctgctatcctcagacccatcatgctggcttgtagcaccgccatttggtacagcacctgccccttttgtagtggtatcagaatagggtctcttccttgatgatgacgatggtttttccggggtatcaatctccttgctcttctcacccccatctgcagccatgtttctttctctctcttggtgagaaggaatagatgttgaaggtggaggtggcatcatgtcgatgccgctgaggcgacgcatgacactctcaatagtgtcagtaatctctttccccagtccaccattctcaagtatcagatcccagacttcccttgaagctttctcaaggactggattttccaattcctgccgaagggcatcaaacaactccctcttggtcttcttctcagctccaggagtgtttagaactctgctttgctccgccatcatcatagtatttttcttcatatcctcgttggccttgagctgggcgatgatcttcatgcggagcgcgtcgatggtgccgtcgttggcgagcgaatccagcacctcctccggccgcaccacctttgacgacgaccccatctcccgctcctcctccccccctccttcctcgcgcgcgcgggatccggattcgcgggggggagtcgacggggggcgcgcggaggtcaggcggggggagccgcggcgaggaggtgaggggagggtcgccggagacggaggtctagggtttctttccggtttcggttgggggagaa

SEQ ID NO: 42878 - DNA, 562 bp, Oryza sativa
  Clone ID: PAT_MRT4530_46088C.1
ccacgcgtactcttaatttctctcttcatcatctcgctatatacgtgcaatggcggtggcgcaggtgagcaggacggccgtggtggcgctggtcctcgtcgccgtggtggtggcggcggcgtacgtgccggcggcgaccgcgtacggctgcttcgacgactgctacgagcgctgcgccaacgggaagacggacgacgcctgcaactccatgtgcaagcaggcttgcagcggcgccggcggcggccccgccgaggcgcccgacgaggcttgatcgccgacgacgagcgccgccgcgccgccgtccatcgatctccatatccgcccgtagccgccggctatatatacactcgattatttgtttgtttgttgttaattcaagtttgattgatttaaccgtcgagtatctaaattagtttgttttgtttgtttaatttatgcaagctggtgtactctctcagcgatttgtaattcttgtgtgataattaagtgaatttgttcccttgtttcttctttgattaattaattaccgagatgccttgcaaaaaaaaaaaaaaaaaaaaaa

SEQ ID NO: 42879 - DNA, 337 bp, Oryza sativa
  Clone ID: PAT_MRT4530_46089C.1
aggcaaacatgtttaaaaaagtcaataacgtcaatatttagggatggagggagtataagcgcgtgctcagattgcccttataatatataggtgttcagggagttgagagacatcagatagtaaaatgtaggttcagagaggaaaatgagacaatactgcaatttttaggaccctcactacattttttgtatgttaaggtaaccttgaagagacaaaatcttctactttgtaaccaaaaccgctcaaaactacaatggtcgtggcattaagctagatgcttaatcgcatgcaaaaaaaattataaaaacatgacgggccaactggatttgagtgtaaa

SEQ ID NO: 42880 - DNA, 222 bp, Oryza sativa
  Clone ID: PAT_MRT4530_4608C.1
tctcaccatagtaaatgatgctataactggtaataattttattagctcctggtttggaatggtatattcctggtttggagatagaactatgcagccgggatggttgatctgaatggctgggcctatgcaacagggtatgttgtgtagcgttggattaatattgtttaatacttaactgttttattaaattctgaaatgtttgctaaatgctgcttttgcaaa

SEQ ID NO: 42881 - DNA, 297 bp, Oryza sativa
  Clone ID: PAT_MRT4530_46090C.1
atggtgcgcatggctgatgtaagtgggcccggcctgggggaggcgggacgttacactttgggcggcgaaggcggtggatcggacggccgaattttgggttgtgagcgcgggctggcggtcgcgcccgtggtccaggcggtggcaggcggtgacgccgatggacgcgcatggagcggctcgagcacgcgcgcggggccgtgcggctgcgtggtgcagcgcggcagggcagcggggctggtgcggcggcgacccacgcgcgagcgcgtgcgcgcggacgcgagggcgcggcagggctga

SEQ ID NO: 42882 - DNA, 1449 bp, Oryza sativa
  Clone ID: PAT_MRT4530_46091C.1
gcacgagcccatccaagaggagcgatggcgcgctgctccccgccgctgctgcgccgcctcttctgccgcgccgccaaatccgcctccgccgccggcgccggcaccggcggcactagcaagaagaatatcgtcttcttgggctccccccaggtagccgcctccgtcctggaaactttgctggtggcgtcggagtcgccggactcctcattccaggtttccgccgtcgtgacgcagccgccggccgccaagaaccgggggaggaagctgatgccgtcggccgtcgcgcagctcgcgctcgaccgcgggttccccggcgacctcatcttcaccccggagcgcgctggagaggaggcgtttctgtcagacctgaaggaggtgagaccagagctctgcatcactgctgcctatggaaacattctgcctcagaggtttcttgatatcccgccttatggaactgttaacatacacccgagtttgctgcctctatatcgtggtgcagcacctgtgcagagggcattgcaggacggtgttgaagaaacaggtgtttcccttgcatatactgtccgtgccttggatgcgggtccagttattgcttctgaaaagtttgctgtagatgagtatattaaggcaccggagctgcttgctatattgttcaacttaggatccaagctattgcttcatgaactaccctctattcttgatggaacggctaaagaaaaggcaaaaccacaagatgactccaaaattacacatgcaccgaagctgaattctgatgagtcatggttgtcattcaaccaagaagctaaattgctccataacaaggtacgagcctttgcaggttggccaggaactcgcgcaaagttgcagcttgtgaaccaaaatggggaacccgatgtgcttgagattaaggttatcagcacgaaggcttgcgcatcctgtgacaaaaccggagatggaaatgaggtcggggaactcattgctgattcatcatcgtggagcttcaactccctggaaagaaggtgacgacagcaagggacttctggaatggtttgcgtggtcagaggctgctgaaatcaccatagaagaattaccatgatcatcacagcgtatactaccactgcatgaacaacaaagacgatcgtatgtgatatgcgcttgatttctacaagtcatggtagaaactgatgctgtcaatggagaacattttcaggagaatgctactacaggtagaggcacattactcgacgagatcttttacttttcagatcgtatcattgtgaagataaaattccatgctacttcgtgtttttagatacctcgtacctccattcgccattggaatctgtattatctccaaaattttgggaaagagtgcacaattgttagctactatttgtaagagagacagagagtgctgaccagtacaattcctgattgccaacaggggcc

SEQ ID NO: 42883 - DNA, 566 bp, Oryza sativa
  Clone ID: PAT_MRT4530_46092C.1
acgcccacgcgtccgcccacgcgtccgcccacgcgtccgctatattgttcaacttaggatccaagctattgcttcatgaactaccctctattcttgatggaacggctaaagaaaaggcaaaaccacaagatgactccaaaattacacatgcaccgaagctgaattctgatgagtcatggttgtcattcaaccaagaagctaaattgctccataacaaggttggccaggaactcgcgcaaagttgcagcttgtgaaccaaaatggggaacccgatgtgcttgagattaaggttatcagcacgaaggcttgcgcatcctgtgacaaaaccggagatggaaatgaggtactcttctcggggaactcattgctgattccttgcggtggatcatcttgtctcgaggtcgtggagcttcaactccctggaaagaaggtgacgacagcaagggacttctggaatggtttgcgtggtcagaggctgctgaaatcaccatagaagaattaccatgatcatcacagcgtatactaccactgcatgaacaacaaagacgatcgtatgtgatatgcgc

SEQ ID NO: 42884 - DNA, 291 bp, Oryza sativa
  unsure (1)..(291): unsure at all n locations
  Clone ID: PAT_MRT4530_46093C.1
aaaacatcttctatggaataattttagtatgtcttggtatttgaacaaaatgataaacaggaatgttttgcgtggatttctttcacatgaaaatttgtggcttgacatgtaaaagcatcccatacatatatggttttttttttccaaccttaccaatttcgcttgatcgcgacaggagcagagcaccacggagcagaagcagccggtgatgcgtcanccngtggcgcgagcgcgcgcaggggcctggncaccgtctccgtggcgaacggttcgtaccccacggtgaccacg

SEQ ID NO: 42885 - DNA, 1996 bp, Oryza sativa
  Clone ID: PAT_MRT4530_46094C.1
atgtcgagccaccccgcaccgctcgcacaacgccgtgcgccgccccgagtcgtgcacgcgccgctccgcgacgaatcccggacgcgctgcctcctttttcgccggcaaaacccgccggccatgtgggcccccgccgacgactttctccgcctccctgtacccgtacccggcacagcgccgtgctgtggcctcccgcggtcccacgccgacgccgtccagcccgtctctccgctcgacacatcagtacatcacccctgccttgccctctttttgctgacgtccgcgactcgccaacacccgctaccctcggtgcaccgcctcgcctactcgtgcttcatcgcctgcggtcgagagtccacgccgaaagccacactgccaccgtcctcgctcccctgtgccaccatcaccatgccccttacctttgcctctgcgccatcgcttcccgggtgctctcgccgccagcacctcccctgccgccaacccggggcgccgccgcgtgagcgccgcatccacgaccgcctgctgccggtctcccgccagtccgccgtttacgccatcccttccccctgccgtctccacctccgcctggccggcctggaatcaatttctccctgtcttcctctgggaaaggggagatcaattcgaggtcaaagttcctgagcaaatggctccatatcaccttaatttgcatgtaagcgaaatcctctcccaaacaaacgtgcctcccggcactaaacggtgtgtaggagaacttgccaccaactttgtcctcctctctaccaggaccaaatctacttgggtcatatacattagggtccttatagatgtagggcagtctgttgccgacagtcgtacaggtggccaatgtatgtcccttggggatttgatacctgtggccttgtcttgtttgtacgctgaagctcttgcttgcgtggcgtatcagcaggtttgctggagggtgcaaccgtagggcctctttgatgcagtgagtcagtgtggtcatctgtagcaagatgccccagtttatgcgatccccatgttgctggatgattcttttctgctcttggatggcggctgccaagtagcttcggtggccatggctgagcaggcaagctcctgtccatgtgctggtgctggagctcgtgtgctgcgcagcaaacatcatgcaaatgagtagcccggcgatctcattctcggtcatgcagcggccgttgatgtatttggagtctaggaatttctgtagcacatcatcctcagctacgcctgaattcctgcgtgatctcactgcctcgtggatcatctccccgagcatagcacgggctttgtcgcgccgacggtgctgtggggtagggagatatgggaagaagaggctgatcaagtggaaaccgttgtcgaagagctcatggaggagtgtggatacttgttccaacttactctccccgaactgttttccaagcaagcatcggtttgcaatcagcaggatcaggttccccatctcatactttatgtccactacgccatcttccccccactgtgcaaagtagccctccacctcatgaaccatagaatcaacgtggcctctcaagttgattggcttgatcgagtcggtacagaagcttatctgcctgctcctggtagccaagtccacgtcgtacagaaccccacggccgaaaacgggaacagtaactttgtagatattggactgccggatctccgattctgaggcttggaagaaatgagccgtcaccagaagggtcaccagtctcgagtgtaggtcatggatcacagccggtagacccttggctataagtgtaggcagatatgcagtcagtactgaaactacgctcatcactggtggaagaagtagttcttcttccttattctccttttcgtacaggcacagggttcttggtctttgttggatcattttggtggccacaaacaaaactgccatgctcagacatgccgccacgagactagtgatggtcagatccat

SEQ ID NO: 42886 - DNA, 318 bp, Oryza sativa
  Clone ID: PAT_MRT4530_46095C.1
gtccgttgcatgtcagtgctgaaacttctgtatccatatgcattctcgatgctacactactgggggcatatatgatgatgaaataaaaccacctagtatagctggagagagaaagatatagaaaaattgtaataggtgtactcttgatgcttgttttaacaattcatttgtagcctacatagtccaatttatgtactatgcagaaaactcaagcttttgttagaattagatgcttctctttcctctcaaaggtgcaaaaatgtatgcaaccattgttcctaaataagtgcaaatgggcccaataagtggagcacagct

SEQ ID NO: 42887 - DNA, 444 bp, Oryza sativa
  Clone ID: PAT_MRT4530_46096C.1
atggtcgtcgtcgtcagattcgccgccgcccgcgtgctacccgcgccgcgtgcacatccgccgcccgccgccgtggcaggcctcctctgtcacctagcacggcctgcagcgtcgtcgtcgtcgtcgccgcggtcgtggtcgtcgtcgtcagatctgccaccgcccgcgtgcacacctaccgcccgccgtgtcggcggcatggggagccgccagtcaccacctccaaagccgccgccgccggtcaccgccaccagggccgccgccgccgttgctggtggggaggccgggagggaggaggagagtgagaaggagagaagagaagtggataagaagacgagagaaggtgaagaggatgagcggtttcatttgttggccgccagcaaaaatttgaccgccaatgaagattatctatttttgctggcggcgaacctaagtgaccgctag

SEQ ID NO: 42888 - DNA, 1506 bp, Oryza sativa
  Clone ID: PAT_MRT4530_46097C.1
atggagagagtattttccacacggcaaatacggagaaaacactgtttgtatgggctttgctttgcgcttaagtttgcacttagcaggcctaaagttaaactgggccaatcacctaccggtttactcttcactcaatccgaactccgaaaatcgagattcgagaaggttcgcgcgagaaacctttcgtgctcgatgcttccagaacccatcgatctcccaaaaacgaatgctcaaaaactatccatccatcctccgatccgccatgcggaacctccgattcgcctctccaaaatccaaagcaaagctaacccactctgcgagtgcgccaccgcgacccacccccactccggcgagccaatggacgtcctgaagcgcgagctacagcggaagcgccagctgctcgacgccgacttcggcggccgcaagctcctccgccgcgccgagatcgagcgccgcgagatggagcggatccgggaggccgagcgccggctcctcctccagaagcagctccggtcctcctcctcccaccaccgcgccgcgtcgcgctccacgaccacgccgggggctcccgacggcgacgagtcgtcgcggaccgagcaccgcggcgacggggaggagaaggagggcgcgccgctcctccccagggaggaggtcatccggcgcctgcgcgtgctgcgccagccggccacgctcttcggcgaggacgacgccgcgcgcctccgccgcctccacgccgtgctcgaggaccccgcggcgctcgccgacgtcgaagcggcggagatcggggagggccagaccaacgacttcctccgcgacatccaggcgctgcgggcgaaggccgttgcggcgtcggcgtcggcggcggcgaagcccaaggctggcgctgcaactgcagagagcgggggcgagacgagggaggaggtgccgttcgaggagctctgcgacgaggacaagatcatgaccttcttcaagaggctgatgagcgagtggagccaggagatggacgagatgcccgaggcggagaggcggacggcgaaagggaaggctgcggtggccacctgcaagcagtgcgcgcgctatctcgagccgctgttcaagctgtgcaagaagaagaccctgcccgaagatgtccgtggatcattgctggaggtggtgaggtgctgcatgagacgggactacttggcggcggtggacaactacatcaagctcgccatcggcaactcgccgtggccgatcggcgtcacgatggtgggcatccacgagcgctcggcgcgcgagaagatctacgccaacagcgtggcgcacatcatgaacgacgagacgaccaggaagtacctgcagtccgtgaagaggctgatgaccttctgccagaggaagtacccgacggacccgtccaggtcggtggagttcaacagcctggccaacggcagcgacctgcagtccctcctggcggagcagaactccaagaactcggaggagacgcttcggctggtggccgcgtcgtga

SEQ ID NO: 42889 - DNA, 848 bp, Oryza sativa
  Clone ID: PAT_MRT4530_46098C.1
cggacgcgtgggttcttatccacttctcttctctccttctcactctcctcctccctcccggcctccccaccagcaacggcggcggcggccctggtggcggtgaccggcggcggcggctttggaggtggtgactggcggctccccatgccgccctgccctcccatcccctcctcacccctctcccagatctatccgaggggaggaggccgccgtcggcgtcacaaccgaggggagcacacagcgcggtggagctgacgacacggcgggcggtaggtgtgcacgcgggcggtggcagatctgacgacgacgaccacgaccgcggcgacgacgacgacgacgctgcaggccgtgctaggtgacagaggaggcctgccacggcggcgggcggcggatgtgcacgcggcgcgggtagcacgcgggcggcggcgaatctgacgacgacgaccatgaccgcggcgacgacgacgctgccggccgtgctcggtgacagaggaggcctgccatggcggcgggcggcggatgtgcatgcaccgcggggagcacgcgggcggcggcggatctgacaacgacgaccacgaccgcggtgacaacgacgacgacaaagctgccggccgtgctcggtgacagaggaggccgatgggcggcgccacagcataggggaagcggcggcggcagcactgccctcccctccccctactgtgttttcttgtgtgttcttgtttgtaaagatgtttattaggatatgtgtgttgttaatctgttctgttgatgatgtcaatgttgaatttggattgatgccaaaaaaaaaaaaaaatgatgctcaaaaaaaaaaaaaaaaaaaaaaaaaa

SEQ ID NO: 42890 - DNA, 209 bp, Oryza sativa
  Clone ID: PAT_MRT4530_46099C.1
gttcacagtatcaaatcattggaacagaacgatactggggcctttcagactggtccatgtatagtacactgttacagctgaaaaacaaaaacagtattcgttgaccaacggccatactataatgatacatgagaggtgcaccgaagaaagggcacacaagctttataatttcattcaacacgacatcaaggaaacatgtgatggcatga

SEQ ID NO: 42891 - DNA, 273 bp, Oryza sativa
  Clone ID: PAT_MRT4530_4609C.1
agcagagttcatgtggagggactaaaagataagcgtacgtaatacatttagcttataaaaaggaagctacatataataatccatacaagtcgctatactaattggagattagacgaactgcagagtaataatacgtctggcaagggctatcataaatgggtcatctgattcctcgcgcctggttgaccttaactatgcataaatataatgcattgctgccttaattatgggagaaagggtggatggtgatacataacgcgtgagatggcacaa

SEQ ID NO: 42892 - DNA, 132 bp, Oryza sativa
  Clone ID: PAT_MRT4530_460C.1
ccagcgcacgcggttggcacctttgatgggattgtcaaaggccatggaggcttcggtttcggatgcgtgccaaccggtaaagaagaatgcggattcacaccaagaaaacagttaccggagcatatggctaca

SEQ ID NO: 42893 - DNA, 330 bp, Oryza sativa
  Clone ID: PAT_MRT4530_46100C.1
gtggattggtagtagaattgttgtataccacacaaaagaatgtagatactgtgaaataaacgtttgattgacatgtcacaattatagagcaagatttcatcaatacaacaaatgtacagcgagtgctttaagagtgagattatgccggcggtgttttttgcgtattctggtccaaaggtggagatgcatgcccaaaagacatgatggcatctttggcaggctgcggcaagccctttggattttatcaatcttcacgacgtactttgcctgttgcaggaggtataccattcccggaattacagacactttggccgctcttcccatttcagg

SEQ ID NO: 42894 - DNA, 420 bp, Oryza sativa
  Clone ID: PAT_MRT4530_46102C.1
atggcggttcagcctgggtctccgccccactcgctcctcccgccacgtggcggtcgggcgagggcctcggggcccgaggggtgtgacgtggcaccccgaggcccccctggctgcctctgcatcgtacgaggtgtagggggaaaaccaggctatagggccgcgtggctggatgggaaggtgacttccccatactccacatacccccgggcccatatcaccgacagtagctcccgacaccgcgtcggacagcggtcccctgagggcggtctggcgcggtgcctcatgacttcccgtaccgtggttgtgggcctagcggggagttcaaacggccgccgccggctggcccgaattgtcacccaacgctgcctcgactcccccgcctgccaggcacgcgacgggactgacgttgggcccgtctag

SEQ ID NO: 42895 - DNA, 2891 bp, Oryza sativa
  Clone ID: PAT_MRT4530_46103C.1
ctgcaggaattcggcacgaggtcaagctcgcgttcgtctacaaactgccctccatgtctctcccccgccgctttggatcaatcgtcagcgactcaccattcggcgactcggccattgacagcgatagtcgcacgggttcttgcttatttggatccgttcttccggggagcgagctaaccgggcgagcgagatgcagcaccagcaagctaagtttggttctgagtaaccgggctggtgggttagggtttgggggaaatcaagaaggcgcaagtggtccatattttcttggtggtgcttggtttcttttcaaccgtagagttcttcggtacttcagaaatgatgggtatgaatggcgaaaaaagaagaatgggaagactattgctgaagcccatgagcgccttaaggttgataatgttgatgcactgaattgctactatgcacacgcagacaaaaactctacatttcagaggcgtatatattggatgcttgatccggcttatgatcacatagtttttgtccactacagagatgttcaagagggcagcatttcagtatcagcactgaatgattcatcaacatccaatcagaatggcagtggtagcagagctgaggctcaaagttcacccggattgactagcgagctatttgccccatgtcttaattcatgcagtccaggatctgcggaagaagttagttcccagattatggccataaacaacgaaacaaatagcgttagtcaacctgattgggttcaacattgtaatcaggcagcgctgcgaaaacttaaggtgcagctgagtctggaagatagggaagatcatgatgtcgatgccaaagatattccatcaaacagtgaacctatcactgtgtatgggattcagaatgaagaaccaggcacttgtagaaatcttgcagatgtttttagtggactggagttcagcaaagaaaatcatcctgaagaaaccggactccctttttccagcactattgatgtgctgaaaaattcagacacttggttggaggaggatcagattgaagcaattctgcattcagcatctatgatagtgactgaaaaccaatggttcaatattcgtgaggtttccccagaatggtcctattgttctgaaagtacaaaggttatcattgcaggagacttccttcgtgatccctctcatggttcatgggcaatagtatttggcgatgttaagttgcttttcgatggtcatgtttctgagcaatttttaaagtttggcttgccattcccaaatcttgaatgcggactccaagttagcccatctgaaattatgaagggggcatctgagcggctgaaccgtgacaccgcagtaaattgtgtcatggaagtactgcttaacaacaagtttgaagagtggctgttttctaaatatgaacaaaatagtgaagggaatcattttctccctaggcaataccatggtgttatacatacaattgctgccttggggtacaactgggctttgaaacttctgcttaattcaggtgtacttgtaaactaccgtgatgcaaatggatggactgctttacattgggctgcacgatttggcagggaagagacggtagtgctccttcttgatgcaggtgccgcagctggtgcactgtcagacccaacagcacaagatcctgctgccaaaacacctgcttcagtagcttctgcatatggtttcaagggcctttctgcgtatctttcagaagcagaactaatagctcatcttcattctctcgaatcaaaagaaaacgggtcttctggagatcaaatatcaagagttgtgggcagaatatcagacacatctgcccatgcacaaagtggtagcgatgatcagcttgcactgaaggaatccctaggagctatgcgatatgctgttcaagctgccgggcgcatacaaactgccttccgtattttttccttcaggaagaaacaacaagcaggtcttcagaatagaggtaaccacattatatccattcgtgaggtaggtgctgcttcacacggtatgcttgagaaagccgcgttatctatccagaagaacttcaggtgctggaagaaacgcaaagaatttctgaaaatacgcaaaaatgtcatcaagatacaggcgcgtgtcagagctcatcaacaacataacaagtacaaggagttacttcgaagtgtgggcatccttgagaaggtcatgcttagatggtaccgaaagggtgttggtttacgaggattccaccctggggcaatagcaatgccaatcgatgaagaggacgaagatgacgtagccaaggttttccggaagcaaagagtggaaacagctctcaacaaagctgtttcaagggtatcatcgatcatcgacagtcctgtcgcgagacagcaataccgaaggatgctcaaaatgcacaaacaaaacaaggatgatgatgaaaaagtagaagtttctccagcatctcatgtttatggcagtggcagtcatcacatgtgttggctaagctacaacaagcaaccaatgttctaggcagtgcagtcatcacatgtgttggctaagccacaacaacaagcaatgcactagctggccagtattgccatgtccgaccttgttaaatgatctgacgagcagttggccttatgaagaacagtaaatccttggcgattcactgtgcagcgaatcctgaaaaaccagaggaatttatcgatgatccagtaccatcactggttcttcttgcccttgctctgaaaaaatgtgttttaccttttgtacataagaaaaatcatgtgcaaagctgactcttggccaatattcagaaaaggtgtaccctctttgcatttgttacccttgtgtatatgataatgaatgtgtggtgaatctttaaagtgaagctta

SEQ ID NO: 42896 - DNA, 135 bp, Oryza sativa
  Clone ID: PAT_MRT4530_46104C.1
atggagcgattgctagtggagctacccagacgcctcatcctccgtttctggctccagcacgccgaggagtggacgcagcacaggaaagtgaagctgagggagctggatatagttggatgtgtctcctcgccttag

SEQ ID NO: 42897 - DNA, 1617 bp, Oryza sativa
  Clone ID: PAT_MRT4530_46105C.1
ataatccatttgacatgttccccagactatccatttcaaagataccgggagtctgggagacatttctggtctggaataatgtgtgagctatacctgaaaaggtgctaaacagcatctcctggagcctagaaacctcagattccgaggcaactgaatcataaacacggaaacaaataaattatacagtgaaagaatggcaccgtatgcaccaactgtaattccttccctccatctaaaactcaggcctcgaatctaatctctaactcatccttgtcaaccatgaggtagtgagaccctctgtcgatcaccttcttgccgtctttccttaccctgctgaagtgctcacatgggctgatgtcaaacctgatgttggccttctcccctaccttgagatgctggctcctgaaaccgatcagctgggttgtcgggcggccgcccttagcattcggccaccggaggtacatgagcacagagtgcttgccatccatggggccatggttctgcacctccacaaccgccgggaacttgagctgctcacagccgtcagtgccgatctcttcaatgtggtagctctcatcaccttctgatgttgttgttgtcctcagactagcaagtaggttggtgtaggactctgctggcttaccaccagagaccagctgacgtgagtagctggagtagctgagaccgtagccgaacttgtagacggtcttgccctggtagaagcgatagctccggccagggtagccggtggctgggtcggcacgcatccgcatgtccgtcatgggcaccttggtgaactcttctgggtaccatgtcactggcagcctcccaccggggttgtggtcaccgaagagcaccctggcgatggcgagaccaccagcttgccctgggtaaccagcccacaggatggcgccgatctttgggttcgtctgcgcgaacgtgacgtccaccgggccaccggtgaggagcaccaggatcacagggcgcttcgccgcgtcggctacggcggtgatgaggctttgctgctccccggggagcaacaggcttgtcctgtcgcgcccttcgctctcctgcttctggctgagccccatgaacaggaagacataatccgaagagctcgctaccgcagcagcttggtccgtggcggctacgtcgcaggccgccgaattgcaaccagcgaggaacctcacgttcttgatgtaccccagtatgccgttgagcggcgtcgtcgattcacacggcgggccgaaatagttgccgatgagggccaggccatcattggcattggggccaatgactgccgcggaggccaccgccgtccggtcgagcgggaggatgccggcgtcgttcttgagcaagacaatgccgtccatcgccgcctcgagcgcgaggctcctgtgctccggtgtgcagatgtcggcagccccgagcccgccgtacacgctgttgctcctgggatcgccgtcgaagtgcccgagccgcatccggatggcgaagaggttcttgagcgccttgtcgatgtcctcctccgtcagcttcccctgctggatcgccgccgtggcgtgctgctgcatgtaggtgccacagttcatgtccaatcctgaaattcccaaatca

SEQ ID NO: 42898 - DNA, 750 bp, Oryza sativa
  Clone ID: PAT_MRT4530_46106C.1
atgcagtatacggtggaagggagcggcggcggcggcgtgcagacggtggaggcggcggtgcgcaaggggccctggacgatggaggaggacctcagcctcgtcaactacatcgccgccaacggcgagggcgcgtggaacaccctcgcccgcgccgccgggcttaaccgtaccgggaagagctgccggctgcggtggctgaactacctgcgacccgacgtgcggcgcggcaacatcacgccggaggagcacacgctcatcgtcgagctacaggccagatggggcaacaggtggtccaagattgcaaggtaccttcctggccggaccgacaacgaggtcaagaacttctggaggaccaagatacagaagaagcacaggaaaagcactgacggaatttacgcgacgacgacgagcgaaagcatcatgcctgcggctacagtgcaccagaacacggtggccgaggaccaaggcagcagcagcgtctccggccggaccaccaccgccaccgtcgccgtcacgcaggagtacgccactgaggcgccgccgccgagcggcatgagtagtggtagctacttggaccagctgcagccaggctacgcgagctcaatccatggaggacaagatggcggtgctgctgccgccgccgctggtgacgtcgtcgtctccgacgagttcttggcagcgtcgagcgacaacttctgggccctcgaggatttgtggcccacggtgcagtctctccacggcaattgctga

SEQ ID NO: 42899 - DNA, 350 bp, Oryza sativa
  Clone ID: PAT_MRT4530_46107C.1
aaatgatgtggctgacagactggcattctcagaggtcctctccagtgacacaattttcttaattccaatgaatgatacataccagcttccgtggggtaaattcaacggatattctaaccttaaagaagtatttccaagattcctttcctaccattttaaaaaaatggaaggatctaggcgcacagtccaccaacctcacatattctttacacagaaagagatctacacacctctaggtatatattttgatacacatctgtgctttaaaacacacatgagtgaatacacaatttcttgtgtatctgttggtgtgggatgtgcaagaaatgcatgctattttggtatgtcta

SEQ ID NO: 42900 - DNA, 927 bp, Oryza sativa
  Clone ID: PAT_MRT4530_46108C.1
gcgtactgctccccggcaatgtacatgttgccatcaagatgttgtccggtaactccaactgcaacggagatgaattcattagtgaggtctccaccatcggtcggatccaccatatcaatgtagtgcgtctggtcggattctgctcggaagaaatgagaagagcgctcgtctatgagtacatgcctcggggctctcttgataaatacatcttctcattagagaagtgtttctcctgggacaagctgaatgagatcgctttgggcattgcaagagggatcaactacctgcatcaggggtgcgagatgcagattctgcactttgacatcaagcctcacaacatccttcttgatgataactttgttccaaaggttgctgattttggcctcgcaaaactgtacccaagggagaagagctttgtgtcagatagggctttacggggaacagtaggttatatggctcctgagatggtatcccggagctttggcgttatatctgacaaatccgatgtttatagctttggaatgttgttgcttgagatggctggaggtagaaggaatgcagatccaaatgcaaactcaaatgcaagcagggcatactacccagcatgggtgtatgaccagctgatagcagatcaacaagttgatgagatatccaatgttgctgacatgcatgagctggagaggaagctatgccttgttgggctgtggtgcattcagatgaaatcacacgatcgcctgacgatgagcgaggcaatagagatgctcgaagggggtgtggatgcgctgcaagtgcctccgagaccatttttctgcgatggggatggcattggcaatggcatgccacctccacaagtcatggattcttactttcactcctccgagcttactgcaatttcagaagaggacgatggaatatctgaattagcca

SEQ ID NO: 42901 - DNA, 2136 bp, Oryza sativa
  Clone ID: PAT_MRT4530_46109C.1
atggaagcagctgctttgtcgaccgtcctgtatgtgctcgcacttgtggtagcggatgctgatcatcacgtcgtccgtgtccaaggacgacggcatcagtgccaacctttctcctgcggccatctccaaaacgtatcgtatccttttcgccggcgaggcgaccctcgcagtcgcaggtgcggcttccggtcgtacgagctagactgcagcagcgatgatggcaaggccaccattcggatcaacacagggaaatactatgtgagtagcatcaactacactgcttccatcttttgggtcgtcgacgccaacctgcaggatgatgcaaacagcagctgccctcttcctcgctcggaccagctgccttacgttggtctgggtatcccaggatcacacgacagctgggacttgggccttgatgatatgattacttgggttggctttgtcaattgttcgcaggaactaattacgaacagtagtagcaaatacctgtacgtgtaccatcccgtggattgcctgaccacggctttgtccttcgtttattatatgctcccattttttggttctttagtaccatctgtcgaagacatcgaaccttcttgtggatacttggccatgactcctatcggcggtggctggaactccgttaatctgcccgaatacactagttatgcagaggttgtaaaatccatgaggggtggatttgccgtcaaatttccaacaccttggcttaattggtttggtctcatcaaaaaatgcctcaacaagtctgttagtcataggacaatgtctactaatgggggcttagaacatcttgattcactctttgctgcaaactccctgttgcccattcctcctacctcgccgccgttcgccggaacccgtcgaacttcgtccgccgtccaattgccccgcgatctcctctgtcttggtcaaagctacatggcaggactagtcgtccgccgtgggcaaggaccttcagcggcttggcgaagaggagaagggccacccttggtcgctggagggggaggagatgtcgatcgcgctggagatgatggaggcggagagggagatggacaagcgacgaagtcgacgatggatggggtcaggcgcttgagaatggcgaaggtttgtgttcgcaccgttggccgtgatgatttttcttactcgcaaggccaaggaggatatgggtctgtgtacaagggtgtgtttctcccgggtgatgttcatgtcgccatcaagatgttggatggcaactccaattgcaatggagaagacttcatcagtgaagttgccaccataggcaggatccatcacatcaacgtggtgcgtcttgtggggttctgctccgaagaaatgagaagggcattggtttacgaatacatgcctagaggatctctaaacaagtatatcttctcatccgagagaagcttctcttgggacaagctcaatgagattgctctaggcattgctagagggatcaactacctgcatcaggggtgcgagatgcagattctacactttgatatcaagccagacaacatccttcttgatgataactttgtttcaaaggttgctgatttcggcctcgcaaaactgtacccaagggagaagagctttgtgtcagatagggctttacggggaacagtaggttatatggctcctgagatggtatcccggagctttggcgttatatccgacaaatccgatgtttatagctttggaatgttgttgcttgagatggctggaggtagaaggaatgcagatccaaatgcaaactcaaatgcaagcagggcatactacccagcatgggtgtatgaccaactgatagcagatcaacaagttgatgagatatccaatgttgctgacatgcatgagctggagaggaagctatgccttgttgggctgtggtgcattcagatgaaatcacacgatcgcccgacgatgagcgaggcaatagagatgctcgaaggggatgtggatgcgttgcaagtgcctctgagaccatttttctgcgatggggatggcattggcaatggcatgccacctccacaagtcatggattcttactttcactcctccgagcttactgcaatctcagaagaggacgatggaatagctgaattagccagtagctag

SEQ ID NO: 42902 - DNA, 141 bp, Oryza sativa
  Clone ID: PAT_MRT4530_4610C.1
ggtctagctacaagacgagagctatattgggtatagaagtaccagctgtaaccagcgagtcgcagccatatccgtaaagcacaacgccattgccatgacataatcgcaactggcgaacatgacagttagctagtgctcgac

SEQ ID NO: 42903 - DNA, 606 bp, Oryza sativa
  Clone ID: PAT_MRT4530_46110C.1
atgcaggctgccaagcgaatcaatttacttgcagtacgcaccatttacaccaccatggatattcaaggcggcggcaggtggggaggaggcggggcgaggcaggagaggaggtgctgcatccggcggcggagacgcgggataaggggagggcggcggcgacgggagaatgggaaggcccagctgcccgtctgccttgacgccgcggtggcacgccgtcgtggttgcgggagaggcgtcgacgacgaggaacggcgcggcgtgacacagggccggaagcgagcatggtggtgggaggaggagggcggcggccgtcgagctaccaggatgacagccatcgcgccacagtgggatccggtggggacgagggggacaccgacgccgacgccgacgaggaggagaggatcccgtcaggaggagcagacttgggcgaatggtatacggtgcaaaagcggtggaggtggcggtggagtaggggaaggtgcgggcaagcgtggcggcatttaccctacggggcgggagaggttgagcttggactcgtctctactgcgcttcttgcagcggcggtttctggcgtcaacggcatcatcgtctgagtctgaatcgtaa

SEQ ID NO: 42904 - DNA, 468 bp, Oryza sativa
  Clone ID: PAT_MRT4530_46111C.1
atggcgtgcaagtgggtgcttgaggtgaaagggggcagccgtgcaccggcatgggcggtgcgatggcgagggaggatgctgacatactgtgtgaccaatgagagctgtgtgcagatgctgacatactgtgtgaccaatgagagctgtgctggttacgcggttctgaaggagggggggctgttacacagtggcgatggcacgctcaagatggttatgccacttccaattcgcatgcgggtgaaaggagagaacctgcagcgaagaggaagaaggaggaagggctgttatacagtggcgacggcaagctcaggtcagtcatgccactcccgattcgcatgcgggtggaaggagagaaccgacaacgaagaggaaaaggaggaaggagataagcagcctgacgagacgagggagggcgtggtggaggcgatgagcttgggtcgaccacgccacccccaatccgtgcggtag

SEQ ID NO: 42905 - DNA, 267 bp, Oryza sativa
  Clone ID: PAT_MRT4530_46112C.1
atggcgacgcgaaggctgggagcagaggccaggcgaggtggcggcagcggcggcgacggtgtggtggagcggagcgggggtggagcgaaccctaattttccaggttgtgtggggggcagtggcgtgttttggggggagggaggggagacctggtgcatgcgagcaacaacgatggtggcagtggggagggaggaggtgcggcgcctctctatgctcactgcggtggaggccgaggtcacggagtgcaaggcgtactgctacatctag

SEQ ID NO: 42906 - DNA, 2567 bp, Oryza sativa
  Clone ID: PAT_MRT4530_46113C.1
tattgggttgggaatagccttatgttcctacggaagcgtctttgaccgctgcgcgacgaggcctctttggatgaggtgcttgcggaatttgtgggccgctacccccgcaaatcatcgcggcgcggacgacaatcttcgaccttgacgcggtggtgggcgacggaatcatcgacctcgtcgacgtgcatttagacctagagttcgatttttttttttgggacggatgggtacttttgttgctccaaaaggactcatcgacaccgaacggctgcgtccatcgggtcacagagcatacagctcatgtaccgcgctacactttgcatatatttcatcagctcatgtacaactcaagtagcgcgcgtggtacatgagctgatgacggaaacgacatgcgacctagcttgtttccatggaaacaatgctgcgaggtgactgccagcgatagatgacggtcaggcaaaatatctcggaggatacaagtggacagccacacaatgcatggaaccagctagggggccacatcctgcttctttggagctctggtgtgatcgaagttcgcgacatcagactaagacttctcaatcacgaccagaatcacactactgaacagctcggataaagcttcctcctgtaggcggtttataggcccacgagccatagaggaaaggaatacttccttcaaggaattaggaggctaaggccggaggatgacgagctgtggctattaattggtttcaacatgatttataaggcaaacgataaaaaataacacgaacctcaacttgaggtgaatgagccggttccgtgctgctcttaaccactgtgagctcaaagagatccaccttcaaaataggaaaatcacttggagaaatgagagagtttagctgacacttgttaagatggacagattcttctgcaacgaggaatgggacctcacctttgggcatcacatcctccatgcgttgtcttttggaatatctgatcactaccccttgcttatctccaacccgggcaggccacggagccgagaaccttcaaatttgagaacttctgggtaagactatcatgattcaaggaggtggtcctgcatgcttggactcaacaaacgacacaccacgaacctctacaccgcctagctagcaaacaaaatgagacgtcctatgattgctttaaaaagatgtgtaaagggcgtttgctcaaatatcacatggcattggacgtaatccaccgatttgacgtggcccaagagggccgacacctaattaacacaggcagaacacaggctccgcgcggccctgaaaagaaggctcctaggttttgcggtcattgaaagagcaagggaaaaacaggctgcaggtaacaaacattacagagggagatgcaaacatgaagtacttccacggcaaaatcaatgcacgcaaaagaaaaaaccacatctatcgtttgcgcaagcagagtggttgggccgtcacacataaagaaaaggagctctccatcgctgagcacatccaacacgtaatgggccggcctgaggctagaacacacgatctcaactgacctttcctaggaatcaccccgctagacattagcagcctagaagaaccattcacggagggcgaaatccagaaggcgactgtacgacgtaagaaacgtgcatctaaatcttctcaactctacaaatgtggtccttattccaaataaagatggagcggaggaaattggagactatagaccaataagccttcgtcaaaatcttatccaaagtgttggccatcagattgcagccgctcatgcattcgatgatctcgacaaaccaaagcgctttcatctgaggccgaagtatacatgacaatttcatgtacgtcatgaacatggtgagaaagcaccatagaaaaagaagatcgattctgctcttcaaacttgacatctccaaggctttcgactcggtgcaatgagattacctcctaaccttagtgcataatagggggttcccatagagatggaaaaataggataacgggcattctatccatttccatatcaaatatccttctcaatggaattccgggccaaatgattcggcatggaaaggggttgcagtagggtgatcctctatccccgcttatgttcatcttggcaatggatcccctataacgaatgctcaaaaagccactcaaatagggctgatcagtaagctacgaggcagagcagtacgcttttgcacgtccatgtacgccgataacgcgactgtcttcacaaacccaagcaaagaggatgttcaggccttctccgacctactccaccactttggacaagcaacgggattatgtacagacctgcaaaagtcacaggtggcaccgattcgatgtgatagcttagacctggacggcatccttgatggcacgccagctacgcgggcctccttcccgatgaagtacctagggctccttcttaccacaactaggctatgaagaagggacctccaaccgctctatgacaaaatcaatgagccggattgcaggatggcgaggaaggcatgtggggtataccttattcgtaaccctgaca

SEQ ID NO: 42907 - DNA, 361 bp, Oryza sativa
  unsure (1)..(361): unsure at all n locations
  Clone ID: PAT_MRT4530_46114C.1
atggcataccgggaaaaacctcacaatctgacatcccgttcttcgtagatgctatccaaatgtcaggtattcgagtgcagtcacttataaatattaaggtctgtgtagcagacgcattgctcggaattatttcgcttttagaccactgtaaagcttacggttacgggcacatcgtataaatggcaccacccatcatggtatacacacatcgttcaagcgcataccagaaagatttcatcctatttatatcataaaatttatttagcacctgaggtctccgaatcctattgtacacataatataaacataattctatgntaaatagaaattgttcgntatatcctataaaaaaaaaaaaaaa

SEQ ID NO: 42908 - DNA, 780 bp, Oryza sativa
  Clone ID: PAT_MRT4530_46115C.1
atgcggcggaagccactgacgatagaggcagtggggcgagccaaggacgacggggacttcaacaacgccctccatcgtgccacgtctctcaacggcggcagtgtctgggcacagcaagtcgccgtctcgcctctaggccggtccatcgtcactccatctccaagccgcaacgttgcttcgcctcaaaagctgagccaccgctgctccactcgaggccaggccaccaccacgcgtcaggagcacccaaccaccactccgcctcgaggccacgttgtcgctccggcttctgccgtgccatcggtccacctcaaggccaagttgtcgccgcttcgcttgaggctaggccgctatcacgcctcggttggggatggcgtcggaccggtccgccccgttgtcctcaccacgatcattcttccctcttcctccttctactccatgtcaggtgtcaggggtgtcgggcgtcgtctgatgtccagtgttgggggtgttgggcgtcgcctggttgctatcggggaggaggaaaagaagtcatgcgctggcccatccatcctctcgcctcccacattgccgctcctcgtcgccactgctttacgtcgtcgatggaagggtgcagcagtggtggcacagagcgcggacaaggagtggaagtgtggaacgcgctccctacatccttcgatgccttccactggcccaccatgccatcaccgtctccaccgccggaattgtgccgcaaacaaggaggtgctcaagacaaccgctcctcgtcggggcaccgcttga

SEQ ID NO: 42909 - DNA, 363 bp, Oryza sativa
  Clone ID: PAT_MRT4530_46116C.1
atggcaagcggcgccggcggggtcgtctccatcgcgcggtcgtcgctgggtcgggttcacgacctaggccgacgccgtcgccggccggaggcggcaaaacccccgctcgtcgccgcctcaccccggcaccgtcgccgacctcggttccggcgccgccggcagccggagacggcagatccggcgccgtcgtgcgtggatctggccccctcgtggccagatcgggatggagcggcttcggccgcgtcgcatcgaggaggaggccgcgacgccggcggaggagcaattctagcgcggtggaatgaccgcggctgctgccgctggtcgctggccgctgaattgcttgattccttggggccaaaataa

SEQ ID NO: 42910 - DNA, 3192 bp, Oryza sativa
  Clone ID: PAT_MRT4530_46117C.1
atggccgccgccggcgtgccattctccatccgggggtacgcggcgcgggcgcgggcgggggcggcggacgaaggggggagatgctggccgttcgcggggaaggcgggggcgctgccgccgatggaggtgagggggttccggtggtgggaggacgaggccgccgcgctggccgaggaggaaggggaggaggagcggaggctggcggccaagcggcggaagcgctccatcgtcgagctcttcgccgccgtgcccaaggtcgtcgccgccgccgacgaggggctcgggagggggaagcgtgtcaggaggaagctcgacaagggggacccgccggcggtcggggttgaggcggcgaagaagaaggggttcaggaagcagaaggttctagttgagatcggcgtcagaaaaaaagctttgcattctgagaagttcaaggggaaaaatagcaagacaaaagtcacctcagctagtatgtcgcagttgtttcaaaatgccatacaaaagcagaagaaaaaatctcttagcaagaaaaaaggagttccattggaaaagaaaagcatgaagggaaacaaaacaacaactttaagcagccagaagactacaaagagtagctgtcatgttcaaagcattcttaagaaacatttgaaaacaggagtgggcacactactaaaaaacacagatgttatgtctccatcaaagtctttactcaaaccaaagcgtgttaccttttctgatgacaatgacatacttggaaggacagactcccaacttggagatggcacagagaaatcacagttgttacaaacatcccaacaacactacaaggatggtaaatctcagggaggtgacaatcactgcagtacatatgaaccacagttctcgtatcaacgagcaggtgctatcgtggatagtgttgaggaggataccagctctactgttctgcttactaaatcaaaagagaaaactatattggccaatccagtggatctgaatcattgcttagagatatccagtagtggtagctgtttgaactctattaattcagctgtcctatcaggtcaggtccttccccaaaactttgctggtgtgggctctattccgaatgaaggctcaaatgttcatgttggatttcaagcagaagaaaatcatcataaataccacggatcatctgttggtgctagtttagcagtcaaggcgagatcaagcgatcttattaggcgacaactgcctgaaccttctagttcttgttttgttgcttctctccgtgtaaatgatgggaacagaagcaaaatgcttcaggaaaggttgacagcacttcatcctaggcttattagatcgaaagacatggtgaacagcataagctcttctgcaggatcaaacaaatcaaccgatgcacaaactccaaattgtgtatctgcatgcaggaacatgcatagtgaaggctatcaggggcttcctcttaattcacatggtgaatttgtcaagcttcatcctagtggcacaatcgatcctaatgggatgtttaagagacaatttccggtaggggattacgtaagaccttcagcatttccagcctttatcacacctgaaacttgcgtggattatgcccatttaaaaagcagctatcaaggaccacaattttgtgcagtagatacatttgattttcagtcagagccttatcattctcctacagcatcagctgcatatggtatgggtttcagacagtcaccaagttctgaaagaatggaggtacatggttatgcagttcctagcaataacgatccatacagcaaccagcaagagctttcagtgggatgcttttgccctgcattcacgggacaaggtaatcaaacacataagccactagagatgcaaaattgctttcctagtcagcattatgagcagaactcccagccagctcctgaaacaacagtgcgcctgatgggcaaaaacttcactcttggaaccagcagtaaccaattcagaggtctagataacaagaatccttgtccaagtaaacaaagtagagatgaagatcatggtacgtccgcaaaagctttttctcagttgtttcatggtacgcgtgttgagcctcctagcacattgagaaattcaaatggaggggtggaacatccatcacgtttttcttctgttccggaagctgaactaaggtgtggtcttgattcctatagtttcagaacaagtgatcgctatcaacaacctcatctagctgttcaaaataagctgtatgttaacccagtgagcaggcacaatgagtctgagccatggcagcagcaactccatgtggaaaaccatattcttggtgcttctgaaccccagctccttggtactatgcacctcagacagagtaaaactgctgcaacagtgccatcttacagtccaaagcataactttagcaacttagtggaaataaggccagcacgttctcagttcgcttattttccacggcaaaacgtaacacagaggactccaatatcatcttttttgtctggttacgctgttcagagcagtcctggtttgacaactccaacaaagtttacctccctccgtccattgcccccttcagttacatcttctcatgtttacagcagtgaagacgcacagcctcatggatctgttcctccattttatccatcaattgccttgtctgatcaggcaagcaaaaattgtgatcctggtgatctcaaagacaataggagcatgcagcagactccgataacatcaaatcatgatagttctgaacaattgaacagaggtttcaaaaggccagcagtagaggatgatgtgttcctgaaaccaagaaaatctttcatagcagtaggaaaggacctaaatctgttaccacttcaagaagaaaggctgggattgtgtgggtctagaccagatgcacaactgcctgtttgtctcagcaaagattctgaagtggatgttcaacttttaaacaacgatacgcagatcgcgtggtctgattctgtcaatcgggtaagaacaattctacctgttaagttgagatctggagcgaagcatatacttgagccaggtgctagtcctactgctaccttgggccaagaggagtcatggcctttgcattcgattaaaacttttgtagtggaggatgatgctcacgcagtaggcacatcaaagaagagagacgaagaaatttgcagagtctga

SEQ ID NO: 42911 - DNA, 206 bp, Oryza sativa
  unsure (1)..(206): unsure at all n locations
  Clone ID: PAT_MRT4530_46118C.1
gcgtcggtggttttgtttgcgtttgtgtggcgtcgcgtttgctctgtcccgcgtgttgttgcntgcctttgtttttcggccgcgtggctcgccccgggttttccgggccggttcctggcggcgntcctgctttccctgtggtgggtcgtttttgggcttggcgctgtcctggtcgtggctgtttcctgtgcgcttttgttctccgc

SEQ ID NO: 42912 - DNA, 213 bp, Oryza sativa
  Clone ID: PAT_MRT4530_46119C.1
atggatgcgattagtatcgaagagatcactgagatgacagcagctatagatgccaaggagcaagtgaagcaaaacaaggcttacaagtgccagatggaccacaaggttaagaaaaataaggccacaaagttaccaaaaaaggtggaactttgccagcactacatatatttgaaagttcttaggcaagctgcagttatacctctcaaggaatga

SEQ ID NO: 42913 - DNA, 792 bp, Oryza sativa
  Clone ID: PAT_MRT4530_4611C.1
atggttatcgttgggtcgtccaccgcgggatctgactacgcgatgacgatcaccgcgcccttcgtcatggcctcccgtgctgattggagtatggaggatctggcgttgcttggagttgccagggaacacccgcttgacctcgacgtagagctgtcggattgccacgccctggaagcgcgggttgacgatggcgatgacgacggcgaggcaccgttcctcgcaggcagaggagaggcggaggcgaaggtgctcggagagggcaaggcgatggctgccgccgcggaggtggaggcggcggcgagaggggaaggaagaggtggcgacgcaaggcgacaatggcgactgcgcgagggaaaggcggacatggtggcacgaggtggaggcggaggtagcgcgaggcggtcgcgacggcgacgggcccgctttcaccaccgctcgacgacagcgacgatgcgaaggggaggcggaggagctcggagatggcaacgcgacggcggcggcagcggaggtggagacggcggcgcgagggaggaggaggtggaggcgacggtgacagggacgcgacgacggcggcgcgaggggcaggcggcgatggcggcggcgcgagggggaggcggcggcggcggcatgagagggagagggagagcgctgcctggagtgtatctggccgggactgacgtgccaaatccaggggttaacacgccagctccggctagggacgagagcatggaggctctcatcatttcgacgggacggggcgaggcgtgtgacaggccgcctgttgccacctaa

SEQ ID NO: 42914 - DNA, 1502 bp, Oryza sativa
  Clone ID: PAT_MRT4530_46120C.1
ggatccccgggctgcaggaattcggcacgaggtgtactgccgccgcgctgctgcatctagttctctgtccgccgcggagtcgaggtcccctttcgccgcatcgccgctgcgctgcccacaccgacctcttctcctgccgccgccggccccatccgccgcggtcggcaccgagggcggccccttccaccgctgccgccaccaccatcaccgcggtgcactccaccgctggcgagccgatgtcctccccattcgccgccgacgaagccgaggtcgtccctagccgccgccactgccgccgccgaactccaccgctgccacaggttactgccatactatactgaaaaactgaaaaagcatcacaaattttctccagtggttgaattatctccaggcaatgtagttgaatgtctctggttaacctaactgtcacaggttgctgggtgtcactttgtgtcttcctgtagatgtctgccattcttccccgtgttacattttccgaatcttgcgctccctccgcttgcatggccttgctcatatgagtctttattcgtcggcttttttgttctggttggaatcttcctccatgtggagttggcgacccgtcggcgttggctttcctccctctcatccaggtctacatctttctgcttgccactttggtgtcatgtcgtcggcccgtgtcctattgtcctatagggcattcatatggagctttggaatttctgttaatggaggcggcgccaggaaggagaagactgttatatgaatttcttccttgcattttgtttctatgcagtagaatatggaaataagattcacttcaaacttttcaataatttagtacactttcctgcaggtaaaacatgcattctgatagagcctaaagctggtgggacacttatttccatcgtctacatgataatttgatcatgcacatgagttgtcctcttgctatgaacaactgatagagcccaagataaccactgatcatcttgactgatgaactactaatttcaatatgtgtatgtatgcaggtggccactgatcggtgccccttggcctattgcagtggataatgttgttggaagctctacaccaaatccatttgcatgaaccaggtgatgcacacccaattcccccttggcctacccagtgacatgcactggaatcttagcaattgtctgatcccttattaattcaaatgcattcactgcgcattctataactctgtaacatcatgacaacttgggctttgatgattggggatactgtcagtaggagaagaatcaccatcaccacaaaatccactttcattgcactctggcgtggacaattgtatagacatatggctgcaagtgaagggagagatcaattgttgtactttaaaggcttcagatacaacaaatcattgccttataatctctttcggtggtgttcgcatttcaagaatcatataaatgtattttaaattttgtaaaaaaaaaaaaaaaaaaaaaaaaatc

SEQ ID NO: 42915 - DNA, 693 bp, Oryza sativa
  Clone ID: PAT_MRT4530_46121C.1
atggcggctagggcagtgtgcgcggcagaggaagggtggcggctagttagggtggcggcgctgtcttttggagaggataaaaacaacgtggttcaaactgcgatgggtatcgaggttgctcttctgaatctcaaggatgtcacttcagcgaaaccgttcatccaaactgccatagaacctaacttgaatggttttatgaagatggagggtgcagatttctattattgcggtttagggatgtcatttaaactctatgtaaagatgagggataacgcgggcgacgcaactgtggtgacagcgacgacaggcaacgcggcggcggtggggggaggagctgcgggcgggcagcgggggaggggcgacggggggaggagcggcgtgcggactcccccgctggccgccacccaaaaggcccacgaggcggcggcggggggaggagctgcgggcaggcggcggcgcgcggccggcggcgggcggagcggcggcagatgcacctgctgcacaggcctgccggaggaccgggcgacagcgcggggagcggccagccgacagagcagacgggcagtgggcaggcacgttgtgggagaggaagatggcgccgacggggagagcgaggacactgccgccgtcgtcgtccatggccgcagatctcgcgccagcgccctcaactgtgtggccagtgggagtgtgtga

SEQ ID NO: 42916 - DNA, 391 bp, Oryza sativa
  unsure (1)..(391): unsure at all n locations
  Clone ID: PAT_MRT4530_46122C.1
ttggnngcnngattcggcncgaggacagacgaaactagacnccttcgccgagctcaanngtgaaggagctcaagaaacggccgcctcgccatgttctccatgttcggcttcttcgtccaggccatcgtcaccggcaagggccccatcganaaacctcttcnaccacntcgccaaccccgtcgccaacaacgcctgggcntacgccaccaacttcgtccccggcanttgagcacaacaacccaatcnanatggtgccancnaanttaccatntttacacttnttttacccncncaccgaccctgcngttgcanttgcaccaantgcttntatntatntcctaaaattgtgtgtgtgtntntgatcaatcaaagnaaattnctnccctnattt

SEQ ID NO: 42917 - DNA, 1934 bp, Oryza sativa
  Clone ID: PAT_MRT4530_46123C.1
acgtgaaacacttaatcttcatcaatcttcatctttaccttcatgactttcatacaccacctatgtcaagaaaaagaaaatactggtgatcaaatccacaactttactggtcgtgaccatctttttcgcgaaatgccttatccatttgaccatcctagtaaaaaaaagttgccttgttcgtgtcctagtgaaaaagttcctttgctcgtgctgtccggcatcaccttgaccccttccagtcaagcaattacgacacaaaagatacgataccgacacaagacatgaaaggagggggattttttttttttttttttttttttttttttttttttaggggagggttttttgcattctcctattgggatctttcaatattctaaagataagattatcccagcgtgtcatatgatgcagaaaacagcccaggtttcttttgagtaagaaagggaaacaaacaggctcaatctttctgaaggtccaaaggaggggcacaggaagaaacgggaaatcaaggtcagtgccctctagttgtacaccatatacttgggcgttgcgctgaacttttggtaacccttgatcaccttattcaccgcgtccaagaaatccttctctgtcaccgtcttcctgcgagcgcggatggcgtacatgccagcctccgtgcacacactccgtatgtcggccccagtggagttggggcagaggcgagcgagcagctcaaaccggatgtcccgctcgcagttcatggtgcgagtgtggatcttgaagatctgggtccggccctccaggtctggcaggccaaactcaactttcctgtccagacgccctggacgtagtaatgcagggtccaaggtatcgggcctgttggtggccatgaggaccttgatgtttcccctggcatcaaatccatcaagctgattaacaatctcaagcatagtgcgctggacctcattgtcaccaccaacaccatcgtcaaagcgagcaccaccgatggcatcgacttcatcaaagaagacaatgcaagccttcttcgatcgtgccatttggaagagttcccgaaccatgcgggccccctcaccaacatacttctgaactagctcacttcctatgactcgaataaagcaagcatccgtgcggttggccactgccctagcaagaagtgttttcccagttccaggagggccataacacagtactcccttaggaggatcgataccaagtttgacaaacttttctgggtgaagcataggaagctcaaccacctcacgcatcttctcaatctgctccttgcatccaccaacatcattgtaagtcacatctggtttttcttccacagtcatcatggtaacgctgggatcaatctttggtggcaaaggaatttgaatttggtacttgtttcgatcaactccaacccgcattccttcctcgatatcagtgggggagaccttgtcgcccaacccaaccacaaacttcgcaatttgcttgacattgatgacatatttagcatcgtccgtgttagggctgatgatctttgtgcatcttgcaacctgcaggggttgctcctcctgcatcatctgcttatcggatacaaggtcccactggctaggtggagccaatccagtgtcagactctttaattccacagagatcatttatcttcttcgccatctctttgatttccttctcaaccttcttaatgctggtcgagtaaggtccaagaccgtaggtcttgaggagggcgatgtcgtcctcgtcgagcgggcgcgggttcttctcgttcatgatgtcgtcctcgggctccggcgccatggctcccccctcctcctcctcctcctcctcctgccctcttctccggcgacggtgagcggcggcggcggcggcggcggcggcgagagaagcagttggcggctttgggtttacttgggttcccgggtttgg

SEQ ID NO: 42918 - DNA, 765 bp, Oryza sativa
  Clone ID: PAT_MRT4530_46124C.1
ggctgcgcggccgcccgccggcaccaccgtgccgtcaggcccggcggccggccgcctccatgcacccccggtcacggcggtagggcagggcggcctagcgcctctccagtcgcggtggcgcgcctcccggctggcttcgcgggagcggccgacaagggcgaggtgaagcgccggcgtacgcggactcgtgctgccagatgatctgaccatggtcagggtcgcaatcagcgtgctgttcctggacttgatcttaaccatccgctgttccttagactcaaaggaagtagtgcagattgctgccacgtagtcgatccgagctccccacgctgtgcggatccgcgtgctcatcacttgcaccaacaggaaaccgccacgcggccacgcaagaccgtgccttgccccgcgcgcgctcgcgaaaccgcgtgggtcccacgtgggactcctccgcatcgaaccagtaagcgccacgtcgtcttggagagcaccctcaccaattcccgcgcgcgccttctcctcccttgcgcgtcgtccgaatttggcgtgggtcacgcgagtagtcgatgcgcgccgtcgccgaaacctcctgccttgacgcccttgcttgccgagctgggccgtcgttgcttggatcatgctgtcctgctccatcttggactgggccagtccggtccagccgtgtggcatcctggccgagcccatgatcacgatggattggtggcctccctgccaaccaatcacagcacacatgcacatcacctcgtgcat

SEQ ID NO: 42919 - DNA, 756 bp, Oryza sativa
  Clone ID: PAT_MRT4530_46125C.1
atgggtgccggagtggtcggaggtggtgatggttggtggcagtggaggtgcgagatccgaagatctgtgggcaaatcgtcggctggagctggctcctggtggcggcgtcggcagcgtcgtcatcctcggctgggaggtcgccgccttgtcccttgcgtcggctgcggtggcttctcgtgtccttcgttggtccctcctcctcggcttcttcctttggttcccctccatcagtctcacctgcgccggttgttgttgtcgttgacctcatcgatgatggtcctggtgctgggtggtcttgtggaggaggccatgtttggagttctggaggcggcggtggatgggtgtatgctcttgccagactcttgtagactcttgatgcagacttcatcttccccagccaacttcgtcgtctcagcaagacaggaggatctttgcagccactacaacgctcgcatgatgaaggttgattggtctttggttcagtcttctcttttgtgcctgattagcagaaaccatgccgagtttgtcattcgggttgagctcggaccacatgcgcgatttcggtcaacagggtttttgttagagttcctcagattcaatgacgagctccgtggagatcctttgctgtgtccggtgaagctcacaccaatatctacggctcagcatcacacctctgtcctgtgctgtttctgtggaggcagccgagatggggattaccggtttgtcaagcggtttgcacgtcttatgaggctctag

SEQ ID NO: 42920 - DNA, 379 bp, Oryza sativa
  Clone ID: PAT_MRT4530_46126C.1
aaaagaggggctttatcatctttgggcaaaagactgggcagaccataacagcaaaacaatgggtggcattttatttatttagttattttttatccgcaagccgacctaagaggattctgccgcattataaacgtctgggaggcttttgttttggatgggagggaatgcaccgaactcatctcctttattaagctggagcctctgacccttttcttttgaaaagcgataagcattggctagaacatcttttgggagagcacggaagatggaactctttcctgcaggggggcttaccatagaggtaggatgggctttgaaggcagtggaggcagatccttttttttgggccttttttaaagtgcatagggggggggtaaaa

SEQ ID NO: 42921 - DNA, 1360 bp, Oryza sativa
  unsure (1)..(1360): unsure at all n locations
  Clone ID: PAT_MRT4530_46127C.1
nnnnnnnnnnnnnnnnnnnnnnnnnnnnnnnnnnnnnnnnnnnnnnnnnnnnnnnnnnnnnnnnnnnnnnnnnnnnnnnnnnnnnnnnnnnnnnnnnnnnnnnnnnnnnnnnnnnnnnnnnnnnnnnnnnnnnnnnnnnnnnnnctctcgggggtgtgttctttctcttccttttctctgctcgggtgtgtttctgcggtctttttcgctctgggtgctggcctgcgtttttttttttcttgttctttgtcttttctctctgctcggtgcgcttcctctctctccacaaatggcttcccatgggcgcccggagcgcggggggcccaccgcctcacgtctctttgtgttctgccgcgcgctctcccctctcctttctggctctttttttttttcggcgtctttgtttttcaacccaacacccaaaagcaaaagaaaagcagcaaccaaagatgtgcggcggagcgatccttgcggagctcataccgagcgcgccggcggcgaggcgcgtcacggcgggccacgtctggccgggcgacgccaacaaggccaagaagaagggcgcgcgcgccgacgacttcgaggccgcgttccgcgacttcgacaacgactccgatgacgaggagatgatggtggaggaggcggaggaggaggaggcgacctccgagcacaagccgttcgtcttccgccgccgccccggccgtcaaggcgaccccggtcatcaacctcgtcgaggaggaggacgaggaggaggtcgccgccgccatggcgtccatcaagtacgagcccgagaccagcgagagctccgagtcgaacgccctcccggacttctcctggcagggcatgtcggcctccgacgagttcgccgtcgccgcggcggcgctgtcgctcgacagcgacgacgacctcgccaagaagcgtccgaggaccgagccggaggacaccaccgactccggctccggcgacgacaccgacgcgctgttcgacgcgctgctgttcgccgaccagtacaaccacttcaacggcggcgcctacgagtccctggacagcctgttcagcgccgacgccgtgcagaccacccccgcccccgcctccgccgaccagggcatggggttttggagcttcgacgccggctgctgcctcgtcgacgtcgaggccagcttgtccttttaggctctagccgtcgtttccggcgaccctgtgactcgatcttgtaccatgtcatgtacataaaagagtggttttgccaagcaagcatgtgttcgtcctggttcctttcggtaatgaaaaattatgtgaggcttttcgttttcgtaaaaaaaaaaaaaaaaaaaaaaaaaaaaaaaaaaaaaaaaaaaaaaag

SEQ ID NO: 42922 - DNA, 1419 bp, Oryza sativa
  Clone ID: PAT_MRT4530_46128C.1
actcgccgcgcaccgcgggttcccccgacgggcccaagttcacaacccaacacccaaaagcaaaagaaaagcagcaaccaaagatgtgcggcggagcgatccttgcggagctcataccgagcgcgccggcggcgaggcgcgtcacggcgggccacgtctggccgggcgacgccaacaaggccaagaagaagggcgcgcgcgccgacgacttcgaggccgcgttccgcgacttcgacaacgactccgatgacgaggagatgatggtggaggaggcggaggaggaggaggcgacctccgagcacaagccgttcgtcttccgcgccaagaaggcggcggcggcggcgtcgagcaggcgcaggaagccggcgcagtacaggggcgtgcggcgccggccgtgggggaagtgggcggcggagatccgcgaccccgtcaagggcatccgcgtctggctcggcaccttcaccaacgccgaggccgccgcgctcgcctacgacgacgccgcgcgcgccatccgcggggacagggccaagctcaacttcccttccgctaccacccctgacacccgcaagcgcggccgcgccaccgccgccgccgccccggccgtcaaggcgaccccggtcatcaacctcgtcgaggaggaggacgaggaggaggtcgccgccgccatggcgtccatcaagtacgagcccgagaccagcgagagctccgagtcgaacgccctcccggacttctcctggcagggcatgtcggcctccgacgagttcgccgtcgccgcggcggcgctgtcgctcgacagcgacgacgacctcgccaagaagcgtccgaggaccgagccggaggacaccaccgactccggctccggcgacgacaccgacgcgctgttcgacgcgctgctgttcgccgaccagtacaaccacttcaacggcggcgcctacgagtccctggacagcctgttcagcgccgacgccgtgcagaccaccgccgccgccgccgccgccgaccagggcatggggctctggagcttcgacgacggctgctgcctcgtcgacgtcgaggccagcttgtccttctaggctctagccgtcgtctccggcgaccctgtgactcgatcttgtaccatgtcatgtacatagaagagtggttttgccaagcaagcatgtgttcgtcctggttcctttcggtaatgaaaaattatgtgaggcttctcgttctcgtaaaagatctttttggctgtgcctttgatgcaaaaaaaaaaaaaaaaaaaacgcggcccgggccccggtacccaattcgccctatagtgagtcgtattacaattcactggccgtcgttttacaacgtcgtgactgggaaaaccctggcgttacccaacttaatcgccttgcagcacatccccctttcgccagctggcgtaatagc

SEQ ID NO: 42923 - DNA, 705 bp, Oryza sativa
  Clone ID: PAT_MRT4530_46129C.1
ctagcggcgccctttttttttttttttacaaccaacaaaagaaatgatataatctcatccaaaactgtccacctccagttagtgcataaatagcagacaagaaaatgctttgcccctgtaccgtacttctagcagctaaaatgcaaatgtgatttctgtccctgcctcaggctttcatttccccacccacattcgcattcacctcaatcacccaaacacagctgtatggtactcctagatatataccacatgagctccgggaggtgaagcagtaaatatcccaccgatataatacttatcttggcgtagaagagctcctgtgaaatggtatccgctgtcagtcgagcaagacgaattcaggtcaagcaaatggagaccctggtccatgtatgcgcggcacaaaatattgccttcatggggggatcgatcgatgttgcctgctgtcagttgtgaaatcgaaggagtggatgagtgagcgtcatctgtagtacagcagtgtgctcggcctgatgacagtttgttccagaggcacagcatttgccaaggtgactggtaatgcgccgtgaagtagttatgcacgcagccgaactggcagaacctccagctgtgaatgtactgaactggcgcggggggtgtttgaaatcttcgacccacatgcccatgctcacatcttccatcttgaacaaaccttagggagtgatttgc

SEQ ID NO: 42924 - DNA, 417 bp, Oryza sativa
  Clone ID: PAT_MRT4530_4612C.1
atgacgatgcagtacaagctagccaatccaatcgtcggcgttgttgtcgtcgactcgtcgtgggcgaaagacggcgccgctgcacggacgaccgttcgtgtcgtcgctgagcagctgcagtgcgccgcggcagtcctcggcgacgcggcggatcgggcgagagcggcggcgggcgagagcagctatggcaggcgagcgcggtggcggtgggcgagcgcggcggcggctgctggtggcgccccgtcgccgcccaaatccggcggcgcccgccccctgctccgcttcggccgccgcccctgcttcgcccgcgcgcccgtctcggcccgtcgcggcgtcgcctacccgctgaagaagagagaaaaagggaataaagaagagatgacgtggcatcctgacatgtggggccatgtaggataa

SEQ ID NO: 42925 - DNA, 615 bp, Oryza sativa
  unsure (1)..(615): unsure at all n locations
  Clone ID: PAT_MRT4530_46130C.1
tgcccatccgtgacaagcgacggcaggggcncaaccagtcggagctngttgcacctcatcggcnacgtcagagggtgaacggttgctggttgatggtagcgacgacatgatcgacactgccggggaccgcgtagtccacagggagcggatgctagctgcaacaggcgagggcgccagtgcgccgtctacgcctagcagcacccacgccgtgctcagcccgcccgccgtcgatcaggctctccagtcggcctcttccaggatggtgatcgtcacccaaccccgtccccgtgcttcaccaccggaccttcccccagctcaccgtcctttccctctccaatctcctcgagcgagaccatctggcgcgttcacgacgactgctctgtcagtagcatcttccacgatgaccaattcaataatacaatatacaccacgtactccattaactcaattaatttagtacattccaagcatacatcatgatatatactctcctagtagcttgagaaacaatctatgatacatacataacgcatgtcagctttanctagcctgcatccagttcttcagcaaattttatggccccgcnccacctcaccaaaaaaaaaaaaaaaaaaa

SEQ ID NO: 42926 - DNA, 828 bp, Oryza sativa
  Clone ID: PAT_MRT4530_46131C.1
acaggacaagaatgattgcattaatcaagaggttgcaaaaatgcaaaatactgtcaggcaaaattacaacacggtcacaacaagatggttaaaattttaaatctttgacagaatactgttctagacttcaaatacttttgacaggaaggagtaatagaaaatgtaatataaacggtttggccaatccacaagaactcatttgcaatgactggaatcacataaagggaactgggaagaaattgctacggtactatagaacgaaatcggctcaaactgtaattagtcatcatcaccgaacgttgaagccatcgatgtcagaccgattcagctcaaatgatttcgataaggaacaattgtctgcaaaatccacgtatgcttttcagttcaaaaaaaaaatccatgtatccttatttttcatatatgtaacgggccaactgaccctttaattgcaccagtatcataacccttaggaccaaaatgttctttgtgcgagcttcggatctagtaaagcaaataagtagatcacatataagacatgttcagaaaactaaaagtagacaatcagtcaaatttcaaaaacaacaatgtgaggatgacagggaacttacctgtggtctactccaatataactatcaaagccttcaataagtagagtgttgcatgcgctttgagcaggcttattggaacaactttgtccctcctgtgcaatgcatttaggaagaccttccaaaaagaatgacaaaatcaagacatacaatgttggcagttaaattttctggccacccacagcacgccaactgcagtcaaagataaaaaatagaataggaa

SEQ ID NO: 42927 - DNA, 464 bp, Oryza sativa
  Clone ID: PAT_MRT4530_46132C.1
ccggccgggcgaaaaggatgccttggtaatggtcgtgcttatatcgcctcttagttgtgggcgatttggagtgaactagcataaaaaggtcgaaactttacttaaaaaaaaaaaaaaaaaaaaaaaaaaaaaaaaaaaaaaaaaaaaaaaaaaaaaaaaaaaaaaaaaaaaaaaaaaaatccttttcgccgtaactctccaaagccatcccttcgtaaatccaaacaaaaaaacaaatccgtaaaaatggctccctccaacctgccctccgtaataaacgccaccagccagaacatcgaaaccctgctggccgctcagtgccacctcggctccaaaaacctccaggttcacatggaaaactacctctgaaaaacccgtcaggatggtgtaaacgtcataaacgtcggaaaaacctggaaaaaaattgtcctggccgcccgtgtcatcgttgccattgacaaccc

SEQ ID NO: 42928 - DNA, 216 bp, Oryza sativa
  Clone ID: PAT_MRT4530_46133C.1
atggcgccgagcatctcgctcgtggcggcgaccggtgttgaggcagggggtcgtggaaaagagtcggcggtcgtagaggtggtggcaagcggtcgtggcggagcgccggcggaccacggtatggtggctacgccgtgccgctgccgctgccgctgctcgaaagaggtcgcaggaattcgcccgttccagccggggggcgccgcgccttctcattga

SEQ ID NO: 42929 - DNA, 462 bp, Oryza sativa
  Clone ID: PAT_MRT4530_46134C.1
gatagaaatccaaagaaaaatacatgtttcttgcttaacatggattgctaaatgttacatgatattgttgcacagccatctttattgattggagaaggcatctccccctaatttaactaaacataaatgatttacttagtaaaaaaacaaaaacatacggcattacagattccaattatcatctactgacccacaggagattaggctaaaatttctccatctgaactcacctgtgtactcatatccgattttaaacatcccaaccttaatctaaatgttcctctgaataaaacaaaattagtgctcatctgcggatgaactcaactcagcgacaactcctccaatacttgatcgagcaaaaatagtccgagtatccaacattgcaactacaccgcggcaagcaaacgcatcagaatcctacagatacgaacttgacggatcgaccaccacctctccaagcat

SEQ ID NO: 42930 - DNA, 748 bp, Oryza sativa
  unsure (1)..(748): unsure at all n locations
  Clone ID: PAT_MRT4530_46135C.1
ccggccgggattctcatcattcaaagtaacattcacctctcgataatcaatcatcaaaagcaccaacgactctttcacgtcgatcataccaccaacacaacaacctccctccacacaatcattcacaatggctcgcggcgagactcagcagaccaaggtccacttcaagggcagcgatgactttgtcatcttcatcgacgatgtcgagacctaccagaagtggaagaccgacaagagcgtccccctggctcacttcatctcctctttcaagatcttctgtacacatggacaaggagcccagggaacactcgacgcagcttccaaggccgctcttgagaacgagctcggcacctctgtcgatgacgatgtcattaagcagatccttgagaagggcgagactcagaacactgagttccccgagcgccaaggcagcaagaacgacagcaagggtcctatggcctcccactaaaagaagcaaggtgccagacgatgtaccatgcagcgggcgttagggtttttatcaggtttagcgcgaagtcgagtacgacaaacaggggcggttgtcttggacaacaacattgatctcatccgaaatggtaagagattgttgttgggcaggtagcttggtccacgatcatagtaataggtgatcgggatcactagcatctcacaatctgatgctctgagagnacggcatanttgatgatagcgcctcataaaattcacaagcctttcatatttgacccac

SEQ ID NO: 42931 - DNA, 469 bp, Oryza sativa
  Clone ID: PAT_MRT4530_46136C.1
ttttttttttttttttttttttatatttttttttttttttttttttttgggttttttttttatttgttttttttttttttttttgggaagcaattttaattttaaatgtggggattaacaatttaaattgggttttcaaaaaactcaaaatggatcttttttggtaaggggcaaataaacgattgtcaattacaggggggcggacacccgcttttaaactgtttttgcccactttcttgggaaaaaaactaacaagggggaaaaattgacacattttttaaaacacgatttcccctgaatgaaaaagggattcaacaacagagggggggtcttggaaactcccaagggtaacaaatagaaacggccactaaacggaactagggggggtaaattatatcggggggagtatccaaactttgggtaaaaaaaaaaaaacaccaatttcccaaaggtttaatcaagggttgtt

SEQ ID NO: 42932 - DNA, 339 bp, Oryza sativa
  Clone ID: PAT_MRT4530_46137C.1
tcttttacccgtacgagagattctgaatgctagggggccttttataaaccgtgtgggggtgatacgcgataaaaactttgatatacggtcacattgtacaggcatatttattttaatagaagagcttgaaaaatggatcataaaattgaacgaccggatatatcatgacagcattcccttgcatgaggtgaagcttttgaccaaacagattagagagatttttaagaccaaaccgtaattcacttgcactcatgatcaccttgctcaaattcaagattcagaggtcgaaagagacgacatacatgatcatgttaacatcatttgttaggttattgatgt

SEQ ID NO: 42933 - DNA, 393 bp, Oryza sativa
  Clone ID: PAT_MRT4530_46138C.1
aaaaaaaaaaaaaaaaattttttttttttttttttcccccaaaggttcactggggaaattgggagagtttggggcttttttttaacgggaacacctaaaatttcccctttgggggggggaattcccgggggggggggccccaaattggcccccaaaggggccccggggaggggaataaaaagggcccctttcaaaagcccaaaactttaagcccccgggtttgttttttttggccaccccccccccggggggaggggggggatttgggccccccgggccccccttggggggggggagccgtttttaaggccccccctgggaaataaacccctttttttgggggccccgggacaccggggggggggccctttccccccctggaagggggtgggg

SEQ ID NO: 42934 - DNA, 1896 bp, Oryza sativa
  Clone ID: PAT_MRT4530_46139C.1
atgactgcaccttgcatcgccggtgccattaaaattgctacacacattagttccatgtgcagtcctcagtggtcaccagtctttaggcacgttgaagcggatgacacagctaagagaaggacccagaaaagcaaaagtttcaaagaggtcgaaaaatttgatgtctttgtcctagagaaaagctctggttgcaagttccggtccttacaacttctgctcttcgcgatcatgtctgctgcatttctgacactattgtacactccatctgtgtacgaccatcaaatgcagtctagttctcggtttgtcagtgggtggatatgggacaagaccattcctgatccacgatatgtatcttcgcttggtgttcagtgggaggatgtatataaaaccgtcgaaaatctgaatgatggtgaacggaagctcaaagttggactattaaattttaacagcactgaaattggctcatggacacaattgctcccggatagtgatttttcgatcattaggctagagcatgccaaggaaagcatcacctggcagactctttaccctgaatggattgatgaggaggaagaaacagagataccatcgtgtccatcgcttccagatcctatttttccaagagggacacactttgatgttgttgctgtgaaacttccctgtacccgagctggtggatggtcaagagacgttgcacgtctgcatttgcaactatctgctgcaaaagtggcagtgactgctcaagaggcaatcgtgaaccttgtgaaacatgaaggcaatgcttggatgtacaagcctgacttgaaggcactaagggagaagctcagacttccagttggatcctgtgaacttgctgttccactcaaagcaaaagcacgactttactcggtagacagacggagggaagcatatgctactattctgcattcagcaagtgaatatgtctgtggtgcaatcacagctgcccaaagcattcgccaagccggatcaactagggattttgttattcttgttgacgagaccataagtaaccaccaccggaagggcttggaagctgctgggtggaaggttagaataatccaaaggatccggaatccgaaagctgagcgtgatgcatataatgagtggaactacagcaaattccgtctatggcagctcacagattacgacaagattatatttattgatgctgatctcctcattctgagaaatgtcgattttctgttcgcaatgccagaaatcactgcaaccggcaacaatgcgacactgttcaactctggagtaatggttattgagccttcaaactgcacattccagttgttgatggaccacatcaatgagataacatcctacaatggtggtgaccaaggatacctgaatgagatattcacatggtggcatcgaattccgaagcacatgaacttcttaaaacatttctgggagggggatgaagaggaagtgaaagtgaagaagactcggttgtttggtgctgacccaccaatcctctatgtccttcactatttgggtctcaaaccatggctgtgcttccgggattacgactgtaactggaataacccgatactgcgggagtttgccagtgatgttgcacatgcccgttggtggaaggtacatgacaagatgccaaagaaacttcagcactattgtcttttgagatcaaggcaaaaggctgggttggagtgggatcggaggcaggctgagaaagcaaacttcaccgatggacattggcggaggaacataactgatcctaggctgaaaacttgctttgagaagttctgcttctgggagagcatgttatggcactggggtgaatccaagaactcaacgaaggaaaaccctgtgccggccacacctaccgcgagcctcacaagttcatga

SEQ ID NO: 42935 - DNA, 605 bp, Oryza sativa
  Clone ID: PAT_MRT4530_4613C.1
ttacgcgggggtgagtagaagtgtgtgtaccttctcggagatggcgtcctggacgacgaggatgtcgctggtgatggcgttgatgacctcgccggtggaggcctcggtgtcgaagacggcaatgtcctggtccagcatcgaccggaggtacgcctggcgcatcttcgccgcctgccgctcccccgtgtgcatccagcacgccacctcggtccacgacgagaagagtatgacgatgccgaggtacacgaagtccagcgagtacttggcgacgcggccggagacggtggtggggaagaggtaggcgaggccgatgatgttgatgagcttgccgaagaagatgaagaagacggggacggaggcgccgtgcgcgcacgcgcccagcgaccccaccgccatcagcacgtagtcccaccggtcggcgaacgagaacagcttcaggaacggcaccttctccaccttcgccgccgcctccttctctccctgctccgccttcttctcgccgccgccgctctgccgatgctcctgcacgccatgcaccggcgagctcatcaccggcatcagcacgtagtcccaccggtcggcgaacgagaacagcttcaggaacg

SEQ ID NO: 42936 - DNA, 335 bp, Oryza sativa
  Clone ID: PAT_MRT4530_46140C.1
cgagccggccggaagaagtagcttataaaatcatcaggagaacaaaacactatagcctgatcttgtgatggcaatcatttccaagaaaaatatcacaatggccctcggctgcttggtggcttttgtgatcttggctgtcgctctctcatcctgcaaagcggacgagagtacagatgtgtgtttctatacgggtctccgggcatgccaagtgagaatgtgtggagcctactgccgcaaatactatggtaatttggtagactggaaaggcgcctactgcaatgagcaagtgaaatgctgctgcaaagcaagatcgattagtcgttgaataaatcaat

SEQ ID NO: 42937 - DNA, 509 bp, Oryza sativa
  Clone ID: PAT_MRT4530_46141C.1
cccacgcgtccgcacagcgagagagagagagagagagtagagagagaggagtgagagagccggtggcacccagctaacccactcggccgccaccaactgcggccatttccgacgacgccgacgccggggcgcgcccgtcggtgctcccaagtccgccttctctgcggatgagaagctgctccaccgcggcggcgacagtgtggtcggccaccgcctgagaccggagagccatagctgacggctcgggggaagattcaggtgggctcgcagagaacgaaagagagtccccatgggttctttggagacgacgaacacgcggtaccggccggccggagcagcggatgacacagctaagagaaggacccagaaaagcaaaagtttcaaagaggtcgaaaaatttgatgtctttgtcctagagaaaagctctggttgcaagttccggtccttacaacttctgctcttcgcgatcatgtctgctgcatttctgacactattgtacactccatctg

SEQ ID NO: 42938 - DNA, 2662 bp, Oryza sativa
  Clone ID: PAT_MRT4530_46142C.1
gagagagagagagagagagagagtttgatagaggagtgagagagttcgctgccacccagctaacccactcggacggcaccaactgcggccatttccgacgacgccgacgccggggcgcgcccgtcggtgctcccaagtccgccttctctgcggatgagaagctgctccaccgcggcggcgacagtgtggtcggccaccgcctgagaccggagagccacagctgacggctcgggggaagattcaggtgggctcgcactagaacgaaagacagtccccatgggttctttggagacgacaaacacgcggttccggtcggccggatgactgcaccttgcatcgccggtgccattaaaattgctacacacattagttccatgtgcagtcctcagtggtcaccagtctttaggcacgttgaagcggatgacacagctaagagaaggacccagaaaagcaaaagtttcaaagaggtcgaaaaatttgatgtctttgtcctagagaaaagctctggttgcaagttccggtccttacaacttctgctcttcgcgatcatgtctgctgcatttctgacactattgtacactccatctgtgtacgaccatcaaatgcagtctagttctcggtttgtcagtgggtggatatgggacaagaccattcctgatccacgatatgtatcttcgcttggtgttcagtgggaggatgtatataaaaccgtcgaaaatctgaatgatggtgaacggaagctcaaagttggactattaaattttaacagcactgaaattggctcatggacacaattgctcccggatagtgatttttcgatcattaggctagagcatgccaaggaaagcatcacctggcagactctttaccctgaatggattgatgaggaggaagaaacagagataccatcgtgtccatcgcttccagatcctatttttccaagagggacacactttgatgttgttgctgtgaaacttccctgtacccgagctggtggatggtcaagagacgttgcacgtctgcatttgcaactatctgctgcaaaagtggcagtgactgcttcaagaggcaatcgtggtatccatgtgctgtttgtgacggattgcttccctattccaaatctcttctcttgcaagaaccttgtgaaacatgaaggcaatgcttggatgtacaagcctgacttgaaggcactaagggagaagctcagacttccagttggatcctgtgaacttgctgttccactcaaagcaaaagcacgactttactcggtagacagacggagggaagcatatgctactattctgcattcagcaagtgaatatgtctgtggtgcaatcacagctgcccaaagcattcgccaagccggatcaactagggattttgttattcttgttgacgagaccataagtaaccaccaccggaagggcttggaagctgctgggtggaaggttagaataatccaaaggatccggaatccgaaagcctgtgtgcgtgatgcatataatgagtggaactacagcaaattccgtctatggcagctcacagattacgacaagattatatttattgatgctgatctcctcattctgagaaatgtcgattttctgttcgcaatgccagaaatcactgcaaccggcaacaatgcgacactgttcaactctggagtaatggttattgagccttcaaactgcacattccagttgttgatggaccacatcaatgagataacatcctacaatggtggtgaccaaggatacctgaatgagatattcacatggtggcatcgaattccgaagcacatgaacttcttaaaacatttctgggagggggatgaagaggaagtgaaagtgaagaagactcggttgtttggtgctgacccaccaatcctctatgtccttcactatttgggtctcaaaccatggctgtgcttccgggattacgactgtaactggaataacccgatactgcgggagtttgccagtgatgttgcacatgcccgttggtggaaggtacatgacaagatgccaaagaaacttcagcactattgtcttttgagatcaaggcaaaaggctgggttggagtgggatcggaggcaggctgagaaagcaaacttcaccgatggacattggcggaggaacataactgatcctaggctgaaaacttgctttgagaagttctgcttctgggagagcatgttatggcactggggtgaatccaagaactcaacgaaggaaaaccctgtgccggccacacctaccgcgagcctcacaagttcatgagttcatgagatgtgtagatagccctataccagatacaaacttctaagctccatacatacatagcaacagcttgtaaaggtagctatgcttaggtttctcgacaaaactataccttgtgtttgctatcatggcttcggctccactctggctgctttgatagctcacaatttttttggttttttggccaataattcatcagtataggtaaattttctgttcatgaattgtttggtcagtctggggttggttgttgctcggctgcaatagcctagttcgatgtatggtggttgaactgtttcggtgataaaatctggagtgacgcaacatgagattgctgaccagcaaaaaatgcctcattttgacatgaaatacagtattgtttt

SEQ ID NO: 42939 - DNA, 297 bp, Oryza sativa
  Clone ID: PAT_MRT4530_46143C.1
atgaccttgggggaggaggcagagagcataagggcgttcagaacccgttgtcccctacaccaggaggttggatcttgtgtcctagagctcgggccgatcgagaggtgggcgctagcgctcagggtgaggaaggcagaggaggtgctatggggcagaatagagaactaccaacattggattgcgccaccacgaggtgagaggtcacctccgacggacctatgtgtgggcccgtcagaggagtggaaatggaaaaggatcatctctatgtcaacatcaaaaagaactcttgctgaatag

SEQ ID NO: 42940 - DNA, 1427 bp, Oryza sativa
  Clone ID: PAT_MRT4530_46144C.1
cgggtttccctcgccgccgccgccgccgccgccgccgccgccgcagtgaccacctcgctcgccggcggactcgattggctcaccggcggcgacggaggaggaggaggcatctgcggcgttcggcgcgaccccggagatggaggggttcctctgcgaccgcctgctcgacgcggcgcagcccatcgccgagcgcttccgggcgctcttctccctccgcaacctccgcggcgacgcccctcgccgcgccctcctccaagctgcaagggactcttcaaacttgcttgcccatgaggctgcatttgcactaggacaaatgcaagatgctgaggctatccctgcattagaggcagttctcaaagatctttcacttcatccaattgtccgacacgaggctgcggaagcgcttggagctattggcctggaaaagagcatttccctgctggaggagagtttagctgttgatcctgccgtggaagttcaagaaacatgtgagctggctattagacggatagaagagcaaaagaatactagtggagttgaaagtgcaactgtttcaccttttctctcagttgatccagcactgcctgcaaagcaaggacttccagtagaacaactaaggcatgtcgttcaacacagtcctacatgtcttcattgtgctttggagcttcttctcaacgagcaagaaagcatgtatgaacgttatgcagctctctttgcactaaggaatgacagtggagatgctgctgtttctgctattgttgctgctctaggcgtcaaaagtgctcttctacgccacgaggttgcttatgtgttaggccagctacaaaacaaagctgcttcagatgcactttccactgtcctgaagaatgttgatgagcatccaatggtcaggcatgaagctgctgaggcccttggttcaattgcagatcaggaaagcattgcacttctggagcaggtttgaagctgctgaggcccaatagtctcccagagctgcgaagtagcactcagcatgcttgaatatgagagatcagggaaggcctttgagtttttgttcccgcagactcctcaggtgcagcaggagtcctaagagatcagggaaggcctttgagtttttgttcctgcagactcctcaggtgcagccggagtcctaagtgagttgtgaaagtgtgaactgagagtgagaggccggctggaatgtgtctaatcctgtaatcccaaccttatacccgtctaccttgaactgatatgttcgtccaaaggatttactgatccatctctgggctctcattctaggaagaaaaaaaaaaaaaaaaaaaacctcgagggggggcccggtacccaattcgccctatagtgagtcgtattacaattcactggccgtcgttttacaacgtcgtgactgggaaaaccctggcgttacccaactt

SEQ ID NO: 42941 - DNA, 462 bp, Oryza sativa
  Clone ID: PAT_MRT4530_46145C.1
atggaggggttcctctgcgaccgcctgctcgacgcggcgcagcccatcgccgagcgcttccgggcgctcttctccctccgcaacctccgcgggacgcccctcgccgcgccctcctccaaggtctccccctcgtcggctcacccgcttacttctgcaagggactcttcaaacttgcttgcccatgaggctgcatttgcactaggacaaatgcaagatgctgaggctatccctgcattagaggcagttctcaaagatctttcacttcatccaattgtccgacacgaggctgcggaagcgcttggagctattggcctggaaaagagcatttccctgctggaggagagtttagctgttgatcctgccgtggaagttcaagaaacatgtgagctggctattagacggatagaagataggggatcctctagagtcgacctgcaggcatgcaagcttgagtattctata

SEQ ID NO: 42942 - DNA, 225 bp, Oryza sativa
  Clone ID: PAT_MRT4530_46146C.1
gtagaaggggggcaatgttaaaaaacgaaagacaactttttttctatttatatcacccaaaggttcacatggcacatacgattttttttgagcgtagttttaactttcaagaccctatacgggtatttctttttacaagacacggccacggctggcaagggaactggttgcgccataacacctagggccgacaccatacctagatggacacatagaaggccacac

SEQ ID NO: 42943 - DNA, 344 bp, Oryza sativa
  Clone ID: PAT_MRT4530_46147C.1
ggcccaaaaaaagctttttgtagggggaaaaaattttagttttttttgggacacgtcccccttgaaaagggacaaaacgtacgaaaccaacacccaaaaaaaaaaaagtttgtttgggggaccgggccgatcaaccatgggggcccccccatgcatgcttggggattggacgaaaccttagctgggcaatctttttttcccgaatcccaatttggccttccttggccggggaacaaaattgggttcccacaaatgccccagggggaatccacttggggggaatcgggccgcggatgaaattgtttgatccttttttttgaacggaggtttaatttaccctgggg

SEQ ID NO: 42944 - DNA, 409 bp, Oryza sativa
  Clone ID: PAT_MRT4530_46148C.1
tcgctcatgctttcgcgaatgcggagggtagtgcatattgtgtgttatgatattaggcgaatatgctagaggataccaacagtgcattgtatcgggtacacaataatagatagaacatcttgtaggatgacgttaatattgagaacggatcctatgagaatcttttacagcacatagaatcactgcatttgttggcaactaatttgttggtgctttcagctgtgctatatactgatagccaacttaataagagtctcgcacattgctaacgacatggcgtgatgattgtattgtaagggagtgaatgcaccgaactcatcttgtctgtgatgcttgagccactgatccttttgagttgagatgcgatgtgcatttgttagatcattaacagacacgtgggcggacccgt

SEQ ID NO: 42945 - DNA, 888 bp, Oryza sativa
  Clone ID: PAT_MRT4530_46149C.1
atggctgccatccatgccctccacacactgcgccgaacctccatggccatgcagacctccatcacagaaattgcggctgggcacgacaaggtgacagagttggtgctagcgctccgcgcgggttttgaggccaagagggcggcggtggaaactacgccgacaacaccctctccaatgccgacgctgccgaaggcggaggtgcagcagccactcgctacggcgccaccttctctgccatcgtccctgttcgcggctacagtagaggaaacggtgatgacggcgtcctctccactgccattgccccacccggcggaggtgctgcagccccttgttgctgcaccatcttctcagatgtcgtttgcatccaaggctgcggcagtgctgccctgcctaacaacagttgggccggcacttcctggggcaccatcaaccccgtcgcagccaagggagactatcttgtcgcgtcatgaccgttcccttctacgaccacgacggcagcgaggcatcttcaagcagcttcctcgagcatcgacagcgattacgctacgcgctgctcaacggcggggagaatcgagtgcggcgccaccggcgtgggatctaggcgggccacgcaagccgcactttcgggcggcgatcgcggcatgtgcggcgcgtgcgatgtggcttctggtggcgccttcctctctgcatggttctggtgtccttcctctatgtgcttccgggtggggcccacctgagcttggctgcggaagaatggcagggaccaccaacataattttagatttatttttctttccaaataatgttcggagcccagatgtaaaaggcttaataatatgggatgagtctagatgccaaaacaatcatcgtgtgcagactagcttgtag

SEQ ID NO: 42946 - DNA, 366 bp, Oryza sativa
  unsure (1)..(366): unsure at all n locations
  Clone ID: PAT_MRT4530_4614C.1
atcttctcntcctacatctgatcgcgatagccccaatcccaccaccgatcgatccagtcctggtgctctcgggcaccggagaaggatatatagagagatctccaccttttctgcgtgtgaaggatctcatcatcatcatcggcgggtgagcaggatgtgatgcgaatatttctttccttttttatcttttattacatcctctctcttcttctttttttctcttaccctctttatctttcttttccttattcctcttcttccttttttcttttctcccttctttctcctttccttctttcctttttctctccatctttttactttccatccccttttttcttctccttttatttctttccctctttt

SEQ ID NO: 42947 - DNA, 359 bp, Oryza sativa
  Clone ID: PAT_MRT4530_46150C.1
caggtctcagatgatagccaggctcaccacgagcgcttcaagaggtagcacgatgatgactctaaagctcacatcaccagctactaccagaagctcatgcatccacttgtgactgtatatcactatgaaggccccaacgtgaacacatcgttgacacatgctcaagccataatactcgatgagaggatccatgacaaggctcacagatacgatgagatcatcaagatcatcaccacaggcagcaaagcgacatgactagcgacagacgatagttacaatgatcagtagatacatccaatcactaaggatctcaaagctgatactaacgacgagttgcatgcgacactagaggcgatcat

SEQ ID NO: 42948 - DNA, 493 bp, Oryza sativa
  Clone ID: PAT_MRT4530_46151C.1
ttggggggagggagaaaatggtgtgtagaatactagaattcgattggagggacggaattttgcaggattctgttattgttctccgttggccgcgtgctcgctgttggttcctgaaaaggagataattgagtaatgtgatcaggccattttgagtaaatttccctaatgctttagtccctcttttattttttttcttccattaattaagatattaagaaagtaagaatagcatgatttacggaatcccggcagtggcagaatccagtttattgcaacctggagtggaaatttcactgaacattttggttcatcatgttgggtgtgttgttactgccgtaccggctcccattggttcaatattgttcgtcatcccaaagtagtaggatgagaaatagtgtacccgttttcccgcttaatatgttagcatgctacaataaataaccctcaatttctgtacggaagaaaataatattcttttttcctacagcctgaa

SEQ ID NO: 42949 - DNA, 792 bp, Oryza sativa
  Clone ID: PAT_MRT4530_46152C.1
atggcggcgcggcatgaggatgaggaggaggagactgctgtgctgttggcgcgacagtggcatatggtgcgaagaggaggcggcggctgtcggtttggcgcagtgctgcgggaagagaaacggcaaccgatcgagtgcggttctgccgagcccgtgtggggtggggatggggtgcagtgttgccgcgttggcgcgtccgtgcggttagggttttggcaatgtgggcctgtgaaagctttaccgcgggggtgcggtaaccgcgccaaaaacggtaaggggaaccctagtgagagggacatggacgacttaaccctagctcagaaattccccatctccgccgccgcggcggacgatgaggcgacgacggcgcggccgcttggaactgcgggaggcatccgcatccagctccccgcatcctataaagtctttattctcggtgaagtacggcatcaagtgcaacagcctgccacgttatcccatcttctctctcagatcactgtagaaacaacagtttacaaccacagccgttggattactcttggagcatcacgttcgtcgccgatgcagtttccgcagcaaagcgcggagtgccatctagtgagatcaacaagtggcgactgggcgccaatgctggtatgcggcggcgcggctacgcggcagggacacgcgcgtgacaggcggcgagccagcaggcagcaggagcgatgtggcaggcggaaggcaagcagcagcagcaagattttatgcatattattgcctgattccaaagattattgccatgctaaatattga

SEQ ID NO: 42950 - DNA, 555 bp, Oryza sativa
  Clone ID: PAT_MRT4530_46153C.1
atgaacgaggtcgagaagggcctacccggcggtgcatcggaggattacggcaaggtgctccgccgcgaccgttgttggctatttcgccgccccaaccaccgtttcgggcacctccttcgccgaagtcaccgcacaatcgctcgtatcctcaccgcgccacctcgatctctgcctggatccccaccgttgtccccaccactcagatccttactgcgtcggctctatctctgcctccactgctcgcccccccctcccccgctacggcgatcgagtcaggcaacactgaggggagaggcggcgccacagagggagagaggggagaggcggagaggggtgtggcttttggtggcgaggcgtgcgggcacgtggaggaagaagagcgacctgtgtggcactgtgcgtgaggcgatgacagagaaccacgtggatgaaatctttgacgtggcatatgcatctcgaatcgacgagggcatactacaatcatctcttggcgaaaacgtacaagaaaaacgaagcagatcagcgcccagaagagactcccaaaaacgaaagtga

SEQ ID NO: 42951 - DNA, 2481 bp, Oryza sativa
  Clone ID: PAT_MRT4530_46154C.1
atggcgaagactgaagcaaaggcggcgaagggcaaaggatcgcgctggtatcccgcaaggctagaggcatcttgggcgaagactaaatggcgaagggttgggaccgagttacgacaacttttctcaatggtggataaccaatcactgggaacgggaactaaaaccccccttaccaaaccaccgcctggtcagccatctgaaattgatgctgggaacatcgtcccgattactctagacaaattgtcacctgagcaaaggcaggaatttgaacagataatgagcaacgtgaagaataagtacttggaatcattcaaacagacccgtttaggacctgttcagaagtacaagctcaatgtagttgctgccaatgagcatagacaagcgcatcgcatgatggcaatgataaggaagataaaggtgataaaggatcaagttgactatgccatttaccatgctctaatcaaccaatcaggagtgcttgtcaatacattgacaaatatgatcaagtctatggttgatggtatagtggctgtagaacaagctaagggacctgttttcctgccagaaggagggtttcctccatacagaaatctagtgatcggcaatcaacaggttgtttctaatgtacctccgggacagccaatggcgtcggcttcagcttcaagaccaggtgcaacgacgtcagcacaaagaccggttaatccttacttattgaccagggaacaacctcagcatgctggacaaaacatgaatcggctatctcagcacagaattgcggcaatgtttaggtcacctcaaccggctgttgagccgattcagccaacacaaactaggcagcaagttgtgcagccgattggacaacaagccattcaaccagtaccaaaggagccgagaacacctatcaatcgacaacatcaacccgttggagctcaatttattcctaagcagcaggtgcataatgtgcaacagcctcctcagaattatcttggtggaaacttgaatttccaatatcagccgcattcacctcaagtccagtatcagccagggggatcacctcaacctcagtttttgcctcaatacaatcagtttaatcctactcagcagcagatgcaaggagtacctcagcagaagccctgggttgatatgtatgcagatgtgatgaaggagcagcttgggcttaaaccaagggatacaggaaacttatatcggcacccctaccctgagtgtggaaatcttgagatgaagctttctaatttgacagcagttaggcagaggcatgatgaaactgtgcaagactatattcagagattcaggggtatgaggaacaggtgttacagcttggctctaaccgattctcagttagccgatcttgctttccaaggtttaatagctccgatcaaggagaagtttttggctcaagattttgaaagtctatctcaccttgtagagaaggtgaccctacatgagcagaggtttgcagaggaatttcaagaagaagatgatgattctgaagtagcagcaaccgagtgggcaaggagtaagaaagttgtaccctgtcagtgggtgaggaattctggaaaagaggagaaatatgattttgatatcaccaaggctaacaagatttttgatttgctacttcaggagaaacaaattcaacttcctgctggtcatgtgattccattggctgaagagctaggaaaaaggaaatactgcaagtggcataacacctgtaaagttacaacagccaatgaagttgaagccgacaaagcgaagaggttgcttaaggggaaagctactgcatcttcatcggttaacatggttttcatgttgcctctagagtttgaagctaaacaagccgatgttgatgatgtagaggaggcctctgctaggttgattttgccaccagaacaaacaaattttgagaaaccagaagggatagaaaatcggcatctcaagccattgtatgttaatggatttgtcaatgggaagccgatgtccaagatgatggttcatggtggggctgctgtgaatctagtgccatatacttcgttcaggaagttgggcaggaatgaagatgatctcatcaagaccaatatgataattaaagattttggtggcaatccatcggagaccaaaggagttttgaatgtggagttgacaatcggcaacaaggctgtgcctactacattttttgtcattgatgggaagggttcctacagcctgttgcttggaagggattggattcatgcgaattgttgtattccttcaatcatgcatcaatgtttgattcaatggcaaggtgacaagattaaaatcgtgctagccgacaggtcagttaatgttgttagtgctgatttagctctttgggagatggatggaattgattgcttgtctggaaaatattgggaaggagattttctaaaggtgtccgattatgatatacagccaattgaagatggagagcccaaattattactttga

SEQ ID NO: 42952 - DNA, 191 bp, Oryza sativa
  Clone ID: PAT_MRT4530_46155C.1
ccgtaatccccgggtcgtcatcataccctttgcacttgtacctcatatgggacgtgtaagtgagcaattttaaagtgtaatgggggtctctaacgttcgttgccggaataaacaccttgctccaaacattcttcgcttctcatcctccccttgcgatgcgtgacttataccactttccttcaccaaccatt

SEQ ID NO: 42953 - DNA, 570 bp, Oryza sativa
  Clone ID: PAT_MRT4530_46156C.1
atggggttcctccatcggaagacctccaagcagacgggcaagctcaagaccctcctagggctcgccatctcacgcatcgctgctgtgcgccggcctcgcctagctcgcaagtccattgccaccgatgacgttcgccagcttctcaccctcggccacctcgatcgcgccatccaccgggcagaacaagtcataggggagggcaacatgttagaggcgttcgaaatgatagagatgtactacaagcgactcatcgagaatgctgcaaagctggacaagcctggtgagtgcaccgaggagatacgtgaggcggcagcggcagtcatgcttgtcgccggttggtgcggcgaattgccggagttgccgttcgcgcgcaccatcctcgcggacaagtttggcagtgacttcgctgaggcggcaaaggacggcaccggcattgttgatccaatggttttctggcaattgaacagcatggagctgaagaagaaggtgaccaaagagatcgccatggagaacaacattgtagtggacttctctgaactccaagatgcggtcaaggatggagaagactga

SEQ ID NO: 42954 - DNA, 412 bp, Oryza sativa
  Clone ID: PAT_MRT4530_46157C.1
aacatagatggacaaaaaccgcattgggaatttttgcatggagccaaaaacagtgatcactgttcatacagagtgatacttcaccagtctgtcacaatacctacatcgactaatattgctaactgaacaaactcctcaagctactgagctatgcacacacggattaccaaaacatgactgattgtggagtcatactgcccaatcgggcatcatccatagtcactgatcagcagtgcacaccgtgaggcgctttacccgaggcaggagcgtggggactcggtcgtttggaaccaggtcatgaaagccatcatggccaaaagctgataccttccacagaatctgataaagccaagagatccacctaatactatcaaataatcgagcaccggcctgctccaactaacaattacta

SEQ ID NO: 42955 - DNA, 612 bp, Oryza sativa
  Clone ID: PAT_MRT4530_46158C.1
atggggttcctccatcggaagacctccaagcagacgagcaagctcaagaccctcctggggctcgccgtcttgcgcatcgccaccgctcgccggccccacctcgctcgcaaatccattgccaccgatgatgttcgccagcttctcaccctcgaccacctcgatcgcgccatccaccgggcagagcaagtcataggggaggacaacatgttagaggcgttcgaaatgatagagatgtattgcaagcgactcatcgagcatgctgcaaagctggacaagcctggtgagtgcaccgatgagatacgtgaggcggccgcgtcggtcatgctcgccgccggttggtgcggcgaattgccggagttgccgttcgcgcgcaccatccttgcggacaagtttggcagcgacttcaccgaggcggcaaaggacggcaccggcattgttgatcccatgaatggagagctaacaaagttgggtcttgcagttggtgtggaggttttctggcaattgaacagcatggagctgaagaagaaggtgaccaaagagatcgccatggagaacaacattgtagtggacttctctgaactccaagatgcggtcaaggatggagaagactga

SEQ ID NO: 42956 - DNA, 1908 bp, Oryza sativa
  Clone ID: PAT_MRT4530_46159C.1
atggcaatactaacaagaataccagataacaaatgcagtagcagaataattgtgaccactcggatagagcatgttgcgagggcatgcagcccagctagccctggggaagactacatccatcgaattaaaccccttggatccgaagacgcgaaggaattgtttgttaacagggtatttggccctcagaaagattgcccggagcagtttgaagaaataatgtacaagatactaacaaaatgcagtggactaccgttggctattgtctgcattgccagccttctggggagctatacgtcaccgggaggagtagaggtgtggacgagagtttgcaactcaactggctctctcatggagaacaatcccacattggacggaatgagacagatattaacacttagctacaaccacctgcctcatcatctcaaggcttgcataatgtatctcagcactttcccagaggactatgcaattagcagggatcgtctggtccaaaaatggatggctgaaggattgatccccgagatgcgggggctaacttccgctgaggtagcagaagcctactttgatgagctgctgagtagaaatatgacaacaacagtctcgtattcaaatgatgggaagccaaatagttgcagtgtgcacgacatgatgcttgaggttattgtgtccaaggctctggagtccaactttgttagcttggtaggaggtcaatgtggaagcatgccgtatagcagtgttcgtcgtctgtccatccaaaacgacgacatagggtctgggatcgacaatacaaacttgaggcacgtccggtcactgactgtttttcgtcccgagggtcatcgaaagttgctggatagattagcggagttctctctactaaggatgcttgatctagaaggttgcaaggacttgcggaacaagcatatgaagcacatctgccggttgttcctactcaaattcttgtccttgactgacacagatatcacaaaattgccaagccagataaacaagctgcaacatttgcagacactttggttatttaacacattgcttgacaaggtcccagaatccttggttgatctagagaatcttaaacaagtgggtttctcaaaccggcaagactggaggaaactcctgaggctaccccaacacattagtaaaatgaaggccatagaagagttaactaggttcgaactcttaagtgaggatgctcaactcgccatggagattggcgaccttgtacatctacaatttctcaatgtcgtcctcaattgctttgactgctctgatgggcagcttctcaccgagctcgcaaaatccataggaaggtgctccctctatagattgaaagtcgaggacatgatgcctgattcaaacaacatgaactttctcctcaacctcccctcaccaccaaagttactccgatacctctgcatcggtggtaccatcgacagaattccaggttgggtgcagtcactcactcaccttgtccatgttgagttttggtggatataccttcccagcgacgaaatatacggtgccctgtacaagctgcctagcctgacaaagatcagcttggataggtggtgctgcagcgaagatgagctggtggcgcgcaccgacttcaagttcccgctgctcaaggtgctgtcctttgttccagatgaaggtacgccacaagttgtccggtttgaggaaggagccatgccaaagctggagaccctggtcatgtatttccatgacaagaaaaggtcccttgaaggtgttgagcacttgaccagccttaaggatgtccgggtccgtggttccagggataaccatgaaatgggaacggcagtgatccagctgaaggaggagaacgcaagacgccacagctcaaatcagttcaaagttatagtggagtacgagtga

SEQ ID NO: 42957 - DNA, 265 bp, Oryza sativa
  unsure (1)..(265): unsure at all n locations
  Clone ID: PAT_MRT4530_4615C.1
ggcggcctctgcaacggntgcaccctaaataccaaaaattacacctgctctatcgatctatccatccatttatccatgatgtgctgcacggtcatatttaaatctaatcattaaatcacctacaattcttgctacttccattacctatcatcgacaccacgtgtcagtttttctgcaccgcggatcctctctgtccgcatcgtaacctccatctattttaaaaatattgtataattcaacaacacatccctcatttttgcttcta

SEQ ID NO: 42958 - DNA, 630 bp, Oryza sativa
  Clone ID: PAT_MRT4530_46160C.1
atgccgtcgccgtcgtgttgcttgcagtgcaatccatgcggtgggatgctcgcgctcttcaagaggcgcccgcgggcgctgctccgccgcgccgtgggcaagatgaacagcagccggcgccggcgccgccgcgcggcgggcagcttcagctccgtccgcgcggtgttctggccactcatgtccatgcgctccgacgccgaccgcaacgacgtcgccgccgctgaccggccgccggcatcgtcgtccactgacgacgacagcggcggcggcggcctgcgcgcgccgtcgccgtcgctcgacacgcccgcgtcgacgacggccgctcgggtgctggcgctgcaggcccagctcggcgaggccgcggcggcgtcgacgaagccgagcagcggtggcgacgacggcgtggaggaggcgtgcagaagcttcgagaagcatctgatggagatgctggtggaggagaggaaggtgagggacctcatggacgtcgaggagctcctgtgctgctgggagaagctcaggtcgccggtgttcgtccagctcgtcggccgcttctacggcgagctctgcatggacctcttctccggccgcgacaccgacgtgtcatccgactccgaggatttgtctctctga

SEQ ID NO: 42959 - DNA, 2013 bp, Oryza sativa
  Clone ID: PAT_MRT4530_46161C.1
atgcgcgctctcctccgcctccgccgccggttgcctctgcccataaacacgagggccttctcgccgtcttcaccctcccctgcgccccatgagatccccaccgtctactccttcctccagccttccgtcttcgcgccgcggcccaaaccccagccgccgccgccgccgccgccacctacacctcccgcgcacaagacgctgcccgtcggcgatgccgtcgcgctcgaggacgagctgctcgccgccgtctccgaggaccgctcggacgacgcgtggctcgcgttcaggtccctggcgtcggcctccctctcgccctcgcctcccgccgccgcggcgctcgtctcccacctcgccgcagcgcaccaccaccgtctcggcctcaagcgtgccttcgcggccgccgtgttcctgctcgagaagagcccccacgcggaccccgtcccggaggccgccctgcaggccgtcttcacttcgctcgccgcagcggcctccgccgctccggccttggccctcgtgcgcgctctgctgcgctgcgggcgccgcctcccggctttccctgtctggggctccccgcttatagagctcacgcgcgctgacacgggcgccttcgtggccttcttgaaggtcttcgacgaagcctgcaagcaaatggtgtcggagaagtccccctctgcggcagcggcgatgcgtcctgaccttgctgcctgcaatgccgttcttggtggctgctgccgtctgctcggttcagtcacagaagctgagagggtattggagatcatgtcggctattgcagtgtcgccggatgtggatagcttcggatgtcttgcgttcttgtatgcttggagagatattccaagccgtgttgatgagctcgataaattgctggatgcgttaggattcggcaagaagatttttttcaagaatttgatcagtgggtatttgaagagctgcagctttgagtcagtttcatcagtcattcttcgtgtggtggaggagagaagagttgggggtagcaatgcatttgatttagaaagctatacagaggttgcacagcgttttgtagataatgggaggatcagggaattagctcagttgatcatcaaagcacaggaaactgagtcattgcagcagtcactggcagttgaggattctgttgggtttgggattgtcaatgcttgtgttgagcttggcctattgaacaaggctcatagtatactcgacgaaatgactgctcaaggagcctctgtggggctaggtgtatactcctcaatcctgaaagcgtattgcaaggagcaaaggactgcagaggctgcacagcttgtctcagagattagtgcagcagggctgcagcttgatgctggcagttatgatgctcttattgatgcttctatgacagcccatgatttcctatctgcattctctctcttcaaggagatgagagaggcgaggttaccagaccttaggacaagctatcttactataatgacaggcttaacagagaacaaccgtcctgagcttatggcatcattcttggacacagtcgtcgatgatccgaggatagaaattgcaacacatgattggaactcaataatacatgccttttgcaaggttgggaggttggaggatgctcgaaggacataccgaaggatggtattcctgaggtatgaaccaaataatcagacctacctttcgctaatcaatgggtatgtctcagcggagaagtactttagtgtgcttatactatggactgaagtgaggaggaagggggctgatttcaaccatgagttaattgatgcatttctgtatgctttagtcaaaggtggattttttgatatggcaatgcaagtgattgagaaagcacaagagttgaaaatatttttggataagtggagacacaaacaagcattcatggagacccacaaaaaactgaaagtggcaaagctgagaaagcggaatttcaggaaaatggaagctctgattgcatttaagaattgggctggtctcaatgcatga

SEQ ID NO: 42960 - DNA, 218 bp, Oryza sativa
  unsure (1)..(218): unsure at all n locations
  Clone ID: PAT_MRT4530_46162C.1
caagatcaacaagcagaagaagaagaagaagcttgcattgagctaccaattaattcacagtcatcatggctcccagctttggccgctccatctccttcccgctcagtccgacgacgccaggtccgcctccgccctcaggtcccagcggagggccganaaggaaatcgnccgcctcgnctccaccgtntncgccgccgtcgncgncaccaagtactcct

SEQ ID NO: 42961 - DNA, 702 bp, Oryza sativa
  Clone ID: PAT_MRT4530_46163C.1
atagggagtgggcccggcttgtcagtggctcggctgctctctttctctctctcgttcttttcccatcgtcttctacctccagccatcgggaggcagcaccagggcacggctgggcgcgacgggcacgggccggggcggcacggcggcggccaggggatgtgcggaggagctcaggcggccctccaccggcggcggcggcgcaaggcggagtaggggcgagcgttgcggcacggcaacgtcatgaccgagcttggctgggagaaccccccggatggcatgtccacggtgacctccacgggcggagcttcgtagctcgggcttgtcacaattatggccctaatcgatgaaatagttgggggaggtagttcctagaggaataggaggagtaacaggagtgaggacttaccgagggacggcggaatgacgaagttccgcggcggtggtggagccgggaagaagctgcggcacgcccacaaggtgttcgacgaaatgtgtagtagggagaagaaaaggcagagaggggcggacgagctcgtgggggctaggaggacggcgacggcgcgcggcgggatggagacggcgcggcgacggcgacatgacgcggcagggcgacggcggtgacaagacggcgcgcggcggcgcggggcgcaaggcagcggcgcagcagagggcggcagcggcgcggcgcgcgcaggggcggcg

SEQ ID NO: 42962 - DNA, 645 bp, Oryza sativa
  Clone ID: PAT_MRT4530_46164C.1
cccgggcaaatgggaaaaaaactttaccccggcccccggggggaaacagaaaaattaaaaaggggggggcgcaaaaaaggcccggggagtatcaaacccgggcaatggcccgggttttgggggaaaaaaagggggggaaataccttaaggccaaccctataggacccgggttccgggggccttaagcagcagcgggggttttaacaaaaccctgggggggggggattcccccgaaggtgaaaaaattcttccccctgggggggccaccccccgggacccgggggccccccagttggcaaacgggcgggagcttattgctccaaagggcgaacggggggggggggggttttgccccccggaacatcccgcccttcccaaaaaggcccctgggggggcaaagtcccgaaaaataaaggcggtttcgcccccccccttcttttaaagacggggaattggggggcccaaggggccccggggggggggtcccgggggggccgggggggccccacaatttccccggggggtcccggtccggcccgggccttggtcttttggggggggggccccggggttggggggaaaaaagggcgcgcggacccctggggcttgggcggcaaaccccgggggggcccccccggggagggg

SEQ ID NO: 42963 - DNA, 2765 bp, Oryza sativa
  Clone ID: PAT_MRT4530_46165C.1
atggaggcgagggcgtcgctgtcttcgtcgccacagtggcatatgtcattgggtaatggcggcggatgaggcggaggcggaggcgaccccagcgcggcggtgacattcaagtacaaggggtggagagaagtgcagatctcggcgttcgaggacctgcagcatctgaacgggtagcatcatgggaagcgcaggctcgccgaccgggagctggtgcacctcctagtgccggcgaccaccccggtggcggtgcacggaccgaacgttgcggctggggcgcctatcgcggtgaaagacatcgtgcactagcggacccagccaaacttctatgagctgcggcgccagtacgcagcgtctggggactggcagcacggtctcggcaggagggtgcacggggtctggctggcgtctccgccgcccaggggcaccaccatcgcccacgtggacctcgcgcagcaatcatcttcaaaggacgcatacttcctgggcaaaatggtatgggccagaggttaccgggaactgttagatttgttggataaacgtaaaagcgacttgcaaggattcaagttggatgtatatggaagtggcgaggactcacaagaagtccaatctaccgccaagaaactgaacctgaatctaaacttttttgacggcaaggaaccctgcagataactcactccatgagtacaaggtattcacatggagcctcttggatccaagcaatctggtgtcaaggaatcctctgccttcaaaggcaccatgcctttgtcactgataggtgggcccatggaagttcctcctcttgatctgactgaaattatggcaaatctagttaggcaatctgggccctttttggatcaacttggtctaaggagaggtgatggccctcttatatgctattggtactatggtgcagaactacgtgacaaactagtggagacattgtatagcagacacaatcattcaggttcagcacaatcactgttacagaaggcgtgcacagaagcaagacgagaagaactaattcagagtaatctgtcggacgccatggatggaggattggcgtttgctcaccactgcctaactggtagcgaggttctcaggctggcaacgggagcgattcctggtacgcgcgactacgacaagcaacacatgcgtggacatgggcctcctgccgcctcaagtgcagcaccctgtatatggttggtgaagtaaaccaaacctgcatctgcatgcactaagttactggatagtttgtaggtacatatgtactgtacatgacaagtcatgtagatctttgtaaagtctcgtactgtaacatgggtaactagtctaagctattgtcgtcattgtattgtactgcttgtagtaatattgtttctttgtcagtaaaattagaactacaagtatagaggatacatcacaattaatttcatcgagaaaagcaaatatacctatattcggagaaccagagcatctgaactggtatcatcatgggaatcgttggactgacaagttcaatcatgtagttggcgtagttcatacgaattacctagaatatatcaagagagagaagaatggtgctcttcaagctttcctggtcaaacacatcaacaattgggtgaccagagcatactgcgataaggtgctgtatctagctcaacttgttctggttttacgtctgtctgcagcaactcaggatcttcctaagtctattatttgcaacgtccatggtgtaaatccaaagttccttaagattggagataaaataatggccgatagggagaatgggcagcaatcattttccaagggagcatattttctgggcaaaatggtatgggccaaaggttaccgggaactgttagatttgttggataaacgtaaaagcgacttgcaaggattcaagttggatgtatatggaagtggcgaggactcacaagaagtccaatctaccgccaagaaactgaacctgaatctaaacttttttaagggaagggaccatgcagatgactcactccatgggtacaaggtattcatcaacccgagcatcagtgatgtcctgtgcacagcaacagcggaagctctcgcgatggggaagttcgtcatctgcgcggagcatccatcgaacgagttcttcatgtcgttcccgaactgcctgacgtacaggaccccggaggagttcgtcgccagggtgaacgaggccatggccagggaaccccagcctctcaccccggagcaaaggtacaacctgtcgtgggaggcagcaaccgagaggttcatggagtactcagacctcgacaaggttctcagccaacctgttacagaaggcgtgcacagaagcaagacgagaagaacaattcagagtaatctgtcggacgccatggatggaggattggcgtttgctcaccactgcctaactggtagcgaggttctcaggctggcaacgggagcgattcctgttaacttggagcttcaagtatatatggtttgttctaagtccagggctggttctatgattttgagggccctaggtgaactcattgtgatgggacctctaagctatacataactaagttactggatagtttgtacatgacaagtcatgtagatctttgtaaagtctcgtactgtaacatgggtaactagtctaagctattgtcgtcattgtattgtactgcttgtagtaatattgttttctcctcagtaaaattggagcttcaagtaaaaaaaaaaaaaaaaaaaaaaaaaaaaaaaaaaggggctcgtgc

SEQ ID NO: 42964 - DNA, 857 bp, Oryza sativa
  Clone ID: PAT_MRT4530_46166C.1
ccggccgggaccaaccaatcgcaaattcaccatcccatccaatcttgacgacgatgccgccgagatcgccgcttctcgccctcgtcttcctcgccgccggcgtcctatcctcggccacctctccgcctccgccgccgtgcagccgctcgtgcgccgccctcaactgcgactccgtagggatccggtatggcaagtactgcggcgttggctggagcggctgcgatggagaggagccctgcgatgacctcgacgcctgctgccgcgaccacgaccactgcgtcgacaagaaaggtctgatgagtgtgaaatgccatgagaaattcaaaaactgcatgaggaaggtaaaaaaggctggcaagattggcttctctaggaaatgcccgtacgagatggctatggcaacaatgacctcagggatggacatggccatcatgctcagtcagttgggcacccagaagttggaactgtagctttaatttggcttctccttacggaggtactccatttcttagatgatggttaaccgtatttgattgcaccaaagtttgattttttttttacaggaatgtattgatttgggcagcctaaaaagatttcttttccccttgctgcacaatttgcagcatatagtattttttttgtacaagagatttggcatgtaaactgaaccaaatgttccggctcactgggtatgggtaaaaagggttttcctttcctttatgctgtaacattatccatttactttgctttgatacgttggatcagtaggggtctggatctctttaacataataatgtaacactcctgagtctctgagcatgttatgggcaaaaaaaaaaaaaaaaaaaaaaaaaaaa

SEQ ID NO: 42965 - DNA, 1317 bp, Oryza sativa
  Clone ID: PAT_MRT4530_46167C.1
atggaggtcggctcgctgcagcacctcggcgacagcttctcctaccggtggctcaagcacgcggcgcaggcgccgtcgttcaagcgcctcgtcgacgacgatgtcggcggaagctccaggtacttcatcgacatggaccccgccgacctcttctccatgcggtggacggctccgggcaccgacttcgacttcgacttcgacctgcccggcggcgacgacgatgccgcctctccgatcccgctgctggtcagcgcgagccagatcttccacgatggccgtctacttccccacgagctcgacgacgacggccgcttcggtgcccaagaagacggcgatgccgctcgcgtcgcgcacttgctgagcgagccccggctctcggcctcgtcgccgctgttccactcagcgcagagcacgccggcctcgctgagctcgtcgtccagcgcgaggagcggcgccagcaagaacgccagcgcgccgccgctgctcgccgcggggaggcgtggcggcgggtcatcgccgtggaagatactgctcaggtacctgcggttcctcatgccgctctaccggaaggtcagggcgctgccgccgctgcgtgctccgaggacgagggtctcgccggcgagccccgcgagcgcgagagcaagggcgtccacgtccagcatcgactggtgccacggcattgccgacacggccgtccatgacgccatcctctactgcaagaaatccagtacggtggacgtttggaagcccacgaacagcggcagctcatcagccgatcaacgcgaggaagctcaaagcttgacgtacgacggcgtcatcgtactgccacacttggttaacggatgggatactttaagtgactttttcctgatacctgatacccgagtaccggctggtacctggtaccctggtatcgagctggtacctagatatcagaccttggtacctggagagacgtcgccgcagcacgtggcggcacggcacctggaccacaccttcgagaagctcgcgtcggcgcacctcccgctcatggcggcgtcgcccaccgagccactcacgctcccctgcctcgcccaccgcctcccgctcaggctccaccgacgaggcgcactccacttccttcgcctcttccctcgcgtgtttgacctccgcgccctgctcccgctctccctctcgctcaccgcgcccaccgctgagctcctcgctgtcgccaccttcgccgcctaccctacggcagcggcggcggcggcggcggccggctccggtgagcggtggggcaacgacgaaggggagggctgcacctcgggtgccatctga

SEQ ID NO: 42966 - DNA, 494 bp, Oryza sativa
  Clone ID: PAT_MRT4530_46168C.1
atgtaaacttatgtactagattacattgtttaagctatcttacatattattttaacttattgttgtcataataaactcctgcagcaacgcgcggggtttcacatagttgcatatataggtacagggttttcatcttgcagatggatcaaatgtagatgatgtagccaccgcatcacccgttgggtttgcctggagccccctatcctcgcgagctacctccaatgccagactctccttcatctgaacaaccaccgtagtcattgatggcctttgagcaggaagaggtttcgtgcatagcagagcgatttccaccaccttccacatggagctgacattgtagccaccattgagccgctcatcggcaatggagcttatatctcctgaggcaactttctctttgacatgttgaataatgtgaccattgccttgtaagattggaccctgaccggtggctacctccagaagaacaacaccaaagctataaacatcactac

SEQ ID NO: 42967 - DNA, 279 bp, Oryza sativa
  Clone ID: PAT_MRT4530_46169C.1
atggcgacgtgcgaggaggatggtggtgacgtctacaagcggcgacgtctgcgggggccgacgtggggagttcgtgcgccgccgtcgctccagtcgtcgtcgtcgctcggggaggtcaccgtcgtggtcgccgtctcgtcgccgttctcgtccgccccttcgccgtcgctgtcgaccgccggagcactgtcgccgtcgtcaagccgaaggttgccgccgctttttcctcgtcgccgacgtcgtccggtcatcgtccgccgtcgctttggtcaccggtga

SEQ ID NO: 42968 - DNA, 318 bp, Oryza sativa
  Clone ID: PAT_MRT4530_4616C.1
gggttcaatcggggacaatatcctggtgccaggatcgctgctgggaacacttttgttccaccacagcttactccacagagcaacgttgtgactaacgatatgactcggtttgttggggctatactcaaagattaacgctaatatttttgctagcctttaattgtaaaccatcaactaatctacggacccctatggacagaacgacctgcttggacaatttgttatatgataattgttatctataatcctatacagattgatagagaatgctattttttttgacattatttagcgcctaagcaattgatgttccaatta

SEQ ID NO: 42969 - DNA, 894 bp, Oryza sativa
  Clone ID: PAT_MRT4530_46170C.1
cacgaggcctcccccttttttttttttttttttttttttttttttaactgaaaagttggcactcttggtttcaaaaagatatacaattgcctatggatgaatccttttcctgtaatggttcgttcattcattattcagtttggtaatttacaaagctggccagtataacataccccgtacaacaatttttcatgctaatgcagttaataatactcgccgccaagaaactttcgccgcttgtcatttaccgtgatcagctcacttaaaaccggagcttcaactgctctcaaagagtgaagtaaaccggcggcggatgaaccacctccgtcttcgacatcgacacattcccggtgagcacgctctcggacatggcctcgtcggcctcaaaaggctgcacctgcgcgatcctttcagggatcgcctggccaccctccacacgagcaagaacctcgtagtgcgccctcaacttcttgggcttcgtcttccactccgggaagttggaccagttcacctctccgtcagcaatcctcttctccaccgcaaaccccatcttgacgtacgtttgggcagaagctcgcgccttcaacagcttgaacgtccccttctcacctgccttctttccaagaaccgaggccagcaactcctcaaacccctgcaggctgccatctgacccattcagtgacagaaggggccacaatccagctgcgtgtgatccatcaccatcatcgtctgtaacagcagggattgcacgcgaggagagctccacttggcctggggccaaccgtttgagcttgagcctgtcattgggagacatggaaggagtcgaggacaacgacgtcggaccttcgatgcggagggagagcagcggctcccacgcgtccgcccacgcgtccg

SEQ ID NO: 42970 - DNA, 145 bp, Oryza sativa
  Clone ID: PAT_MRT4530_46171C.1
ccggccgggatcttcctcagcaagatctggatacaccatctcggtctctccgctaagcacaacggatctggatatatctcacccgtggaccatacacacagaaagactcctcgccctggcttgcctatatatcgttctttgctgc

SEQ ID NO: 42971 - DNA, 910 bp, Oryza sativa
  Clone ID: PAT_MRT4530_46172C.1
tttttttttttttttttgtttttttttttttttaagagaataatttttttagtttttgtatttcaaccttatttttgatttatttatacttgggaagcgcatatattgggcagcagcaagcccaatcaagaagcattacatataatcacgaaaacaagcttgtgtatataccaatgttacacaatcatcatatatgagtgcacaagtcccacggtagaattgctccattgccgagtataggactagtagtgcccaccacctcctccggatccatacccgtagccagagccagaaccatagccagatcctccgccttggccgccgccgcctccaccaccaccaccgcttccatatcctccaccataagcaccgccaccttgaccatatccgctgccagatccatagcctgagccgctaccatacccaccaccttgaccgccgccgccaccaccaccatgtccacctccaccaccactagcaccacctgcacctgatccatatccagagccataacccttacctgagaaccttgtcgagaaccatacccgaagccagaaccaccaccttcaccaccgccgccgcctccaccaccaccatggccatacccaccagcgccagcaccacctccctcgccataccccgacccagagccgtaccctgatccaccataaccacctcctccgccgctaccacctcctcctccaccaccgccaccttctcctccaatgccataacccaagagagttctagcactagtggtcattcctatgctaaggaggacaaggattattagcaacacaaaatgcttgtcctccatgccataacccaagagagttctagcactagtggtcattcctatgctaaggaggacaaggattattagcaacacaaaatgcttggtggtagccat

SEQ ID NO: 42972 - DNA, 342 bp, Oryza sativa
  Clone ID: PAT_MRT4530_46173C.1
ttcttgctgttcggtccaacatggcgttgtctgagagatgcttttcacagggataagatccctgtttgtagatctgatcttttagattttattcgtttgaagggtggaaagaattctgtgtggttaactatttttactgcttgcttttggagtttgtggattgtgaggaataattggatttttaataataaactgctttcaaatgtaattaactcgcctcatcaagtgatttctttgttaacacagtggagtggattggcacctgtgaaatgaaggggagagttggatgtgttaaggggatctctgcttgtcagtatacaagagatagaaggggctccaact

SEQ ID NO: 42973 - DNA, 213 bp, Oryza sativa
  Clone ID: PAT_MRT4530_46174C.1
attcgaataataccactataactttcgagttgtaattccactagtgataaatcatccccaaataagtccacaaattctcattacatccgcttttaattaaacatgatcctaaaagccaccaaaaacaaaagatagattgaaactaataaagctctactggaataacttcataatggttcaacttattatcattaaaactttactccatttttt

SEQ ID NO: 42974 - DNA, 229 bp, Oryza sativa
  Clone ID: PAT_MRT4530_46175C.1
cgaaaccaacccggaacgctggcggtgaatctgactttctctctgtgatctaggagcttacgccgccatagctgctgccagaggcgtcgtccacaaccttaaccataaggctatgaatagcgagtatgcaatgcgtcgagagattgcgatccatgctaatagcctgcagaacaagctcagacttactaggagatattcattgtgatgagatcctatactgaacattggg

SEQ ID NO: 42975 - DNA, 766 bp, Oryza sativa
  Clone ID: PAT_MRT4530_46176C.1
gaagaagaaaccctccccctccctctccccaatccaatccaatccaatccggcgagtcgcgtgagtttccgctcccctcttccgtcgattcggcatcgggttcgccgatcaggggggcttccttgtccgatttggtggttgattcgtgttttttgctcgtgttctccaggaccagctcagtctctcgaaggagcgccatggccaagagctcgttcaagctggaccacacgctcgagaggaggcaggctgaggctaaccgtatcagagaaaagtacagtgacagaattcctgtgattgttgagaaagctgaaagaagtgatattcctgacatcgacaagaaaaagtacctggtccctgctgatcttaccgttgggcagtttgtctatgttgttcggaagcggatcaagctcagtcctgagaaagcaatcttcatctttgtgaagaatactcttccaccaacagctgctctgatgtccgcaatttacgaggagaacaaggatgaggatgggttcctctacatgacctacagtggcgagaacacctttgggctgctctaggcgcggcagcaatatcgctctcaactcctgtaaataagacttgccaaacaagtgtatattctttgcttacctcgtggcaaatctttaaactctaatagtagtaatgccaagatcctctcagttgttctgaacatatatacgctgcttgataatactcccaagtaattgtggctctggtgaatgtgttctcttgtggtctcttaactttt

SEQ ID NO: 42976 - DNA, 2344 bp, Oryza sativa
  Clone ID: PAT_MRT4530_46177C.1
ttttttttttttttttttttaaccattccacatttcaatctttgaatcgctttagcaaattaactgggtagtttgcttttagttttatgaatgaatacactacaaacagctaattacattgaccaacctaatgaggtttttgactgagcagctaaatcatcacagcaaataggcagtacgcagagcgtcacaaaagtaaacccaacgctaagctattaccatatagatacaactgcctttcaaaatattctggacaaccaacgagtaccttgtcgacaacctaccacctacatgctctgaaaatgctgctgatcgccgatatcatcatattccgcaaaagttgcgtgagccccatctccaacagatgcatcatcctctgtgacggcaaacccaggtccaatcacatcgacgctacaagatgagcttagcctgtcgcctggatggacaccaagatgtttcctcacattcatttcaggcacgtcagtaaggactgcagggagaatgttcaccagctggggattacttgcagatggtgttgaggctataagcctcattagtgtttccctagcgcttctctcaaccaaagattctgtttctggaatcaggggcttcaagctagggagcagggtaacagtcgcagacatagaaggcccgcaactcaccaggtaagcctggccagaggaacacacatcaatgaccgggacatgcacaatggggtcagacatcaatggtgtgaatgttggaacttgtgaaccatgcaaggatacaagtggtgaagtaggaagcggcaggtgaagtaaaggatcacgcagtatcgatggaagattaagtgacgggagatcagttgtatccatctttgcagaaactgttgaagtcggcggctgatcatttgatagcagagaactcaaaggcggcaagggcagtggttctacagatgtaactggcatatgcagaggggttacactgtactgcagagaagatgggcatggtgggcaccagcaatagtaaggcttaaatggttgctctgtagaatccttaggaagtggatattgagtcgcaagaggaaacagagatggcaacaagggaaatgaaagaggcaagtctagaggaggtgaattagcactgttttcagaacagtccccaccacacttctcactggcagaatcagagctaacaatcttcggtgtcaaaagatttgcgtcatcaggaccagttgatgagctcagccagtccccacgtcgcttcagcttgtctcttccagcaatctttgcacacgacatccttggcactccatctttaaaagcacgtcatctgggactcagactagtttggtagacagaacttgcttttgctgcattagctgcagaggtgcagaagcgtgaagacttggaaacaactgatgagggctgtaaatattgatcttgtgggcttgaagcgcccaggaagtcattaagtgatcccagcgatttaacatctccaatacttgatgcgacaagataagcgtgtagatgagtggcaaaagcatccagtcgtgaatctgagatgcctgtgagatcagagagtgttggccttccctgcagtagatttttcatctttgcaagaaggtccatcccgtgtttctttgacttctcagcacaccaatagtaaaaaactttagattctgaaatcctgatgaggaaagatcgtcctgtattatcagctgaaatttcttcaacacaaacttctgaaacttcatggtcattgttcaggagagctagttgctccgaatgaccatcatcaccagcaaagataatgcacatgctcgatgaaggaagaagaccaaggctcagctttcctctgatgggcgttgggcagaggagaggaccatggcggtcgaccttgccgacgcgaagagcgacgaggggaacgcagagacacctgtagagcaagccgacctcggacgcctcgaagtgctgcgagaggtgggagatgaagcggtcctcggcggcgccgcatgagaggttgagagtgaggaggggcctgaggcgttcgtcggcgcggcaggcgccgagcagctggtggcgcagaggcaccggctgctgctgctgctgcgtcgtagaggcctcaccgccgccttgctcacccgatcgggacacctccgcctcctcgtcgcgggcttcggattccctggtcggcggcgcgcccatcgcagtctactggagtacgtgctagctagggtttgggatcggggtcggggatggattggattgagagagattctgctctctggagaaattggatttggagaagaagaagaaagagaggagaggaggggaaccacaaccagatcgaccggacgcgtggg

SEQ ID NO: 42977 - DNA, 1517 bp, Oryza sativa
  Clone ID: PAT_MRT4530_46178C.1
ctttgttcgtacgcctctccaactcgaatcatcccatctgtcggtgatttccgtccaatctttgatcggattccgggggccctcatcatcgtcgagctcttcggtcgttcgatcgggcgcgcgaaattcttccggcgctgattttgacggctccggccgccggcggcggttggttggttggttcttggcccggattttcggggagatttgagggggcaggtttctcctcgccccgcggtggctgtgtgggttcttggattcgttgtttggtgactgtttaagcggggatggagcggcggagatggctgcaggccgcggttctgtgttgcctgctggtgctttgctccgggagagaacttaagactaaacacaccccaatatacaactcgaccttagccaggacgcttgcggaatatacatcagcagtttatacagctgacttgacacaactcttttcgtggacctgtgaaaggtgttgtgacttaacagaggggtttgaggtaatagaactgatcgtcgatgtgaaaaattgcttgcaggcatatgttggttatgctagtgatatgaatgctgtcgtagttgtgttcagaggcactcaagagaccagcattcagaattggatagaggacttgttttggaaacaacttgatctggactacccaggcatgcctcaagcaaaggtccacagtgggttttattctgcataccataacacgacattgcgcgatggtgttgtcaatggcattaagaaaactagggaagcatatggtaatattcccatcatggtaactgggcattcgatgggaggagctatggcttcgttttgtgcgcttgaccttgtggtcaactacaggttaaaggatgtgacactgataacatttggacaacctcggattggaaatgctgtgtttgcttcacattttaagtgtcatttgccaaatgcgattcgagtgactaatgcgcacgatattgttcctcatttacccccatactaccactacttcccacagaaaacctatcatcatttcccacgagaggtatgggttcataatgttggacttggaagcctagtctattcaatagagcaaatttgtgatgactctggagaagacccaacttgcagcaggtctgtgagtggaaacagtgtgcaagaccatataaactaccttggcatcagcatgcatgccgaggcatcgggatcttgcagaattgtcacaggtgacaataaactgcagtataagatggacagcgatggcaacattgttttctcgaagcaacctggtttatcagttgatcagttgcatagttcacagtgagcaaactcatgatgacaggaatcttccatgccctctatgtaactgtatgatcacaccacaggaggatattggaagaacaaatttgtgtatagttctttgtacagcatgtaaagcattatagatactgtacgaacgtgctcttggctggactaatttatcatgagaatgtcatgcaaaagcttttccaagcagaaccatgcc

SEQ ID NO: 42978 - DNA, 667 bp, Oryza sativa
  Clone ID: PAT_MRT4530_46179C.1
ccacgcgtccggggaggagtcgatctggttgtggttcccctcctctcctctctttcttcttcttctccaaatccaatttctccagagagcagaatctctctcaatccaatccatccccgaccccgatcccaaaccctagctagcacgtactccagtagactgcgatgggcgcgccgccgaccagggaatccgaagcccgcgacgaggaggcggaggtgtcccgatcgggtgagcaaggcggcggtgaggcctctacgacgcagcagcagcagcagccggtgcctctgcgccaccagctgctcggcgcctgccgcgccgacgaacgcctcaggcccctcctcactctcaacctctcatgcggcgccgccgaggaccgcttcatctcccacctctcgcagcacttcgaggcgtccgaggtcggcttgctctacaggtgtctctgcgttcccctcgtcgctcttcgcgtcggcaaggtcgaccgccatggtcctctcctctgcccaacgcccatcaggtaatttgggcgtgtgtcataatctctgatatatgaggaaagagaagaggaaagctgagccttggtcttcttccttcatcgagcatgtgcattatctttgctggggatgatggtcattcggagcaactagctttcctgaacatgaccatgaag

SEQ ID NO: 42979 - DNA, 426 bp, Oryza sativa
  Clone ID: PAT_MRT4530_4617C.1
cagctcgaatacctcaaagacacgtacgagggcattcctgtttatgttcaagaaaatggcaagttctcaaactcaatatctatccatgtacagcccaatggtttcgggcagttcgataaggaggattcactgaatgacaccgaaagagtggagtacttgagtagctacatgggcggcacattagctgcactaaggaatggagccaatgtgaagggttactttgtgtggtcattcctggatgtgttcgagctgttcgcaggatatcattcgccattcggcctgcaccatgtcgattttgaggaccccagtttgccaaggcagccaaagctctctgctcagtggtactccaaaaaattcagaagcaaagattacctcgacatgagacggctcctcgccgtgctgcttggacttgccagagaagacgtt

SEQ ID NO: 42980 - DNA, 771 bp, Oryza sativa
  Clone ID: PAT_MRT4530_46180C.1
tcatctgccctcttccctctctccagctcgagctctcttccctggaggcatcgccgcctctcccctccctggtggcggtggatggaggcgcaggaggtggggatcgatgcggcggcgacggatcgaggcaacggtggcgtggaacgacgcgggggcacgcctcgccgccatacccctgtctcctcggcggcgcgtggatcggggtggaggggatggagatcgaggcggcgtgggtggaggatcgaggcggcggtggcagatcgaggcggaggtggcggcggcggatttgccggtcgggatggtggaatagccggcatcggcgcagaatgaggcgtcggtggctcttcttctcccccactgactagcctcgagctcgccggatccgcacggcagcgacgaccttgaccttgaccatggtggcaatgcgcgcgggagctcgagttggtggcaagctagagcaatggcatggggcaacacaactacccaacgcgcatcctcatcgattcctccggacgccagagcggtgtctccgacaaggtgcgcggacctcctgcagcattcacacaccctgtaggaatgcggctccttccgacgtggcgcgattattcccctcggaaagggtcagcccaccctcctgcctggtgcctcggccttgtgaagaagttgagtgaggacacttaccaaaatttgactgcaaaagcaatacttgaggaactccacgaacaaaatataaccatatatgcagaaataatataccgtgtatcctattaa

SEQ ID NO: 42981 - DNA, 220 bp, Oryza sativa
  Clone ID: PAT_MRT4530_46181C.1
ccatgtttcatccgaaaggacttttttctatttctctattccactccatctagatctaagaaagaactcaatgcatgaaattctatctatataaaaaaagaggaatagatacaaggtctcaaaccttttatagaatttttccttcaaagaaaagcaatatcatatagatcacgaataaaccggattcattacaactcaatttacagatcaaaaaaaaaaa

SEQ ID NO: 42982 - DNA, 768 bp, Oryza sativa
  unsure (1)..(768): unsure at all n locations
  Clone ID: PAT_MRT4530_46182C.1
gccgccactacatctcgacgcgggacgccacgccncccgacacgcccttaacgacactaactacggggacgacacgacgccctccgggtgcccttccacctccctagactcactncaaacccaccanngacccctacccctacgcggctttctnnacacattgacgttcgggaccanaccgaccgggcctccgacgntgacttgtaactaacatgaacactacgtactaccggttgtacttcacaaaaaaaaaaataaaaaatggccacccacgttacttgttgaaaccttttggttgggcgggttactggtttctaaagttttactgaacgcacctaaataaaaatggctacacaactgtttttattacaaaaacaaacaaaaaaaaaaaaaacggttccgcgggccgcccacccgggggggaccctcccgctttttgtttccctttagttgagggttaacttgcgccccttgggcgtaattcatgggttctagactgttttcctgtgttgaaaattgttatttcgctccacaaattccacaacaacaataccgacaccggaaacccatataacgtgttaacacgcccggggggtgtcctaaaatgaagatgtagacctaaacctctacactttacaatttggcgttttggcgcctccaacctgtggccggcttttcccacgttgtggggaacaacccctgntttgttgtccacgacctggcgatatacaatgtacatttgggnccacacagccgccgccgggaggg

SEQ ID NO: 42983 - DNA, 503 bp, Oryza sativa
  Clone ID: PAT_MRT4530_46183C.1
gacaaaagggggaccacgaagatttcttcagtcttaaaaagtttcagtagacgactatattctgtgaatctctgatccttcacaggagtgctactagatgcttagaccagtacaaagaggactttgctcgtgctgctcttcactaaacatttcgtagatgattacatggtctcatgatctcatctatatgctagttttcgaatggacttcattaaaacgattacgattacatgctagttttgtgaagcattcaggtcgcttcaagaataatagcactattgatagaggtaagcaattctgaaagtctgcctgtctgttagactactgaactaggtcacgtcatccttctttcgcacctgatttcaatgccaccagcaaccacgtcctaagctatgcatgtcttgtactttttggtaccatatcctatgattgctctttgctaagtgagacaccctcaaaattattggtgttcaacatggatgattctttcctgaggagttcat

SEQ ID NO: 42984 - DNA, 381 bp, Oryza sativa
  Clone ID: PAT_MRT4530_46184C.1
atggcggcggcggcgacgacggtgacgaagcttgtgctggtggtggtgctgctgctgcatgtctccggcgtgctggcggcggcggcgaggacgctgcctggggaggagtggctgatgccggaggccggcgtcgtcgtacggacggtggtggagatgctgcaattaacggcgatggcggcgccggcggcgacgacggcgatgacgaagcttgtgctggtggtggtggtgctgctgcatgtctccggcgtgctggcggcggcggcgaggacgctgcccggggaggagtggctgctgccggaggccggcggcgtcgtacggacggtggtggagatgctcgtcggctccaagtccggcggaaatggcagcggcacctgctgctag

SEQ ID NO: 42985 - DNA, 115 bp, Oryza sativa
  Clone ID: PAT_MRT4530_46185C.1
aaccgccccccctcccatgaagtttggtgcgacgcccaccacacccgcggggtgaagaaaaccggggacaggagagtgcgccccccggatgatatttgttgttttccgacggtgg

SEQ ID NO: 42986 - DNA, 468 bp, Oryza sativa
  Clone ID: PAT_MRT4530_46186C.1
atgccgcaggacccgcacacgcaagcctcgtccgtagacatagtcgtgcccgagctctaccagcccgctcgccaccgcgagcctccctgccactggatccgccgccgtctgagcttcattgcccgcccacacgcgcagccatgctccaccggcccacccacgagcctctccgccgctggatccgccacccaagtacctccctactgctggatcggatgcccgcatgcctcccaccgccggatccatagccgcgtgccttcctgctcccggatccgccgcctgcgcacctcccaccgccggatccaccgcctggatgcctcctcactgccacatccattgcccacgtcccgccccactgtcggatccgccgtgaacaaacctctcgtttccatcattgtcgtcgtcatcaccacggctgccatcaccatctccgagagcaccgaggagaagctgaagaaaggagggtaa

SEQ ID NO: 42987 - DNA, 390 bp, Oryza sativa
  Clone ID: PAT_MRT4530_46187C.1
agccattaagccagagagtggagtcttcgatcttttgctgtaaactacacaaagtgcaggggctatgtaaatgaagatatcatcagatctaatggctgcggagcagttccctcgtacgcttctcaatcgagcgatagggggggatagctggctctatacttatcaccaccacaaagcagttggccagactatctaacaattagctgaatatgctacattcacctgccaagtcaaccttttcaaagactcggggaacgagagcatctactagaggcttatgaggagcatttcatgctacctaagggtaaaatgcttttcattactcacagaagagtactactgcttgaagggccactgatgacccatagaaagttcagtcctgcaaaggat

SEQ ID NO: 42988 - DNA, 1611 bp, Oryza sativa
  Clone ID: PAT_MRT4530_46188C.1
cggacgcgtgggcggacgcgtgggcggacgcgtgggctcgatctcgtcttctctctctcgcaggactcgatcgcgatggcggcggaggtggcgaaggcggcggtggtgccggagtcggtgctgaagaagcggaagcgggaggagcagtgggcggcggacaggaaggagaaggcgctcgccgagaagaagaaggccgtcgagagccgcaagctcatcttcgcccgcgccaagcagtacgcccaggagtacgacgcgcaggagaaggagcttgtgcagctcaagcgtgaggccccgatgcccactcccctctacctcctccctcacgcagctcgtcgagatggcgtccgaggcggccaaggtggtggtgccggagtccgtgctccgcaggaggaagcgggaggaggtgtgggcggccgcgagcaaggagaaggccgtcgccgagaagaagaagtccatcgagagccgcaagctcatcttctcccgcgccaagcagtacgccgaggagtacgaggcccaggagaaggagctggtgcaacttaagcgtgaggctcggatgaagggtggtttctatgtcagccctgaggaaaagttgctgtttgtggtccgtatccgtggtatcaatgccatgcacccgaagaccaggaagattttgcagctcttgcgtttgaggcagatctttaatggagtgttcttgaaggtcaacaaagccaccattaacatgctgcgcagggttgagccatatgttgcatatgggtacccaaatttgaagagtgtccgtgaattgatctacaagaggggctatggaaagctcaacaagcaaagaatccctcttacaaacaacaaagtcatcgaggagtcttggtgtttgtatcagggtttgggtaagcatgacatcatctgcattgaggatcttgttcatgagatcatgactgttggcccacatttcaaggaggccaacaacttcctctggccattcaagctgaaggcaccactgggtgggctgaagaagaagaggaaccactacgttgagggtggtgatgctggtaaccgtgagaactacatcaacgaactcatcagaaggatgaactaggtgcaccagctcgtccaatgatccagtccatgtagcaacagaaaaattgttgcaacttctaagtatccatgataggcataaaaccttaaagcttcagcttccctttatgacgcctgtgaagcttctgcttcttctaggcgcagcttctggtaatcattagcatgcattatgtcctcatgattgattgcactatgaatgccttgagcacaaaaaggacttcaaaatgttggatacttcgtccatgcttggatgagctcagctcagtctcagaggttgtcggagcagccaaagcagcgcatagccgatcttattgctttatttggaatcccggtattgacatcttcagacaattggctgaaaatatttgattgatgtttcacttcaatcattatttccattgtcttgcagcgtgaacaaatcattcacatctctggcttaaaaaaaatcacctctgctaagagtatttcagtacttcgtttcacaggaaattctttgcatacctgctgatgataggctctcct

SEQ ID NO: 42989 - DNA, 315 bp, Oryza sativa
  Clone ID: PAT_MRT4530_46189C.1
atggctagatctgtaggcgacggtgctcacgggcaggaccggaatcgacggtggcgtcggcgctcgtgggcgtggctggattcggcggtgtcggcgctcacaggcatggccggatccatcggcggcggaggcgttggcgccaacgtcaatgctcgtgacggagaaagcggcggcggaggcgactctcgcaagcggatctccggcgatggcaactccatccgggtgtttcgagctttcttcccctttccatggcaaggcttccattcttcttcccttctctcccatggcgcaccgaaagttaccggttcactttaa

SEQ ID NO: 42990 - DNA, 384 bp, Oryza sativa
  Clone ID: PAT_MRT4530_4618C.1
atggagagcccgaccaaggttgacgacgagcagtggctggcctactggatcctctactccttcatcaccctcctggagatggtcgccgagcctgtcctctactggattccggtgtggtatccggtgaaggtgctgttcgtggcgtggctggtgctcccgcagttcaagggcgcctccttcatctacaagaagctcgtcagggagcagctcaggaagtaccgcgccaggggcggcgccgccgccaccgtcaccgccggcgaagatcacaaggtgcacattgccaagacaagcagagatctaaatatgaaaattaagcagagtcatgtgtggtgtgctgttctgacgaagtctgattccctgatggaaaatatacatgcaggctga

SEQ ID NO: 42991 - DNA, 141 bp, Oryza sativa
  Clone ID: PAT_MRT4530_46190C.1
gcagtagccaaatagatggataggacaggcatacaggtagtgtacagataaggttacacagatggatgttgatgaggcaagacaggtggtgtgtttatgaaacgctctaaaaaagagtaatgtgatgaaatacatgatgaa

SEQ ID NO: 42992 - DNA, 396 bp, Oryza sativa
  Clone ID: PAT_MRT4530_46191C.1
atggcggcggcggcgggcgacgctgtgttggactcggcgacgaagactgaatggcggcggatcgacggcgacttaattgtgaaggcagcggctagacgcagagccgatgcaacagtggtgctcgctccaacgacggctgtgcgcggcgaaggggactcagccacgaagactggatgctggcggcggatcgacggcgacttgcagggcggtggcagggaagaaaaccagaagatgatggaggcgtggatgcgggtatcggcattggcggcgaggagcacaaaggcaaggtcggcgtcggcgacgggagggcttcgtgcggctgggatcggtcaagggcgagccggcgtgatggagaccgtgaggctcgcagcgatggagaccgggagccggggctga

SEQ ID NO: 42993 - DNA, 708 bp, Oryza sativa
  Clone ID: PAT_MRT4530_46192C.1
atggtcaccgtggtcgcgccgccgtcgctcgtggtcgccatcgtccttgtcgttgccgtcgccgcgccgccgctgctcctgtcgtcgcgccgcctccactcatggtcgccatcgtccttgtcgtcgccgtcgtcgtgccgccgccactcccggcctccgccgcaaccgttcgccgtcgccgccacgacacctctgccagcagccaccgcactgcctcccttgcagtcggtggtggcggcgacaccccgtgtgctcgccgcacgaagccctcccgtcgccgacgccgaccttgcctttgtgctcctcgccgccaatgccgatacccgcatccacgcctccatcatcttctggttttcttccctgccaccgccctgcaagtcgccgtcgatccgccgccagcatccagtcttcgtggctgagtccccttcgccgcgcacagccgtcgttggagcgagcaccactgttgcatcggctctgcgtctagccgctgccttcacaattaagtcgccgtcgatccgccgccattcagtcttcgtcgccgagtccaacacagcgtcgcccgccgccgccgccatcttcaccgtcaacgacctctcctctcagttaccacctgtccggtggtacacctcccaagatagagagctggggcaattcaggaagatctcgcacggctgcacagctgagcagtctggaggtggctggcagtag

SEQ ID NO: 42994 - DNA, 247 bp, Oryza sativa
  unsure (1)..(247): unsure at all n locations
  Clone ID: PAT_MRT4530_46193C.1
agaaaattgatggaactgaatttgctttcctgctctgagaagtaaattcgatggttgtgtaaagtgtgccattataaaaccatctattaaatgttcttgtgagtagaaatctatgctttatgaactgtggaagagttatcagtagcnctaaaaaaaaaaaaaaaaaaaaaaaaaaaaaaataaaaaaaaaataaaaaaaaaaaaaaaataaaataaaatatatattaaaataaaacatttatttatg

SEQ ID NO: 42995 - DNA, 417 bp, Oryza sativa
  Clone ID: PAT_MRT4530_46194C.1
agccgttcgtccacgcgttcccccaagccgttcctccaagccttccgaccatttccgggttaacaagggaagggccgcccccattttcattttgccaaccaaacaagggaagggaagggccatacttgcctttttgagaaaaccttttttaacccggggtttaaaaaaaggttgtggctttaaacctcaaccttccggcctcgaaggaaaccttaactttttttaatttcttgccttggtccatgattaattcccctttttgaaggtcctttggacccaccaatttgattttaaacattgcaaaatcctttaacttccatatttaataatcctttattgccataacaccccccattttgccaggaggcccatccataactgccaggttttccacttgaggaacataaccatcaggtt

SEQ ID NO: 42996 - DNA, 441 bp, Oryza sativa
  Clone ID: PAT_MRT4530_46196C.1
cacccctgcataccccccgggaccccccacgccggcttttttaagcgccacccaagaacgagggcaaggggggccatttttaaaaccccgggggtgcgtagcataagcacccccgccctcctaaaaagaatacacactgcagtcgccaccccacccccctacatctggcgcaccaggtccgcccaggaagaacttgagcaatcgatcccgcccgatgcccatggatgccgagatctcaaccgggagactgagggccaactcatcttctcgaccaaaggccctgccgatgacacccctcataagctggatcttgagctctttgatgctgtgaacgtccaagcgagcacggcacctccgggggcaaggtccatatgctatcctatcaagaaagcacagagcaagcggtggcctaggctgctcaagaaggaaggcaagccacct

SEQ ID NO: 42997 - DNA, 408 bp, Oryza sativa
  Clone ID: PAT_MRT4530_46197C.1
atgggccagtcgtgcttttgggccggtacggcacaacccacgccttattggactgtgcctaagccacagtgcaagatctctcggtgtcagcaaggggaaaggctcatgcgcgcgggtggggccgagaactgcgtggggacgcgcaccactggagaagaaggggacccgctagcaagtgccaaattggagccggaaaaagagtgcccattgacccctgtgtcgctttgtaaggtccttctgatggtcatagggctcatctgcgccctgcacactgccaccgtagaaggaggaagagcgctagcggcagcggcagttggtggtactggtgtggacttgccaccaactgcaccaagctactccagcaagtgcagatatccctacaaatgcccccctgcaggctcaccatga

SEQ ID NO: 42998 - DNA, 163 bp, Oryza sativa
  Clone ID: PAT_MRT4530_46198C.1
cttgagtctgaacaatgacacactcaaccaagatccaaggaatttgcagcgaattcggttacaggatgaggacgatcagcgtggcgacggtggtcaggttgatggcgtcgtcgtccaccttgtgcagcggcgactccgtggccagctggttgcctacgccgtc

SEQ ID NO: 42999 - DNA, 234 bp, Oryza sativa
  Clone ID: PAT_MRT4530_46199C.1
atgtcggcaacggcaagcgtgttgttcacttgtcagcatagctttcggccaagcctgagaactagctcgagtcggacttatcacttcatagtcacgctagtgctagacgcacgaacccagcttgattggtatatggtccactgcgaattcacgtcgatcggaagaaatcattcaaataacgagctatactcacatgtattgggtgatcaccggtttttactacaaaatatgcta

SEQ ID NO: 43000 - DNA, 2873 bp, Oryza sativa
  Clone ID: PAT_MRT4530_4619C.1
tttttttttttttttttaacaaaatatgatatatatttaggcggtaaaataatgcactacatgggccatagtagagtttgcattgatcaccaacaataagaaaagatacataagtccagaactaaaccatcataaacatatcctaaattcatgacaatatagggcatagttttcagacatataataaaaaacgagtaatcatcataatgtttgtacctcgaagtactaatctagaattagatccttctgtttccaaaagttcccttgtaatactggaggatctttggcccattctgcagtagatgcttcagtgagttgcatagactgtgtcatttcgtcttggaggtctatcaggaactgagcctggcttaaatttggatgcttcatgtcttgcaacttcaggtggcacaggactgttgctctttataagcatctgtttcagatcaactatattgacagtattattcaatgttaaaaaaccacttaaaatccccacaatgaagatcagatacaatatatgccctctcgaagtactaatctagaattagatccttctgtttccaaaagttcccttgtaatactggaggatctttggcccattctgcagtagatgcttcagtgagttgcatagactgtgtcatttcgtcttggaggtctatcaggaactgagcctggcttaaatttggatgcttcatgccttgcaagttcaggtggcacaggactgttgctctgtataagcatctgtttcagatcaaagaaaatgtcagtgttctccagagttaaaaacgaagttgccaatcccttctttcctgcacgtccagttcttccaatacgatgtgtgtatgtatcgattgaactaggcatctcatagttgatgacatgagcaacatcgggaatatcaataccacgcccggcaacatcagttgccacaagaacagtgaaccgccggtttctaaatccatcaaggctcgtctctctctgctcctgtgacttcccaccatgtagtgttgtgacgcggaagcctgccttgtctagatccttcgcacgagcatctgctgatttctttgtgttgcagaacacaatggctggcttatccccaagatctgtgagtatcttctggagccttgacatcttctctgactccttcgtcatgatcacgttctgtgtgatgagatctgtggccttgccagctgtaccaattgtgacaacgactgggttccgcaggtacttcctagcaagccgctccacagcaggtggcatagtggcgctgaacatataggtagtcctatagatcgtttttgcatcaagctcctcatcctcattctcaggtttcaagttactcgatggcatagcatcaaggactccaacaacctgcggctcgaagcccatatcaatcatcctatcagcctcatccagaaccacatagttgcactggttgagcacagcatacctcctctccaagcaatcaagaagccgaccaggagttgcaataacaacctcacagccctgcctaatcttaaaaccctgctcttcaatggattgaccaccaacgatagacacaaccttaatgccaagataggtcgcaaatttcacagtctcttcctcaatctgttgagcaagctcacgagtaggtgccataacaacagcataaggaccctcagcctcattttcctcacttatgggtgggaggcgggtaatgtacgaaagcatagggagcacaaaagcagcagtcttgccagagcctgtttcagcaataccaataacatcacgctgctggagaccaagtggaatggaagccatctgaatcggcgaaggttccttgtacccagctttctcgacagcacgaagcagctcagtaccaagcttgctctcagaccacttccgcatgggacggggtaccttagaacccttataggatatattgaagtcctcacggaatatacgccaatcccgctccgtcatctcatcaagagacttctgagtccagtgcctgtccacgcgcatgtcgaaggcatcatacttcgctgcagcatcagcctccttcttatcaactgcgtcgtcctcagggcggtcatccagaccggccttgcgccgctgctcggcacgggtctccttctcatgcgcggcggccaccttcttctgctcgcggcgatcaatgccagccaggaatccccggccgtagagcaggcgggcctcgtggggcgactggtagagcgagttcatgtcgcggctggtgtcctccgtgttctcccagtcgaacgagaagcggaacttctcagacggcttgatgacccgcttcttgggcttcttggaacccaggtactgctccttgatcgcgtccagctccttctcccgctccctctccgccatcttctccagccgatctttctccctgtcccctcgctccctgtccctgtccccgcgctcccggtcacggtcgcggtcgcggtcaccgcgctccctgtcgcggtcgcggcgggaggagtcgcctcggtcgcggtcccgatcccgatctcggtcgcggcgggagtcgtcgtcgcggcggcgctcccggtcacggtcccggtccctgtcccgatcccggtcccggtcacggtcacggtcacggtcggaggagtcgcggtggtgggaggaggaggagtcgcgaggggggttggaaaggggaggcggcggcggcggaggggggcgggggagcgactggagcaggtcgagggcggagcggcgctggtcggtgacggcggcctggcggcgctcgagcgccagcttctcccgctcctcccgcgtgaggaacttgggcttctccatcccgtcggcggcgcgcttcatggcggcggcggcggcggcgggattcgtggagttggggagggtttgtg

SEQ ID NO: 43001 - DNA, 649 bp, Oryza sativa
  Clone ID: PAT_MRT4530_461C.1
gttttcaatgtcaagtgacaagtaccaaataattaaaactccaataatcattcggaacaacatgtttgtcagaccacatttaggcaaatctaagatgggtgtgtcatttggatttattgatgattatcaactctcagtctggatcctcaaagaatcagctggacaaattaagtgggtcttaagttaccaacatgacctttgggcagcgatcaatcaaatagattcgtttgattttggtggtcaccagattaatgggccttgggtcttagaagagaccatcccaaaatacagaacaattgaaaacaaggagactctctcagacaaagagtgggattccgacaatgatgattttcttgatactgaagttgatgattttctaattgatactgaagttgatgatgagggacataacgattttgcatactttcgtatccttggatttcatccttacaaggaagtcattttcttagaagaaacattacgaacatttgcctatcatttgaatagctcaaagattcaatacttgggctactcatgccctaaatattgctacggaagatacacaatacatgagtcgttcgtgtacactcccggcatgattggagagcttaatggacactatgctgcagggcagagctcacctcaatga

SEQ ID NO: 43002 - DNA, 1671 bp, Oryza sativa
  Clone ID: PAT_MRT4530_46200C.1
caaaaaattgtattctgaataatgagcataatatccaaactgaatctgttgacagtggaattttccagttaatccgttacaaaactaggaattcggtattactaacataaatcacatcagcatggattacaccatctactctctctttgcctaccaaagaacaagtggtcatgatagctgcaattgcctgcaaacagttacagcaaaaacaccactttctctccacatgggtaatcaccaggtcaaactatccacctgaagatgaatgcttcatgttgtagcctgaagaagcccgaacctgaattttctttgagctgccagaccagagctttagtcggagcacaagcggtttcttcatattagctcctgctccttgacactaggcaatcttctaacattttctcgatcgcgcttgaacacaaagtacagtgggctgtagaacaagaagcacaggccaaaaggaacaatcatcattgtcaatagccccctcgagagtgcatacgcccctgctaccgatccattttccagattgacggtctttgcgttgtagccatagatcttctcagtgaccatgccaacagcaggagcagccagggaggcaaatgaaccctcgaacgcgcggtcgaaggcatagatcatcgtgcggtgcttgggagggactacctccgcaaacatggggttgtttgcgcaagtagcgcaccagctgatggtaatccccatcaagaagagagtgacagcaaaagcagaccagtagtcgactgactgaggaatgactgtaaggaggatccaagagaaagggatacccatgaaggcgctaaactgagcacacatgatgcgagctgaatcaggatagtattttgacagacggtctgcaattactccgcctagaaatgatccactggcacaaccgatagcaaacatgctgtttagcgctgctgaactgctattgtcaaaaccaatgagctcaaaccacattgtgaagaaaactacagcagtccatggcaatgagccaactatgcctttcatgacagatcttgctgctatccaggaatccttccagatggactgtggaggaaaaataccattaccgatcaaatgcgacctctcatggtggtcctcgtcatcaccaaaatggcttggagacacttttctaggatcaaccgtgtaaaagtagacaagaagcccaattaacaagctaagaaatgcaaccattagaaatgcaaacctccatcctggcaatccccagtaatccctaccagccatgattgttgctaaaatacttccacctataccacctattgaaccaatgaggcttaacaagccaaaccctgctccgcgtgtaccatctttgtagctatcagcaatgaaggattgaagtgccggtattacaatggctagtccaagaccattcacagctctccagaatgcaacctgctgaaaatactggctgacaccaacagcccctgttgatacagcccagaagactgtccctatagcaagaactgcagggcgatcatattgaagtgcaaggacacctgccaagggagatgctattgacttgagaaagttcattagaaacgtaagataccccagatcagtaggaccagcgttgaaagcagcactgacttccttgtaaactgccggaaggagattctcatcagcccgctccat

SEQ ID NO: 43003 - DNA, 237 bp, Oryza sativa
  Clone ID: PAT_MRT4530_46201C.1
gtgtcaatagagaagacggcagaggtgaagttcaggacacggtcacccaacctactcgcgagctggcttcgctgctgcctcgatgttctgacggctgacacgcctagcaagaacaaacaacaaaaattaaaaaggccgataaaaaataatctacatccggagaggctgcaccgttgtagcggcattacgtcgaacgccaccgccgccggccggtgcaagctagctagcctcaactca

SEQ ID NO: 43004 - DNA, 337 bp, Oryza sativa
  Clone ID: PAT_MRT4530_46202C.1
tctcggacgcgtgtgctgtactaaaaggtttcattgatttcgatttttatccctgtcctgggatgtgagatagcgctaaaggatcttataacttaaacgcctaatccttgcccaaaggatcgcttaacagcacatgatagtcttctgtcgtgtctcttactacattctctcctacaaaacttttttacttctctgtactctcggttttattctttttcttaatgcctattcattctcttgactcatcctctacttccttgttgaaaatgttacatttcaatttctgctcagtccttctattgatttcttgatcacttgttcttctccattattcttt

SEQ ID NO: 43005 - DNA, 586 bp, Oryza sativa
  Clone ID: PAT_MRT4530_46203C.1
ccggcgagcatgcgtgcccaagccgccgccggtggtgacatcaccgctgacgtcatcgtcgccgtttcccaactatgaagtggcggagataagcccacgggggtcgctggggagtccatgcgttgtttacaagggggtgattatgatccgggaacggtgcattgctttgaattatgttatgcagagggtattgtcacaatctctattcgggtacttgttaactatcgcgacgcatggttgacatgatgttgaggttgtgtcttgtgtgtacagtggtacacctctggccagagttaaactattcgaatagccgtgccagcggttatgggcggacacatgtaagcgtttggaattttggatagaaattccgggcgtgacaaatatggagcacaaaaagttagccgatctcccgaagtctattgaagaacagaaagcaagactcaaatcggctatcaagcacgttgctgatctgaccaagtctctgaaagttatccctgtaaccgacgctcaagatgctcaagccatagaaaaagtaaaacagattaggcagaaggctatatcggccatccagcgatacttatctcaa

SEQ ID NO: 43006 - DNA, 230 bp, Oryza sativa
  Clone ID: PAT_MRT4530_46204C.1
aattttgaaaaagttgtcttcaattgccaccaagtaaaagcaactcatgcatacatagtctcattggtagcccctgatggtactaaagctaaggctttaactgtttgccaccatgatacaagaggaatgaaccctgctttgcttaatgaagttctccaagtcaacbbbggaactatcccagtttgccatttcattggcaataaggctgctcgttgggcgtgttgttgtga

SEQ ID NO: 43007 - DNA, 152 bp, Oryza sativa
  Clone ID: PAT_MRT4530_46205C.1
gcgggcagggggcgaaccttaggaaaaacgccaaattcgggccctttgggggtcagggccttttggaggctctttgccaagagttcagtgaccagaacctgaatgtgcgccaaatggcaatgggctctcgccgcgcgttggctgattcatga

SEQ ID NO: 43008 - DNA, 609 bp, Oryza sativa
  unsure (1)..(609): unsure at all n locations
  Clone ID: PAT_MRT4530_46206C.1
atgtcaggtcgcgaggtccgcgagtacacgaatctcagcgaccccaaagataggaagtgggggaaggggaaggacaagattgatgatgaggacatcaccttccagcgcatggtcgcaaagatgcaggaggttgctggtgaacggggaggttaccttcatgggcgaggagcaattttagctgattctacacctgctgttcctgcggctcttcgagtcgagcctaaacctaaaagcgatatcaggcaacaagatctcttgaagaatattgtcgggatcaaaccgaaacggacaaaagttagcagcccttcacaaccagcagagaacgataaacctaagcagagcccagaagattctgtcaacaaagtgtcctccccgcagagccaatcaggatccaggaaggaatcatctcagcgggacggggcagtcagttttgagaagcctttgttgaaaccagttgaaccgagagagtccaagccacagaatgcaactggaagcttgctcggtttagcttacgagagttcagatgaagaatgatcattggtttagatggaaagcagaactagtgtgtagattgtatataggcatngtactgcttgctagagcatgtng

SEQ ID NO: 43009 - DNA, 942 bp, Oryza sativa
  Clone ID: PAT_MRT4530_46207C.1
atggcgccgctgaagcccccgccgccgcggctcctcctcaacggcgtctcctgcatgcggaacgcgcaggcggtgctccgcgacatcaacgtcagcgtccacgacgggacggcgctggtgctcaccggcgccaacggctccggcaagagcaccttcctgcggatgctcgccggcttctcgcgcccctcggcgggggaggtcctctggaacggccacgacatcacctccccgggcgtgttccagcagtacaagcttcagctcaactggatgtcgctcaaggacgccgtcaaggagaagctcaccgtgctcgagaacgtgcagtggttcgagctcctcgaggggaagcacggcaagtcggccccggccatcgagctcatggggctcggcaggctcatgaacgagaaggcgaggatgctctccatgggccagaggaagaggctccagctcgccaggctgctcgccatcgatcgcccgatctggctcctggacgagccgtccgtcgcgctggatgccgagggtgtcaagctgctggagtacatcatagcggagcaccgcaagaagggtgggatcgtgttcgtcgccacgcatttgcccatcgagattgaggatgccatgtcgctccggctcccgcaacggttccctcggaggaaaactttggttgatcttgcctcagatgttcttggggaagtagcttgctttgttgattttatgaacacttctgacctctgtgcaggctgtaacaagggagcactgaatgctccactaataagtccccagggaccattggaggtgctatctgaccccatgctggaagtagctggcccactattcaagacaaggcccaatctagaggatgctagcgtggaatatgtgcgcaatggatcacggtcgaaaattatctttatattgcaaacgatcaggtctagcccagatctgagataa

SEQ ID NO: 43010 - DNA, 522 bp, Oryza sativa
  Clone ID: PAT_MRT4530_46208C.1
atgttgtggctgccgtcctcgccgccgccgccgccaccactgacaatcggggaagcgttcccggacgcacggcacctggagacgccgaagtggatagcggcgctgctcctcgtgtcgtgcatgttcgccggtggcctctacaccctgacgcccctcatagccaaggaccctctctacctcgcccgcgtcccgtggcggctgccggtgcgcgtcctgtgcgacacctacctgtcgctgaccatggtgatccgcttctacacgctcatgtacctgccccgcgcgccgctggtcgccgacgagtacctcttcatgttcggtctctgcgctgtcggtggcgctgctatcgtgacgacgtctttcgtcctggggattcccgtcgaagacgagcgtgtggtgatggcgtgtgccggcgtcctcgccgtcctcgtcgccgggctgctcgcgtactgggcgtggctcgttcgcaagtacggtgataataagccggtcgatccggcatcgaagcttgtggtggtggtttag

SEQ ID NO: 43011 - DNA, 2013 bp, Oryza sativa
  Clone ID: PAT_MRT4530_46209C.1
ggttcgagtaaatgtggatcttgcaagagagcgagagggcaaatacagcatcataattctcaagttagcacgaagaagatcaagttgtacaagatgctctactcaagtcaagtgagaaggtgactaagttaacccatctatgttaaaattgcctgggatcattaacaacatgaatatggcaaattcatatcaaacttgaatgtccatgtttttgagagacagccattgccattggtacgaggtcaccgaaagggtcaccaaacggattggaagatccagcctgaggtgcagggtactgatgctgctgctgctgctgttgttggtatatctgattttgttgataatgtgtctgaaaatacatgttatggtgatgttgatgatcctggaaatgatgaggctggtagtattgttgctggtgttgagactggtagtactgatgctgctgctggttcagcattgcaaactggacattggatgggggcaagaagctgctcgacgtagcaaatggatcgttggtgtcgaaagggttgggtgctcctcctccaatgctaccggtgtaggtgactccggcgatctgccgccgcctcgtctcgtcttcgtagaggctgtcgagtagcagcttgtcaaagcctccagccaatttggtttgaactgtttggctggtgctgcttggagcagtcgtgcaagctcccacccagatgtgttgccagaaaacaagtccagggaagttgatgccttagtttgatcacctgttcccacaattgctagggcccatgcgttgttttcttccagttctgcaaccaatggactcacctctgcatccaagtttagtagatctccagtggtttctggtggctttggttcttgtttaggctcttgttcttgttcagactctgcaggctcatctttctcctcttctgctggtttttcagactcctctgtagcttcttggtcgtaggtcactagcttcctctcaccattctccacgctgttaatcgagggacggggtgcttctcggatgtactcttccattgttgcaatgaatgatgatggtggctgccttagagtaggaaactggaatgtcctggcaagctcaagttgtttgcaggaatcgtagaagtcagaaagatcttcagcctgctggccagctcgtttatagacaacaagagccttgatagcatcatactttggcatatcaaagaacatatcaacaagattgatgataccatcattgattgcacagtagatcttgaagctctccttcaaaaccagggctaatgcatattggataaggtagttcgtgcctgctgcaccttcaggctggcagccaattagcctgaaaagtagctgctgcaaggcaggcaactgctccagaagttcaatgcaaggcagggttctagttctactgtgtgccttgctggaacactcaggagatctcatcagacgctcggtttcgatgtcgaatttcaagatcctgaaacactcgagccgttcttctaggaagagcgcgtaggcgcgaacccacgcagagcaatcccaagctaattggcttgaatcgtccttgaagtttgctctctgcaaaacgcttcccttgtatgagtaggccaggaactcttctttgaatgtaggatcaccttctctcaagagcctatgtaccactatcaatgtcttcaatgcaactgtccaattcttctgaaagagatgcagtattgaattaaggtcgccattttctaacgtgcctgtccttgggagggcattctacatggttggtggccttcacaattgcaatatccaactccttgaagtcgctgttgaccttggcgaggccgaccttggtggagtccttgagggcgccgtaggccttgcgccgccacgaccccatcgcgatcggcgcgacggcccggccgcgggcgtgcgctgagacctccggacgcccgcacgtactctctccctccctcccgctacggacgaccgcgacgacgacgacgacgcaatgcgacgccggacgcgtgg

SEQ ID NO: 43012 - DNA, 536 bp, Oryza sativa
  Clone ID: PAT_MRT4530_4620C.1
gtatactaccattaaatgagcttaggtctgtgactttttactcttaaaagcaactagttatatgccatttcatcctgctgccagttgatacttatagtagcgagaatcttgtggcctaagaagtcgacttcctgcattgtgtcagtttaataaaacaaagaagaaaactcaaataataactttttgtgtaaatgaatagaaggagaacaaaacacctggtagattgaccaactcatgatcattggatcacatttctatttttatcactcctgctctgtcccaagctctctatcttagttttgtaaacagtggaagtgtataaggaatcaaagaaaagggaaggccctaacaaggatctgtagagtgggatagcttgttctaaacttctactacttgatattgacattttgacatttggttgcagatggagtttatgtccagctgcaagcctttgtctgctctaaaagcttgttactcactatgcacagtttccagtttaggaatggcctgtgatcatctacctgctaacactaaga

SEQ ID NO: 43013 - DNA, 414 bp, Oryza sativa
  Clone ID: PAT_MRT4530_46210C.1
aaaaagggggtttttttttacttttttgttcttctatttcccccgggccccccggaattgcccccattttttttttaaactcgaaccccttttccttttccattccgggccccccccccccccacgggggatttcccccccggccccattgtgtgtttgatttaatcccccctttggggggggattttttaggccccaaatgtttgggcttgcccctgactttttcaaaaaaaacacccccccccccctttttgtgtttttccccccccccccccggagcgggggggctcccccgaatttcccggcccggtccccgcgggggcccctcttttcccctttaggggcagttttatatccgggggtatctacgggctttgcgggcccctgtagaaattggtttcccccccatttttc

SEQ ID NO: 43014 - DNA, 405 bp, Oryza sativa
  Clone ID: PAT_MRT4530_46211C.1
atgggcgacggcgtggcgtggcgtggcgtggcgattctggccaacaggcggcggcgccgcaacgctgagtcgagagagaggaagaggtggaagatggaacgacgatgcgtgccgtgcccaacgatcgacgttggattaacctgtgaagtgcagatgttgggccttgttgggccttggcgttttgcagattttgggctgaaggctagcgagggggttcctgagttttggatcaaggggcctattgggctccgcccctgcttgtctttctcttccggctccggcagcacccgccacccaatcacatggccaaaatttccttgcgtccactaccctcttcagtccctgtggctcgtcatgctcccgtcgtcggtgaccattgttgggctgccacatatctccctctaa

SEQ ID NO: 43015 - DNA, 448 bp, Oryza sativa
  Clone ID: PAT_MRT4530_46212C.1
cttgagagcatcgcagcactccggcagaccaatcccggagatttgggcggcgtcccagtcgcaccacagccaggcagaacaagctcgacacaccaggcagcacagcggagaagacgaagggaatgaggtccagatctgggactgccaatgcaatgccagccaaacagtgcaagtgcctggcgtgaatgcggttccctaatcacattgcgcaacaatgaaacaaaatgccgccaactgaataaaagcaagtgactggtgccacattgaatgtgatgcaatgtgaaatgtgatgtgctggatgtgcctggatggctggagtgcagtggtccaagtgtaattgtaataatggcctgcctgacaaggaaatatgcatgtgtatatcagttctgatgatcacccttttgtttcctgtaaaatgtaaatgccacctatgaccaaaaaaaaaaaa

SEQ ID NO: 43016 - DNA, 394 bp, Oryza sativa
  Clone ID: PAT_MRT4530_46213C.1
ctgtcagggttacggataaggcatacctcctatcctacgacttatggaatataccgataaggtataccttcacgtatacggattgttctcgtaagtgtcgtacggaaaccgtttcagattatagaaaatatttccacgagtcaagtgatttccaaagttctactcggaagggttcttggggatcaagatgattcacggtataaaaaggacccactgagagggattcgaggcatcgaattccatcgccaacacacccaccaaagtttacgaagctggagtacacggagccaactcaccgggagatctcgtcgaatccctcgactacgatctcgtcgtcgttccaacgtaccccaatactctactcatccgatccgcgagtatcactcgtggcaca

SEQ ID NO: 43017 - DNA, 442 bp, Oryza sativa
  Clone ID: PAT_MRT4530_46214C.1
aaaaaataaaaaataattttttttttttttaaaaaacccaaaatttaaaggggggggaacaaaaaaccccgggctttttttttcaatttccaaccaaaaatttgggaaaatttaaaaaaaaaaacccccaggggggggaatgtttttgggggcccttttggacacgggggggttcccctttttggagggggggttaaaacccaaaaatgtttggggttgggcccgtttccgggctttttttgttttgccaaactggtggggggggtgctgccccccctcccctggggcggggggggggtccccccgtggggggggggcgttctttcctttggccgggtttgggctctcccccccgccctgttgggttttccccctcccttcccttttggggcttccccctgggtccctttgtcgccccgggtggtgttcccccccgttgggg

SEQ ID NO: 43018 - DNA, 2582 bp, Oryza sativa
  Clone ID: PAT_MRT4530_46215C.1
tccccctccaattccattccatcttcatctccatatcttctcctccccccggcggcgggcaccgccccgttcgtgatggcgtcgtcgtcgtcgtggtgggtggtgatgttgttgatggtggtggcggcggcggggtggggcggggtggcggcggcgacggcggcggaggcggcgcacgaggtgctgcgggcgcacgggctgccgcgggggctcctgccggcggggatcgcggatttcaggcacgacgaagggagcgggaggttcgaggcggcgctcggggagtcgtgcacggcgcagttcgaggtcgggctgcggtacaacgcgacggtggccggggtcatcagctacggccggatcgcgtcgctgtcgggcgtctccgcgcaggacctcttcctctggttccccgtccgcggcatccgcgtcgacgtcccttcctccggcgtcatctacttcgacgtcggcgtcgtgttcaagcacttccccctcgccgtcttcgaggccccgccgccctgcacccccgaccccctcctcctcctcacgcagttggtaacgaacgaactagtcgggggcaaggggcaagacagcatgtttcgcatagcgcttgggagtgaactggtgaagttacacaggaacagcgagcgacagagagggggagaggatcaggcgagcgattgcgtattttgcattacgggagagggagaaatgggtggattggaggagcagcggcatgtgctatgggggaaagctaatgatgggaaagagacaagcgtatcaactgcagcgccttcctgcagctgccgggttggtggagtaggtgacgaccacccgcgcctgggtgggagtgggatgccggcgcggggcaagcgtggcatgatatatgaatcttggtccagtcagcaagtgggggtttttattggtaaattgctttgggaaagagccagagtgccgtacaatttgcacacagagctgggccacctcccatggcgtcccagcacggcggcgacccgcgcctcgaccgcctctcgcgtgccctcgcctccgaccacccgccgccggcggccgccgcggtccacgcgcatctcgtccgcgcgcacgccggcacgccgccccccgtcatccggtccctcctcaaccgcgccattcgccgcctctccaagccgcacccgcgcgccgcgctccgcctgctcctcctcatgccgcgcctccccgtctcccccgaccacttctccctccccttcgcgctcaacgccgccgcgtcgctccggttgctcccgctcggcgcctccctgcacgcgctcgccctccgcctcgcgctcctcccctgccgcctccccgtcgccaacgcgctcgttgatctctacgccaagtgcgacgatctccccgccgcacacaccgcgctcgccgacatcgcggcccccgacgccgtctcgttcaactcgctcctctgcgcgcacgcccgcctcgcctccgtgcccgacgccgagtccctctttgttgccatgccatccagaacccaggtatcgtggaacgccatggtggtcgtctacgtcaatgcaggggacgtctcttctgctcgccgcgtgttcgatcaaatgcctaccagggactccacctcgtggtcggtgctgattgttgggtactgcaagtgtggttcaatgcggagtgcacgagaggtgttcgatagaatgccggcaaagaatcttgtggcatggacagcgatgatcaatgggtatgcgcagagtggggtgccaaaggaatcacttgcgctgtttagagaaatggaggctgctgggattgagcctgatgcagcaactatggtcggcgttatatctgctgcctcgcagattggcagcacggagttggctgggtgggttggaagttatgttgacaagaagaggattgaaaggaacgataaagttcttacagcacttgtagatatgcatgctaagtgtgggaatgttgacgaggctctcagtgcttttagggagattgcacagccagatgcatacccttatactgcacttattagtgggctggcagctcatggtcatgcaaaattagcgcttcaagtgtttgaaaggatgcaagctcagtcagtttggcctgatccaatcactttcgtcggtgtgcttaccgcatgcagccatgcaggacttgtcgataaaggtttggattactgggaggcaatggtgaagtactatgggatggagcgtcgagctgatcactatgcttgtgtagttgacatgcttggccgagcggggaggcttgaggaggcttttgaaatggtgcaaacgatgccaatgggcccccacccaggggctcttggtgcattgcttagtgcctgcaagacgcatggcaatgttgagattgctgaaattgttgcaaacaaactttttgagttggaacctcacaacactgggaactatataatgttgtcaaatatatatgctgagaaagaacaatgggaggaggcagaaagaattagatcagttatgagaacaagactgcccttcaaacagccaggctctagttgggtggaggatcgacagagggagcgtggcaggtttcctttgaggagctga

SEQ ID NO: 43019 - DNA, 363 bp, Oryza sativa
  Clone ID: PAT_MRT4530_46216C.1
cggtcgggggcgttccagcccaacccggccccgccccgccccgttgccatccctaaaaacgacgttcgaatatgctgtcgttgtcggcccggcaagaccggactaggttttcacccgccgtccaccgcctgcttgtccacagctgaccaccattgctccaccaccatcaagactttgtcagtgtgtgggcacagctgcaccggcgcccccgccagccagcatccgcaccgtgccgaactccgctgtcggccacgacaccttgtgtcgaaccagcctccgctgtcgactgctactactcgcgccaagcaggcctctaccaccgctggccgctcctccttgcgctgtcgttcccaccgtcgatga

SEQ ID NO: 43020 - DNA, 1169 bp, Oryza sativa
  unsure (1)..(1169): unsure at all n locations
  Clone ID: PAT_MRT4530_46217C.1
ctcttctgcgctcctcctcctccacctgaatctccctctctctcctccaagaacaggggcggcgaagcagctaagccggatttcgtggttggtggcctctccccttccaccaccaggctcgccccgccgctgccgcgaggtgcccggccgcctgtttcttctctccggtgcatttcgatctgattcccccgtcccatttcgtgtccgtcctgcttcacacccggatgtttcgaatcgattcttaaggagaaacaaatgaatcgtggcgaatgaagagtttagcgatgtgccttagttgaatggttccattgccaccctgtttggctgattttgttcagacgaactcatcttcaagcttatatgggtacagttgctgcataggtaatttgagcaagtcccagccacttccagattataaaccaaaaacatctgtaagaaagaagcctcgccatttatctattggaaaaagaaggcaatgctcatcaggcctagaagcaatggagaacaatgttagtgtatccgtgtcccttgaggggaatatatcatcacttcccaactctatcatcaatgattctaatgggaaagatacctcattcatcaaccatgcggctatagcatgggccgagatgagaaggcaatggaccggagaccaggagaaagttcctaaagaggcatcacaagagccaataataagctggtgcacaacatatgatgatctgttgtcgacaagtgagcgttttccgcagccaatcccgttatctgagatggttgattttttggttgacatatggcatgaagaagggctctatgattagttgggtttgactgtttctaatagttatcctgaaaaaaaaaagaaaagaaactacaaattagtaagcaggattaatctcaaattgggtattggaaaagaaaactgtaattgtaaaagctacaaaatggtgttgatatgattttgtgctagttggacctcaagctctcagatgtgttgctatctgctgaatgaccctatgacatgtaactgtcataggtaaaaactgaaaggcacattaacattgtttgtaaacacggcaacttcacaacaaaaaaaaaaaaaaaaaactcgagggggggcccggtacccaattcgccctatagtgagtcgtattacaattncntnnnnntntatt

SEQ ID NO: 43021 - DNA, 924 bp, Oryza sativa
  Clone ID: PAT_MRT4530_46218C.1
atggggcaccactcctgctgcaacaagcagaaggtcaggaggggcctgtggtcaccagaggaagacgagaagctcgtcaagtacatctccacgcacggccatggctgctggagctccgtccccaggctagccgggttgcagagatgtggcaagagctgcaggctgaggtggatcaactacctgaggcctgacctgaagaggggaagcttctcgcagcaggaggagtccctcatcattgagctccacagggtgctgggcaacaggtgggctcagattgccaagcacctacctggtagaacagacaatgaggtcaagaacttctggaactccaccatcaagaagaagctcatctcccaggccgtgggtagtctgcacccttcctctgcagatttgtactacaacattctggacggagcaggacagagcatcgcagctgcgtcactgaacgcggtggagaatgcagctcacggtgtcactcaatcgccgccgtcttccgtgtacaactccgcggcatgggccagcttcagctcccaccagccaatctttctccccggccacggcgtccacggctgcggcggcggcgaccttcagtacgccgccgccgtcgacggggagttcatcaggctgtgccgagcagcggaggcgtaccagctggagaacggcgccgctggcatcgtcgggggtcagtgcaagccaagtgatcatctcttggctccagagggcgtcgtggcccggagttgcctcccggcgtttgtcgaacagaagggcggcggcggcggcgctttcttggccgatccggccatgggtccggtgatggacttcatggacgccatcctggggtcgtcgacgacgtcggcggccagtgcttcatccgtcgacagcttctcggcgaacaccgccatgcaacctcactggattccctga

SEQ ID NO: 43022 - DNA, 240 bp, Oryza sativa
  Clone ID: PAT_MRT4530_46219C.1
atggatcatccacttccacccagcctctgcgtagcatccgtggccaacccgagagaatcagcgcggcgtgttggtgttcgcgcgcacgtcgtccgcgtcggcaagcacagagccatgtttgtgtcccctccactctctcccggtaaaattacagttgacgagaccggcgatagcggctgcgcgcgcccgtcgactagatcggcggtggcgggagcggagcagaagcagcccgactgttaa

SEQ ID NO: 43023 - DNA, 471 bp, Oryza sativa
  Clone ID: PAT_MRT4530_4621C.1
atggctgccgctcgcccgcgcctatcctccccggcgccgacgccgccgcccccgcctctcctccccggcgccgacgccggcggccgtggacgccgccgcccgcgccgctccttcccgccgccgccgccgccgccgcccgcgcctctcctccccggcgccgacgcggccggccgtggacgccgccgcccgcgccgctcctccccggcaccgacgctgccgtggacgccgccgctcgcgccgctcctccccggcgctgacgcaaccagccgtggacgccgccgcccgcgccggtcctccccggcgccgacaccgtcgtggacgccgctggccgcgccgctcctccccggcgcccctcctcggctcctccccttgttcgctttctctcttgtccccaaagctcacgagcctaacgagctggctcgagctttcaaacgagccgagccgagctgggcttctagctcgttaggataa

SEQ ID NO: 43024 - DNA, 774 bp, Oryza sativa
  Clone ID: PAT_MRT4530_46220C.1
atggaagctaagaatcaaggcaaggaggaggaggagaagcaatatcgaaaggaaagggacgtactatggacacgaatcgagctccgggaccgggaggaggagaaaaataccggccgccaggagcacgcgccgctcaatctcacagctcgggaggaggagaagagaaataccggccgccaggagcgcgcgccgcccaagggcacatcttctcgggaggaggaagaggtgaacgccggccgccaggagcactcggcggcgactggcactcatcgggaggaggaggaggcaaataccggccgccaggagcacgcggcggcggcgactacgggcaccaaccacaaccagaaccaggattgcatccaccggaaagaggggggagcacctacttccgaaggccaggagtatcaggaggaggagattggagaagcaaaccggaaggacagacaacaacaaggacatgggatgggttctcgcggcgacgggacgaggaaatggattggcggcacagtcacagaggagaagggattgccaatcctactgaatctcctaccgccgacatgcctccaggtcgactatgacgaacatccgagaaaggagagcatcgactatgacgacatccgagaagtagcctcgagcggccagaaatcatctatttgctgggaatcaggcgccggcaaggacaactcctcgaagatctaccacttggtgcgtcatccacaagacgaccaatcactcttttacggactgcaaggtggtgcaacacgtgagagctga

SEQ ID NO: 43025 - DNA, 342 bp, Oryza sativa
  Clone ID: PAT_MRT4530_46221C.1
atgggccccggcaaagccagcaagtccaccctactcgagatcctcactacccgcctccatcccttattgcctcccgaccagcttgtcagtgacgccccaccaccagcgctgacctacaccgcatcttcggctacccagcacgacgtcctcttcccgctgctcatcgtgtgcaagatgctacacttcaacagccacctctgccttggcacatgtgtctctcccaatggccttgcacaatgcctatgtcttacccttgccgatgccgccaccagcggcgagcttttcgacctgaatggtgcatttacggacccaaatattggatttacaagatcgtggacctaa

SEQ ID NO: 43026 - DNA, 953 bp, Oryza sativa
  Clone ID: PAT_MRT4530_46222C.1
gcaacaccgggacgggcgatccggaaggttctggaaccttctagaggctcgtaggagcctccggcggaacccctctcgcctcgcctcgcctccgatgggctcgaagccgccgccgccgccgcagcccagcgtctccttcaagctcgtcctcctcggcgacgggagagtaggcaaaacatctcttgtgctgcggtatgtgaatgatgtcttctcagacaaacaggaagcaactgttcaagcttcatatttgacaaagcgccttgttgttgaaggtgtgcctattacgctctctatctgggatacagctggacaagagaagttccatgcactaggccctatatactatcgtgatgcagacgctgctcttttagtatatgacatcacagacaatgatacttttcttcgtgtcacaaagtgggtgaaagagcttaagcaaatggcaaataaagatattgttatggccattgcagcaaataaaagtgacctggttagatcaaaacacatagacactaatgaagcagcaagctatgcagaaagtattggggcaactctctttgttacttctgccaaagctggtactgggattgatgatatcttcagtgacatagccaagagattattagagagaagaaaaaacagctccgatggcttgtcactggctcatccaaagaaaggcattttaatcgtcgacgatgaacctgagaaagaacctccaccaaagtgctgctcatagcgagattccaatgcaaatcacgtgggcataatgtcatagaaacctgcaattgatatgtgaaggatcaaatccttgcattaactttgctcctgctcttttggagctcaggagcaatgcaagtgtatactggttgattatttttagcttgtgtaaatactaaactcagttcatgaaattgttgtcaaatatagttgttcgatgatgacgattcgatatgccg

SEQ ID NO: 43027 - DNA, 357 bp, Oryza sativa
  Clone ID: PAT_MRT4530_46223C.1
tgagtgccgcttttgtgatgatttcgtccgagaccagccccttggatggtatgaagtaggggagatcaacccctctgtgggcccccactgtgagagctgcgcctttgtgagaataatgcatcgtgggtaccgagtggtcatgagcttgtctttgggagtgggttgcttacttgcgttgctgccacaccggggaaaggcacatcaccacccgggaaaaccactgtgctgtgatggtgtgtgtgatgattgagctgcttgttgctgttgatgcaatgccttgctgtgtgttggtggtgtgtgtctgaggcctgtgaaatgtggaaatgttggatgctggcctggagacatggaatatga

SEQ ID NO: 43028 - DNA, 2798 bp, Oryza sativa
  Clone ID: PAT_MRT4530_46224C.1
atggcggcagccgcagcacggcctgctcggtctccaccgggtccgaccgagatatctgcagaaatcacaacaccgaacagattaatgggaaggaaccaaatcaccccatgggttctgagcggggccggccggcgtaccgggtcgcggaggacgggcttggtgtcgtcggcgacggggcggaacggcggcttcttcttctttttcgtgggcgctccggaggaggaggacggggtcctacccgcgctggtggtggtggtgacagcggcggaggaggaggagaggattgagccggagaggattgagccggagaggattgagccggaggcggagaagaaggcccccgacaccggcgaggggctcgcgaaggcggcgtgggctctttcgcttccggctgacatggccgccacgggacagagaggctccactccggtctggaaggggatcgacggccggtacgtgcggttcgacaagggcagcgacgcgtacgacctccccgacggcgtccgcgtgccgcgctccacgcgcaccctggtgcgcaagctatgcgagctggggtggctgttccgcaaggtgcgggggttcatctccgacaacatcagtcgctctccctccgatgctgccaccgaggtcggcaccgttgctcaggccttctgctccgctctacaggaggagctctctgattactataagctcctcgccgttctcgagtcttactcgctgaatccgattcctacgcctggatctgattcaggggtgtctggtaattacctctctctgcggcgtcttgcagtttggctagctgagcctgcggtgaggatgcgcctaatggcggttttggttgatggatgccggggtttgagaggtggcgcaatggctggtgcgatccatgggcacgcacagcatggggatcccaccttccaggattttatgggccgcttgctgcggcgggtgtgctcaccgctgtttgaaatggtccgaagctgggtgttagaaggggagttggaggatgtgtttgcagaattcttcattgttgggcagccagtcaaggctgagtctctgtggcaggagggctatcttcttcagtctgatatgcttccagctttcatttctccagtactggcgcaaaggattcttagaaccgggaagtcaatcaactttcttaaagtttgctgtgatgataatggttgggcagatgctgctactgaggctgctgtctgtgttggcaccacaactagtcgaggtgggcttggttatgggcagattgatgctttggaggcactagtggttgaagcagccaagaggattgatcggcatttgatggatgtgatccataagcggtatcgattcaaagatcattgtcttgcgattaagaggtatttgcttcttgggcagggtgacttcgtccagtatctgatggatgttgttggccctgagttgtcagagccagcaaataggattagctccttccatttggctgggttgcttgagactgcgatccgagcatctaacgctcaatatgatgaccgtgacatcttggatcgcataaaggtaaagatgatggatcatggagatggtgatcgtggctgggatgtgttttccttggagtatgatgctagggttcctctggatacggtattcacagcttctgtcatgaagaggtacctcaagatttttaacttcctgtggaagcttaagcgtgtagaccattcattgactggaatctggaagacaatgaagcctaactgcattgtttcatctccattttacaaggagggaacaaacatcaggtctcagtttgtttcagttcttcgcaaatgccaagttctatttaatgaaatgaaccactttgtgaccaacttccagtactacattatgtttgaggtcctggaagtttcctgggctcgtttctcagaagaaatggattcagcaaaggatttagatgatcttctgttggcacatgataagtatctcacatcgattgtggagaagtctctccttggtgagagatcacatggaattctgaggaatctttttgcactttttgacatcattttgcaattccggagccatgctgatcggtggtttgagcggatatatgagttgcaactgaggggaaagggtaagccaaaatcaaaagcaaaagctaaatccaaggaagtggattcatgggtggatggtgggaggaaagccatgattcagctggctggggaacttttccggaaaatgggtgaagatttggatagcatcgcgaaagattatacttcttcacttgatgcatttatcgctcagttacctatgcaacagcatgttgatttgaaattcctactcttccgcttagacttcactgaatactacagtcgtgtttcgtctaacaaatgaagatgtgttcctgatgtggaaaaagtagggagttagatttactctttggtttggggtttgtgaggcattcttttgtacaccttagccctgctgattgatatttggtcatttgaaaggcatggtctgccactttcatttgtcctgaacctcctgttgaattcaccctttaagagtttgcccacgcatgccatgaagttggaggcttgctgccatgcattctgaacaactatagtgtacaaaattgatgtaagtttactttggttttcacttttagatgaactggtgtacatttcatgcacacattttccaccctgattttttagagttgcattgtgtgggggcttctccttaccagtttgtattcttcggttacaggagaatgaaaaatctcattttgctaaaaaaaaaaaaaaaaaaaa

SEQ ID NO: 43029 - DNA, 5528 bp, Oryza sativa
  Clone ID: PAT_MRT4530_46225C.1
ttcaaacccgaaacccaaaaccggcgagctgcgccgccgcggcgaccggcggagctcgcgactggcggcggcggcggctgctgctagtgccactccaagcctccgagcgtgatggaccccatcccctcccacatgtcgtcggtccaccccacctcctcgccgtcgacgccctccatctcgccgtgccaccacccgccgccgctcgcgtcgagggggctcttccgcttcctggtctcgcggcggcgatcccccgccgcgatgtcctcgatctccagccggacgccgccatcgccgtctcccgcggcctccgctctcggcacgggggctgagctgttgaaccgcctgaacagcgccgccgcgttgagggcgccgccgccggcgccgctcttccccgaggaggaggaggagcccaccgacgagaatgcgctcgccttctccttgacgatcgccttggtggtgactcggatgatctcccgcttcggcggttgcggcggcgagatggcctcctcctcctccttctccggcggcggcgagatcggcttcacttcctcatcgacaacgctgaaggattcaagggcaaatgtaagaagcgaaaaggatggggaaaaaaattggggacaatctgaattcgaggtagcttctttccctacttttgagttttgattcatgagcttgcggtacatccagaaggtgaacagcagctgtgccactgagatgatcaggaggatggccaccagcactggccagatgctccacttggtcctggagccatgctttctatggcgtcggcgacggtgcgaagccatcctgcggtagtgctgcatcgtgctgaggaaccgggctttcagggtgtccgtgtcggtgtcggcccagatggcggtatacacctttggtgcctgatgggagtcgttgtatactggggttttgtcatcggcaaggccaggtgctgcatttcttgaggatctgtttttcagggtagcttctagtttcttcgttgctgcagtggtatcaatgacatgagatttagggtcaattggcagtgatgaagagcgagtaatattcactgtttcagcatgtgggcgtttcaatgttttgacaactttctcagagatgttgctcgccatcttcttcatggatgcatctgtgtcgtcacttggattagtagtctgttgtttgcagtctaaggtggcagtcagtttgcaaggccctgatgcgcaagtagttttggtaacacctttcgctttaggttcttcattatttaagttggccgacaaacttgtgttgctgctctctgtctgaatgcaattgtcactgatagaagtagaagtactgctgccaacatctggtaaatgtgggtcatcatggagtaaactggaaggcaaatcttgagcagtgtcagtagcatgtactgtttgtgaatctgcagggtttaaggtattacaaatattggcaccagcagatttctttgatacttcagtttttattgcagtagcagaagcatcgatctcatttgctttgtgtagacgattctctgtgatcgcgctggatggatgatttgcagccttatcagcatcagaaacatccttttctatctggcttattgtttgcctggaacaagccaaactatcaggtgacttattctcagttccatgatagtctgttgctttagaattattctttgttgctttcataggtttgactgtttcgggaatgcttttctccacagaagtagttgacatcttatttgcagagtcatgaactctctcaatgtgcttacggtcattgatatttgcagatttatatcttccttcctttactttttctatgacagaaccagatgtgtcaactttctgcttactagatgcatgttctttgcttcgaaatgaatcgaggctcagatcttgatcagtttcagtaatgctgattgcttgagacccttctcggaccaacttatgacacattgtggcagcagattgaataacagaagtacctggagcagtttttgcaggaggatcccttttcatcttggatcccgctttatcattatgatcatgagtaacaacaggatgaagtttctccagtacggtgtcagatttagttgtatcatcaggaatcagaactactggatctgcaccttcctcttcctcatcctcatctccttcggggacttcttccagcttatgcaatcggcggccagtggatcttgtcatgaacctctccatattcctatccggtacattgtcttcactcctggcagttcctgtctccactaattttgagctgaagaagccatcgatttctgcatctcgatcaacgtttctgctctctattgatgcatcgtcaactttatcagaatctgccacactcctttctgcatcacggctttctcgaatactcgcgctgccctcaaagatcttgagactcttggaatagtatatgtaactagagtcattcgagtatccatgaacttgtgcaatgtccttgatcacgggccagtcaggaccatcaatcaagcacctcttcaacagttcagttgtgctcatgaattccagtgagcagagcttcgatgcatgtgcctggatccatctcggcatctcctgcaattcatgatcgaagatgtgcacctcttgcagcctgttgatgttgtccacagtctccagcgacggacaatggcatatgtcaagatcttcgagggaaggcaagttgcatattttcttcagattgggggtgttccaaacactcagttccctcagtgcagcaatgttctcaacagcctcaaggctctccatgtccacaatgcgcagctcagtcatggatgtcacatgcctgaggccatctggtaagcatctcagcttggggcagctttcaagctgcagagcctgcagagatggcaacgcccctgcctcaatgctcgtccacgtctccagattatgcaaaccttgcaggtgcaggtcttccagctttggaaatggtacctgatgggagttgtctgtgtccataagctgagcatcgatatccttcagcgctgaagaatcggcaatgcacaaagatctcaactctggcagacgacctaatagaggaaaagattggcagaaattgcatccggttatattcagtcggaggagatttggcaggcaggtcgatgacagccatgtcgggaactttgtcccaaagtagtttgcaatcttcagcgactcgaggcctcgtggcggtttcagctcttggaagatatcctctatatttcggaccactgtcggtatctgtaatgtcttgacggtgccgctgcacgacagttcaagctctctgagtcctgtcttggcatgaagagctacttcagctgccttggactgactagtggccttctcaagcctcttaacatggagtgtccttagctgacacaagttcttgagctcatccagaggccacccactcctatcctgtgcggtatcctgtacggtacgcgcctctttgctcgtcacggtgaagcatcggaatgatgtgaggtttctgagatggcctactctgaatgccgcgtctttgatcacagtacctgtaagatcaaggtctctgagccccttcagatgctctatcccttttggcaacacatgcaatgccttgcactctcttagcagcaagaatttgaggctccacagattgcaaatggtttctggaagcgccttgatccttgtctgggacaggttcaagaacctcaggtataacagattccccaaagtctctggaatgacctccattgcagtttcagtaaggtccaagactttcaggtatagcagccttgtaaagatgttgctcccaattgtcagtggatttctctggagcagcagcgttcttacaccctcaagcttcagaacctcctctggtattgcagcaaggtggttcctcggaaacgagacgtgccgtggcgcgaagggggcgtcgccgtcgctgggcagccgctgcgcctgcgcatcgccggtgaggttctcgccatgggagagcacctgcgccatggaccgcagcgtgtcgtgcatcgtgcaccgctcgacgcagccgtgccggtcggcctccgccggctggaggaggttccttccgatgagctcgtcgtagtactcctcggccacctcctcgacgccggcgtctcccctgatctgcacgaagccctcggcgatccactgctgcaccagcgatctcctgtcgacggcgaagtccgagaggaacagcgagcagtagaggaagcactgcttcaggtggcacggcatgtcgtcgtaacagaggtacagcggcttcatggcgtcgtcggggagccccttcaccttccacgccgggctcgcgtccaccaccgcccactcctcggcgatcgcctcccgcgtcctcagaacgccggcgaccgccctgatcgccagagggacgccgccgcacttgccgacgatcctccggccgacgcccctcagcgccgcgccgccgtcgtcggcgacgcacgccgccacgcggagcagcgcccagccgtcgtcctcgccgagcctgttcacgcggtggacgtggccggcgcccatgtcccgagcgacgccggcggtgaccgcggtgaccagcaccttgctgccgcggccgccgcgctcgagtagccgcctcaccaactcctcccactcgccgccgttcctcacctcgtcgagcacgagcaagaacctcctgttcgccaccagggcggccagcattctctccagctcggcgacggtctcggcgcccgtcgtggcgccgccgccgtcaacgacggcctcgacgacctgcgagagcagcgcggcctctcgcttgccgtcctcgacgcaacccctggagacgtgaacccatgacctcgtctcgaatcttcgcttcaccctctcgctgtcgaacaccaccttcgccagtgtggtcttgccaatgccgtcggggccgtagatggccacgacgccgccgctgtctggctgcgtcagccggcgcacgaggcggcgcgcgtcgtcctccattgccgtgccgacgatgtcgatgtcggtgggttcggatttccggtgcctcaggatcttccgtggatggtcgtcagtgtgatcggcgacggatgcctggagctgcagctgccgctgctccttgatgatggacttgagcttctggctgacgttcttgaggtcggcggcgatgtcgcggcgcggctcggccacgtcgcagcaggtggacagcagccatggcagtgcctggttatgctgctgcagctgctgctcccggcccctcgtcaggcggcgcgccgtggccctgcaccggtcgacggcgacgtcggcctcgtacgccgcggcgcgcaccctggcgagccaccgcgccgcggcgtcgctcccgcgcgccacccgcgcctcggcgtcgcgcaccgcggcgcccaccttctccagcctcgcccccagcttcctcgcctccgcctccacgcccagctgccgcgccacctcccccttcaccacgctgcgccactgcgccgcggtgtccggcacgaacgcgccgagcaccacggccat

SEQ ID NO: 43030 - DNA, 1448 bp, Oryza sativa
  Clone ID: PAT_MRT4530_46226C.1
gcgggcggcgcgacggccttcgtggatggcggcggcggcgcatcctggcgagggcggccgggatccggcctccctaggccagatctagccgggaagctgccgggctagcggcggctgcggctggaggtggcgcagcgcggaggctgcggcgcgtcagctgcggctgcacggcgtcggcatcggcggcgctggaggtggtgcgacgtccgggcagctggacgacagcggtggtgccggtgccggatgcggtgcggtggccgcgctgctggacaccggtgccggaggcggcgaggcggccgggcggctggaggcatgaccggcgatgctgggcggcccgggtggccattggtgggcggcgaggtggcggcggagcggtggcttcggcgaggccgccattaaacctggcggcagggtagatcgcgctggcggcgaggtcgtcttccttgtgggtggctaggcgttcactgtgtttggggagctcctccccttcttcgtggggagcttttaggcacggtggaggcgttggccggcatacagggaagactcagtttgccaaagcgagcttgttcccgttccggtcccataggtcggattcgacatggaggccgacggacggcgtggcggaggtggcctgggtcagcgtgcaagggagtggaggcagggtaagggcgctggcggcggggtcgtcttccttgtggtcggccaggctaatcctgtttggggaactcctctccttctctgtggggagcttctttgcaggctagaggcggtggtcagtctacaaggaaaactcaggttgccgaggcaatgttgttccttgtctggactcccttgggccagattcgacggggatgccggcgtgcagcgtggcggaggcggcctgggtcagcgcgctggcgaaggtgggtgctgtggcagtcttgtcattggcaggactagaaactggccggcggaggggcgtcggtcggatgtggcggaagccatgtgccgccgatgtttagatggtggacttagattgggcgacgaaccacggcggtaggggttccgagtgaaagcttagcccaatcctttgggctaacagtgactacgccttcgggcgtggtaaccctcctgaaggcattgttgaggtacccctccctcggcgaggagcactgggtgaaaactagtccagttctttggacggatgacgattgcgtctttcgccgttgcgaccctcgtgagggcgttgtttttgtgttttcgtgtcgtggtgatgttgttggctcggtggcgatcggtctcgcatagcgatggccggttcggtgcttggcttcctctctgtagcgtgtgtttggacggttggcacatggttcaaccgttcagggcgtgtgttctagtgcacatccttgtaaaacttttagcgggccgcggggggcgggggggtgaatagcgggggggggatatagtgt

SEQ ID NO: 43031 - DNA, 162 bp, Oryza sativa
  Clone ID: PAT_MRT4530_46227C.1
atggcgcctctcacaaagttgtccacaatggaatgctgggtcctcctagagctggcatatccaaatcatccactaactacaaaagcaactctaagtatttttaaggtcagcatgttaggtgcactacagcgtttcagacatccattcccatcggaccagtaa

SEQ ID NO: 43032 - DNA, 285 bp, Oryza sativa
  unsure (1)..(285): unsure at all n locations
  Clone ID: PAT_MRT4530_46228C.1
ngtgcctgcttccccaatctgcacaagtacataattctttcttcatctccatttaatctttcttctaggcataaagagtttttgctattggntcatggcgggcaaagtaggagggcacatnccaaggtttggagattggaagagcagtgatggtggcaccccntacaccgtcttctttgacgatgcccgcaagaggaagaatgcaggtggtgtggtgcctcctccttctctggctcgtggcgactccgcacctcctccttnagnccatagaacacctcctcacgg

SEQ ID NO: 43033 - DNA, 350 bp, Oryza sativa
  Clone ID: PAT_MRT4530_46229C.1
tcacccctacctaaacctggaatccctaaaaccggccccccttttttttttttttttaacaaattcacaccctggtcaaggcctatataatttattataggtggcccctccatcaaaatgggccatggataatattcaaccaagggggcgtttaattaataaacttttaattaaattatattgcccatggaccaaatactactccattagttccatccatgagatgatccattttggccagaaaacaacttggtagttccttttgcccctcaaaccgccttttttggggttgttttcccccccgatcggcccaaggaacttgggccttaaaacccaaaggaggggcccag

SEQ ID NO: 43034 - DNA, 894 bp, Oryza sativa
  Clone ID: PAT_MRT4530_4622C.1
atgggtcccacatcgccaccaccacggactccgccgccgctcccgccaccgccacatcccttgccggtgatccagatgaggttccgcggtgtacaggtggatctcgtgtacgccggccctcacggcatccgcgtggccgacgagatcctgcggcttgtcccggacaccgcggcgttccgcaccatgctgcggtgcgtgaagcactgggctaaggcgcggggcgtctactccaacgtcgcaggcttcctcggcggcatcggctgggctatcctcgtggcgcgcgtgtgccagctctaccccaacacctccccagcatgctgctcccgcgcttcttccgcgtctttgcgcgacgccaccctgcgcgtcaccaccgagcagctcgccgtcggcgacgacgtctgccaggagatcgtcaaggccggcgccatgtgggtgggctgggtggagtcgcggttgaggcagctgtcggccagggtggaggcggacacgtccggggtgctgctctgccaccttcacccgcaagccggcggcggcggcgatgtcctggccgtcggcgtctcagcgagggcgacgatgttggggaagtccatggccacggcgtcctccgtggtgaatcagtcctcgttgcggaggagctccttgctgccggcggcgaccatccccggcgtaggcgtggcagtgcacggagcatgcggcggcgtcgacggcgaggtccgcctcctgagcgccgtcagccttcggccttcccgagccttggcacggcggacctcacgtggtcctctcccaccagggactgagagagaggatagagataacagatacaggtgccagccaaagagccaagtccgccgcttcgcgaaacgccacggggatgccggcgagcgaggccaataa

SEQ ID NO: 43035 - DNA, 171 bp, Oryza sativa
  unsure (1)..(171): unsure at all n locations
  Clone ID: PAT_MRT4530_46230C.1
aaagaagattattcataatactgtcttggggagattaagcatacactcctaaatattacaagctctcactttattatatgggctacaaacttacaataaacataaaaccctattgtcgatctcagcatattctgaacctttagaacaggcaagacgnggcataccaaatta

SEQ ID NO: 43036 - DNA, 810 bp, Oryza sativa
  Clone ID: PAT_MRT4530_46231C.1
atgtcctcctcctcctccggctggcaccactcctctcgcccgcccccgccgcccccctccggcgccgacaaggatcagctgttccgggggctggaggcggcgctcggcacgacgttcagctcggagccgctcgcgccgccgccgcagccgatgatcctcgtcatcagcgggcccagcggcgtcggcaaggacgctgtcatccagaggctgcaagaagagagggaggggatgcatttcgttgtcaccgcgacaagcagagcgaagcggcccggtgaagttgatgggaaggactattacttcgtcaccaaggaggagttcctcacgatgattgaaaggaaggagttgctcgagtacgcacttgtctatggggagtataaggggatccccaagcagcaggtgtttccccctttttctgttagagatcttatcgaatggggagagatccgtgattacatggcgaaaggttatgatattgtcttgagagtggacattcaaggagcagcaaccttgagagagattcttggcgaatcagcaattttcatctttttggttgcagagagtgaagaggcacttgtcaaaaggctaattcaccgcaaaacagaaacatcagatatgcttcttgtcagagttgcaacggccagagaagaggtgaaacgcatgaacaattttgattatgtagttgtcaattctgaagggaatcttgagggggctgttaaacaggtggagtctatcattgatgctgagaaggctaaggcagaacctaatgatttacaacactatgaccacatggttaacctcgtgccgaaatag

SEQ ID NO: 43037 - DNA, 452 bp, Oryza sativa
  Clone ID: PAT_MRT4530_46232C.1
gacccacgcgtccggcgccctccctccgtcggatctggaggtggtgcatgcggcagtggtccggcagcaggaggtggtggtgacccggcggcggcagtggtgaccggcagtggtggcgccctcctttgatttttcttgatttttgttattagtgaaagattgaagctgacgcatcgagccatcttttatgtagtttgtgaatgatttttgtgaaagattcaatgttagtgaaagattgttaggggggctcctagctagcgcgtgctcgctgctagcgagcactcctcccctattaactacctctattaacactattagttaatatatacttaactacctctattagttaatctacttaacacctatgatagcagttaggaaagattgtggagatttttgtacttatagattggaaatttttaaagtagattttaaaactttcgattttattt

SEQ ID NO: 43038 - DNA, 336 bp, Oryza sativa
  Clone ID: PAT_MRT4530_46233C.1
atggatggctgggcccacgggtggggcattggtggttgcggacttgttgcagtgggcggctttcgcttttgcagatttgaccgtcacgactccgtctccgaggatccggccagcacaactagcggcaagaggccggtgtgggcgacggcagtagtcggccagagggaggagtcgtggcgagcgacagcaggcgtgggtgatctcgacggcgggaggcaggtgagcacggcgtggaaacggtatgccggcgagcctgccatggtgggagggcacagcggagtcagtccttttgcggcggcagcttgccgcaacaagatggacacgttggacgagtga

SEQ ID NO: 43039 - DNA, 258 bp, Oryza sativa
  Clone ID: PAT_MRT4530_46234C.1
atgaagttaagcatgaaacgacccccgtacaaccacacttctcgtatgggtatagacttcccgggtgcgctagaactcctctcactgctagaaaccatgtacgcctagagtgtatgaggatgtaaagttcatggagcgggtactgccaatgcgaggttatcgaaaggctttgccgtgatacgtctcatgtgttgggacgaggctcatgtgttgggcagtcgcggagtgcgggtaaagtgtacatccactgtagtgtga

SEQ ID NO: 43040 - DNA, 236 bp, Oryza sativa
  Clone ID: PAT_MRT4530_46235C.1
acacacccttgtcaagtccgttttcacgcaccggattattcggaatatttccaaaacaaaacacatccgaatttcccacagcaaaacataactgcaaaagcaggctgcatctgcgtaagggtgaggaaccaattttaaaattttctcggatttttcagaatatttccaaaataaaacaaatccgaatttcacacagcaaaacataactgcaaaagcaggctgcatctattcgatgc

SEQ ID NO: 43041 - DNA, 481 bp, Oryza sativa
  unsure (1)..(481): unsure at all n locations
  Clone ID: PAT_MRT4530_46236C.1
aaccaataatgagttatctattttaaggaacaatgtcagataaatatgtaaacataatatatgatacaatcatctctattattgcctctaggacatatcaccaacaggtctgcaatgcagtgatgatgacacctgtgcaaaatatttcagtcagggaactcaggatcactaaaagatgtcgatgttgcctctctggaatgtatgacatctcacttctcaggaaggattggagccggtgccgccatcagaaatcacaacggccagatttctgtgtcattgagatgctatatgtatcggaagacttcagataaaaaaatatcttctcatctccaggttactgaacaacggagagtcattctactcctatatgctacttttaactttcactagctagtctgtatgattgatttgtttccttttttttttgcacttacatttgttaatgtatatgtgtgtatatattangatagaaggccatttt

SEQ ID NO: 43042 - DNA, 609 bp, Oryza sativa
  Clone ID: PAT_MRT4530_46237C.1
aggatcccgtcaaggatgtcgcatttggttgatccatctcggaggacatcctctcacaccatggtgctgcacgacgttgtcatgctggagaaccagatccctctgtttctgctcctcaaggcgacggaaatgcgaggctcgtcgcgtgcgacagcggaatctgtcctgagctccgtcctgtccggggcctatagatggccatctgggccgcccggcacggcccggcccaggaccggccgtgcctgggccgaggcttgtcggggcccggccgatgcaccgggccgtgccgtgccagcccacgggccgcacacatggcccaggcacggctcaacacgacttgggctgtgtcgggccggcccgaaggcacgacggcccatctccctatactttgtgtgtcgggcctagcctgccggcccatcgtgccgggctggcccgatcgtgccgggccatcccagtgtgccggtggggaggcccaggcacagtccggcagtcgggccgggctacttgggccaagacaaaatgacgtactgtgggccaggccttcgggcctcgggccttatggccatctacagtaagacctcgtccttaaattttgttgatatgaaaatg

SEQ ID NO: 43043 - DNA, 298 bp, Oryza sativa
  unsure (1)..(298): unsure at all n locations
  Clone ID: PAT_MRT4530_46238C.1
cttattttaaaattgaaaaaaaaattgatttgtttattttattaattttggatccagaagaaatagtctctctttggtccatatattagatgaataccctcgatacatatgaaataatatctaatggaaatcagacaagttgatttgtattttgtattctatctatgctctatatattaaataggaagttcttattctttttgatctttggaaagatcgaacacaagatgctcctatttctttatttcggcatgaatcgtatgcttacgancataacgacaaaattttcttaattcta

SEQ ID NO: 43044 - DNA, 302 bp, Oryza sativa
  unsure (1)..(302): unsure at all n locations
  Clone ID: PAT_MRT4530_46239C.1
cccacgcgtccgtggtttactctctctagtagctagttttcctctgctgctgaacaggctggagttcatcaaggatcacatcctgaagctggagccaacaagcacacagaggtggaagaagagcaagaagaccggctccgagccgatacaaggtaggagcgagcagcgttagtgcaacactgtcatcatatactanggtaatcaatatggtgacagtgagagaagagatacgcanagggccatggacagagcangaggacctgcaactggtatgcactgtcccgatgttcggtgaacgtcgt

SEQ ID NO: 43045 - DNA, 338 bp, Oryza sativa
  Clone ID: PAT_MRT4530_4623C.1
ttggtttttttaaggttaggggtataatctcgtttaattatcatgcaactaattggcccccaaccggggattaaacggttttgttccgggtctccgggcactagaaatctttatggttacttaaagggggagactatcggcatggaaattttttaatagactcctataaaaattgatggctttggagggggccatcagggctctaatatcttggtgctatttaccatctccataagggggagaacactggattccatgacacattaagaggccgggcgttatttaaatagagtcttggaggtgaggaaaccttttccatcataccttgaagatgagga

SEQ ID NO: 43046 - DNA, 361 bp, Oryza sativa
  Clone ID: PAT_MRT4530_46240C.1
ccaaccaaaacataggagggaaaaataatttttcaaaaaggagggaagcaactttccttctttaaccaatacaaaagggtaagcaataacagaaaacaaatcctcctcctcctatagggaaaaaattcaaacacaatacccttaaaaggacttaatattaggaaaggtagcgggcaaggagcaaaaaaggcaaaaggggggaagggtaaagaatcacaatgctgagccagaggaggaaacaaaacaccataatgggcacagagcaaaaagcccctcaaaagggagaacttttaggaagaaggctttcacccaattgagggggcttaaccaccttcaagggagaagtctggggagaaacctt

SEQ ID NO: 43047 - DNA, 164 bp, Oryza sativa
  Clone ID: PAT_MRT4530_46241C.1
gagggacgaaatgggatgaaactcagagtgtacattatatttatatgcctggcacgcatgtagggcgatggcgctatggagtacctgagtgagatcaccatgtatatttgatgatccaattcccaagactagcctaggggaatccaatccaaacattgtaatcg

SEQ ID NO: 43048 - DNA, 489 bp, Oryza sativa
  Clone ID: PAT_MRT4530_46242C.1
atggccgcctgttgcagcttgggttgcctagtttgcgggctcctcggtgcagctcttttcctgggttgcttggaaccagaggggttgccacttggccgtctactcgatcggcgggtcgcttacgcgaacctgctgaccgacgagctcgagtactcggatttgaaagcagaaacatcaggcaatgaacatttcaatgctcaagtactctctatcttgctcgcactcgcacatctgcaaggtcctagccgtgcaattcttctattggataaccccttatttgagattgacctcaaagtgaagggtcaaggatcaccatctgaagacaaggctttaagctactatgtgtttccatcggaatgtcatcgccatcgattctccatctgcacaggttttcaagaaacgaaaaacgatgatgagccaacactctggcatggatattcaaatgccacgtcagtcaagccacctatatatactgctataggaccttga

SEQ ID NO: 43049 - DNA, 1226 bp, Oryza sativa
  Clone ID: PAT_MRT4530_46243C.1
gctgcaggttttttttttttcttgtggatccccgcgcgcctggctctttttcggtggcctgtttagtggtccattcacgacggattcggcccattagctccataataatgatttcgataaactgtgaatctaagacaaaatgtatacactgcgataactattgcgataaaatctaaggtgatcatactaacttaccgcctaacctaaccaggtagctatagcttgtcaggcagatgcagcgaagcttctgttgtacaacgatgaagctacagatcgaagactttttctcatttcccctccagcccatagatggcgacggtgagcaccttggcgccggggttgtggtcgtggcaagcgtccagcttgggctcgcactccgggaactttcccagctccagtagtgcgacagcttgggcgggggcgaggcggaggagatggttgagcgtgccgcagaggtccgccacgacgtccccgttgctacgggtgagcccgcaccacgcctggctctcggcggttttgcttaatgcgagggcataaacatccttcttctttgctgatgtagcttcactcaccattttcactgccgctgacagaggatgtccctgcgtcatcaattctctgagttcatgctcaaggaaatcctcagatggagtttcatcagcaaatgtaaattcatcagttggcaaaccagatgcagaaagagcagctattgcagcagacggcccaggaatggggataacagggattccctcagtagcacatagtctagccagttccatgccaggatcactaattccaggagtaccagcatcactaatcaatgcaactgcttccccttcatgaagtctctttaagatattaggctctctttcacgctcattaaacttatgaaagctgagaagaggtgtcttgatgttataatgttgaagtagctttccagaatgccttgtgtcttctgatagtatgacatcagcacatttgaggatacgcaatgcccttaaggtgatatcctcgaggttcccgattggcgttgccacaagatacagcccggaatccaaatccggttccgaggcaggtgactccggcgagctgccagaggcggcggcggtggagaggcggccggcgagcggagccgtcgcagtcgtgacgcggagagggaggaaggggaggcggcggggtgccgttaggttcagggcgagggcctggaggcggagcagcgacgccat

SEQ ID NO: 43050 - DNA, 657 bp, Oryza sativa
  Clone ID: PAT_MRT4530_46244C.1
ccggccgggacgccgcagccgcacaagacttgatcttcttcttcttcttcttcttcctccaggctccagtggcgatggcgaccatgctctgctccttcacgcccgccaccagggctccgctccttcgcacttcctcctcctcttccctcccacaccgccgggccccggctcagacggcgagacgatggcaactccgacggtgccatgacaacgcgcgtacaaaagaaacgtgagaaacgcggccacgtgaacagtcgaaaacggaagaatcggtaaacaccacaagaaccccggaggtcgcggtaacgccggaaggatgcaccaccaccgaatgctgtacgacaaggaccacccgcgcatacatcggaaaggccgacatgcgctacttccacaagctcagcaagaggctgcactgccccgccgtcaacgtagagtgcctcaggttcatggagaccaccgacaaggacggcgaggccggcgccggcaaggcccccgtcatcgacgtcacccagttcggctacaccaaggtgctcggcaaggggatgcttcccccgcagaggtccatcgtcgacaaggtcaagctcatctcctaggtcgccgagaaagagatcaaggacgccggaggcgccgatctcctcagcgcctaggtactacata

SEQ ID NO: 43051 - DNA, 370 bp, Oryza sativa
  unsure (1)..(370): unsure at all n locations
  Clone ID: PAT_MRT4530_46245C.1
cgaaaaacccccccgagagtatctggccaaacataaacagctggaacgctggcgtactaccaggcggcancggtgacgcacccgcgcccgcgcccaaccaacccactcggtctcggtctaactccaccactatggccgncgctgncagactcgtctccaccactctcgcgcgntcctcctcctccctcgccgtcggcgtgcgncgtcccgaccttctcgnctcntcgncgcgtggtttttcaagcatggcagattcaattcaaaggagcggctctgncgatattacgcggggttntatttctgtggaccttattngcctgctttctaccagcttnaccaaaggagtatttttcanagctatccatttaat

SEQ ID NO: 43052 - DNA, 278 bp, Oryza sativa
  Clone ID: PAT_MRT4530_46246C.1
tcaaacccccgcgatgatgaatttcctcaaaactgcaaaagctatgatcctaattcagtggcggtactcggggcggagggcggtgatcactcccatgttatactagggcacccgtacaccggccctacaggcaatgacttacacgcggcctatccaagtacccatataaagcgatccgcaaagactcatcgaaaaagacggcgaagaagtcgagggtcaagtgcttcctcaaactcgttaacttcacacacatcatacccactacgtacacctcttac

SEQ ID NO: 43053 - DNA, 627 bp, Oryza sativa
  Clone ID: PAT_MRT4530_46247C.1
atggcgaggcccacgatgctggcgtgctgcaagctctacatctccgagagccgcaacgccgccgccctgcgcgccatcgagcaggcggcgtgcggcggcggcgccgtcgtcgtcaaccgcttcaccgacgacgcctacaaccgggggaggacgctggcctccatcaggaggcagctcggctacttcaagcccaactcctccggcgaccaatggcggggagcgccggagacggacgccctgcccgtcgcaccggacgccgggccggagaggtcgccgagatccaagggcgtggtggtcgtcggcgccaccggctgggtcgacaactacaacgtgcccgtccgcaccggcgacgtggaggcggcgaggcggatcgcccgcgccgtcagcgagcgcggcggcgggctcccgtccgtgcaggcgatggggctcgcgcacggcggcggcgtcgtggaggtcgcctgcaacctgctcgacccggcgagggtcggggccgagcaggtgcagggcatggtggagcggctcgccgccggcgagggcctctccgtcggcaagggatatttcactgattattcgcaggataaaatcgtcgagttatacttcaaatcagcagctaacactgagggttaa

SEQ ID NO: 43054 - DNA, 261 bp, Oryza sativa
  unsure (1)..(261): unsure at all n locations
  Clone ID: PAT_MRT4530_46248C.1
gcggccccccctttttttatgtttttctccccccatagagagagcctgtcccattgcggcccccaaaatcattcacttccatcccatacaagacacactcgttattaagtatccaccttttcgaggccagtaataaaaacacctcacagnccaaacaagtnaaatccttctacacaagatagataaaagattacctagaatccacaagcagagcgncggtgcaaggccctaataggattgactgataccagccccatctgg

SEQ ID NO: 43055 - DNA, 912 bp, Oryza sativa
  Clone ID: PAT_MRT4530_46249C.1
atggcgaggcccacgacgttgctggcgtgctgcaagctctacatctccgagagccgcaacgacgccgccctgcgcgccatcgagcaggcggcgcgcggcggcggcggcggcgccgtcgtcgtcaaccgcttcaccgacgacgcctacaaccgggtgggctacacgctcgtcgcgccgctcaccccctcaccggcgccgccgccgctccggcacgccgtgctcggcatggtcagggcggcgctggaggccatcgacttcggcgcccacgccggcacgcacccgcgcctcggcgccgtcgaccacatctgcttccaccccctcgcccatgcctccctccgccacgtcgccgacctcgccggagccgtggccgccgacatcggagacgagctccaagtgccgacgtttctgtacggcgcggcgcaccgggaggggaggacgctggcctccatcaggaggcagctcggctacttcaagcccaactcctccggcgaccaatggcggggagcgccggagacggacgccctgcccgtcgcccctgacgccgggccggagaggccgccgagatccaagggcgtggtggtcgtcggcgccaccagctgggtcgacaactacaacgtgcccgtccacaccggcgacgtggaggcggcgaggcggatcgcccgcgccgtcagcgagcgcggcggcgggctcccgtccgtgcaggcgatggggctcgcgcacggcggcggcgtcgtggaggtcgcctgcaacctgctcgacccggcgagggtcggggccgagcaggtgcagggcatggtggagcggctcgccgccggcgagggcctctccgtcggcaagggatatttcactgatttttcccaggataaaatcgtcgacttatacttcagatcagcagccaacactgagggttaa

SEQ ID NO: 43056 - DNA, 225 bp, Oryza sativa
  Clone ID: PAT_MRT4530_4624C.1
cccggtcgaccccgcgtccgctcgcaccctccactacgcctttctcacgcgtcgtcggcagcataaccatgacagcagttgatttagttttggtgaatgacatctagggtgtgttgttcaatgaatgagatagcaattaccgtttgtctgtcaaacaagtattgagtgaatataacaatgtacatgtattgctaatatcactctgttcaaggaattatattattt

SEQ ID NO: 43057 - DNA, 4062 bp, Oryza sativa
  Clone ID: PAT_MRT4530_46250C.1
atgtcttccaccgtcaccaacgtcgccgacgattggaagaagggtctcgctgaggtcctcgaccgcttggactccatccgcggcaagctctccgacctcgacaatgaacagcaggcgcaccacatcgccatccagcgtttggaacgcgctggccgcgatcgctcgccgcgccgtaacaatcgcgaccgtgacgacgaccacgacaatgacggccgccgcggtgatcgtccgccacgctaccacaagattgactttcccaaattcaacggccaaggtgacccactccatttcctcaatcgctgtgaacaattcttccagggccagcgcacgccggaggaggagaaagtttggctcgcatcctaccacctgctcgacggtgctcggcagtggtatatgcgcatcgaacgcgatttgggcacaccgacatggcgacgcttctccgacttgctcaatctccattttgggccgccgttacgccaggcgcctttgggcaaactcgccgcctgccgacgcaagactaaggtggccgcctacatcgaccgcttcctcgacttgctcgctcgcgctggccctctcacggaggagcagcaagtagacctcttcaccaccggactccaagaaccactcagcatcgacgcgtcctcttcagcggcgccgaccccgtcgcaaccggatgcagcttcctcggtgggacaagcgtccacacaggttgcaggccgcacggttcgccgcctgtcccagtccgagatggacgaacgccgacgcaaaggattgtgcttcaactgcgacgagctctacgcccgtggccacaaaaaggtttgcaaacgcctattccttcttgatttggcttatgatgatgatgatgacgaggtggaaggcgctgcaccggctgtcgaaccggagacgcttcgcatctctctgcatgcggtcaccggcgtccgtccgtccaacgccatgcatctccatgtccgcttgggcgacgccaccctccacgcgctcgtcgacacggggtcgacacacaacttcctgtcccaggaggccgcagcacgggtgcacttgccgctcgtccaacgcgctggcctgcgcgtgacagtcgccaacggcgacaaggtgccctcgccagggatgttccaggacgcgcgcatctccattgacaccgaggtgttcatcaccgacctctacgtccttccattgggcggctacgacctcgtcctcggcatgcaatggttgtcaacgctgggccagatactatgggactttggccaacttaccatgtctttttggcacaaagatcacatggttctgtggcgtggcctgcccacgggcgcttcaccggctgcgcacgtcgccaccacccgcgacctgctcgacgacctcctcaccgagttcgccgacgtcttcgccacgccatccggccttccgccaccacgccatcaagaccaccgcatcactttgctgcccgacaccgcgcccgtggcggtccgaccttaccgctactcggcgcgccacaaggacgaactggaacgccagtgccgcgacatggaggcccaaggcatcatccgccgcagctcgtctgccttctcctcgccggtcctcttggtcaagaaggccgacgggtcgtggcgcttctgcgtcgactacagggcgctcaacagccgcactgtcaaggacaaattccccataccggtggtcgacgagctcttggatgaactccacggcgcgcgattcttctccaagctggacctccgctctggttatcaccaggtacggatgcgcgacgccgacgttgagaagacggcattccgcacccacgacggcctctacgagttcttggtgatgccctttgggctgaccaacgcaccggcgacattccaatccctgatgaacgaggtacttgagcccttccttcgccggtttgtgctcgtgtttttcgacgatatattgatctacagcccgtcgtggtcatcgcacctacaacatctgcgcgccgtcttcaacacgctccgcgcccacaagctgttcgtcaagcggtcgaagtgctccttcggggacacctcggtcgcttatttgggccacgtcgtctccggccagggcgtcgccatggacgcctccaaggtgcaggcagtggtggactggcctcgcccctgctccgcgcgagctctccggggcttcctaggccttgcggggtactaccgcaagttcatcaacgatttcggcgccgtggcggctcccctgacacgcctgctcaagaaggacggcttcttgtggtcgccggaagccgaggtagcgtttggacgtctcaaaaaggcgctcaccacggcgcccgtcctcgccctgccggacttcgatcagccgttcatcgtggagtgcgacgcatcaggcacgggcttcggcgcagtgctgcatcaggatggaggacctattgcctatttcagccgcgcctttgcgccacgccaccacgccctggcggcctatgagcgggagctcatcgggttggttcaagcagtccgacactggcggccgtacctttggggtcgccggtttgtcgtcaagaccgatcacttcagcttgaagtacctgctggaccagcggctagccacgctcccgcaacaccactgggtcggcaagctattgggctttgatttcgaggtcgcctacaagccggggcggcagaacacggtggcggacgcgctgtcccgccgcgacgagccggctgcctcgctttgcgccatcaccacgccggtgtttgactggctacaggatctgcacaccgccaacgacacggaccccgcgctggtcgccctccgggaccagattctggccggcaacaggacagcaccatgggcactcaccgacggcatcgtcaccttcaagcagcggatgtacattcccccggcgtcagcccttctccagacggccctggcaatggtgcacgatgacaagcacgaaggcatccagaagaccttgcatcgtctccgccgcgagttccatacgccgggtgaccgccgtgtggtacaggaattcgtcaaggcttgcgccgtctgccagcggaacaagacggaacatctccaccccgccggcctgctcctgccactgccggtgccgtcggccgtctggtccgatgtgtccatggacttcgtggaaggatttcctcgcgtcgcaggcaagtccgtcatcctcaccgtcgtcgaccggttctccaagtacgcgcacttcatcacgctgtcgcacccatactccgccgagtctgtggcgcgcgccttctacaccgacatcgtacgtctgcacggcatcccaacatcgatcgtgtccgaccgggatccggtgttcacttcgacattctggaatgccctcttcgcggccacaggcaccaagctgcacatgtcatcggcgttcctcgacgacattcgctaccggctggagcaggcccagcagcatgcaaagaagttctacgaccgccaccatcgggagctgcaatttgtggtgggcgactgggtttggctccgtcttcgccatcgcgttccggcatcattagcaactccggtaaaaggcaagcttgggccgcgctattatggaccatacaaggtactggaaattatcaacaaggtggcttatcgcctcgctctgccggctggggcgcgcctgcatgatgtgttccatgtcggtcttctcaagccgttcgtcggcacgccgccgacgtctccaccggcgctgccctcgacactacacggagcggcgttgcctcagccagcacaagtactcaagtctcgtatggctcgtggggtgcatcagctgctcgttcgttgggacggtctgccggcatctgcaacgtcgtgggaagacttggacgatttccgtactcgctatcccgcattccagctcgcggacgagctatttgtcgaggaggggagagatgttatgtggggcattcagtatcagcgccggaaccgacgccaacagccagagcaggcgccgtgggacaccaaggaagaacttggtgtcaatggttttaagaaaggagaggtcaatcctgtatgctcatttctgatatatggaaactag

SEQ ID NO: 43058 - DNA, 426 bp, Oryza sativa
  Clone ID: PAT_MRT4530_46251C.1
tcgtcttcgtcctcttccgatacctcacctcaccatacagctgctttctctctctctctccatccacccgaagcagaatccccaaaacaacagcgagagaaaaaaaattcacgcggcgaagccaaaattttttgttgatttcgatttggacataaaccctagctccaatctccccatcgccgcgtcggccccgaacccgtgcgcccccccatcgctcgctgaatcgaagggcgcctaccagtcgattcccccaagacgagattggctgccggcgacgacgagaggagcagctcccttggcagcggcggcggaggaggcgccagattcaccgcccccaaggtccgcacgcgcgataagggcgcgctcgtggccctctgattcgaggagggttgctggtgcgtagacgtggagccttctctgaggaga

SEQ ID NO: 43059 - DNA, 1188 bp, Oryza sativa
  Clone ID: PAT_MRT4530_46252C.1
catctcaaggcggacgccgacctgcggatcctcgcgtgcgtccacgaccagtcgcacgtccccggcacgctcgccgtgctcgaggcgtcgaacgcgacgccacagacgccgctcagcctctacctcctccagctcgtcgagatcgccggccgctccgcgccggtgttcatcccgcacaagctccgccacagcgcctcccgagccggcgccgcggcggccagcgcggcgccgcccaccgactccgaccgcatcatcaacgccttcttccagtacgagctgaagcacccggagggcgccgtgtccgtgcaccccttcaccaccatctccccctactcctccatgcacgacgaggtgtgccgcctggccgtcgagaagcgcacgtcgctcatcctcctccactaccacaagcgccacatgctcgccggcggcgtgcgcgccgccgtggggctccgcgtcgtcaaccgcaaggtgctggaggtcgcgccgtgctccgtcgcggtgttcgtcgaccgcaacgccgggagcgtcggcctctgcgccttcatcccgggcccggtgcaagaccaatcgacgtcctccaggagcaggagcggcgggcacgcggccagcggcagcggccaaggcttcaaggcggccgtcgcgtcgctcttcttcggcggcggcgacgaccgcgaggcgctggcctacgcgacgcgcatggcgcgccacgagggcgtggcggtgggcgtgatccggttcttgccggcgcggggcatcaaggacgagccgtccgaccgccggatcgacaaccgcgccatcgaggaggtgaaggcgctcgcggcgaggagcaggaacatcaaggtccaggaggagctcgtcggcgacatggagaggatcgtccaggtgctgcgggggctcgacgaggcgggctacgaccttgtgctcgtcgggatgcggcacaggtggtacccggtgatgccggcgaacgggatgtcggattggagcgagtgcccggagctcggcgtcatcggcgacctcctcgcctcgtcggacttcgacacgccgtactcggtgctcatcatgaagcagcaggaccagggcgggctgaacgccgccgtgccgggcgcccaggacgtgtggcacgtgaacgacggcggcgccgaggacgcgccagcgccgccaagaaacatgtcaaccgccggatcttag

SEQ ID NO: 43060 - DNA, 2662 bp, Oryza sativa
  Clone ID: PAT_MRT4530_46253C.1
gtctcttccgatacctcacctcaccatacagctgctttctctctctctctccatccacccgaagcagaatccccaaaacaacagcgagagaaaaaaaattcacgcggcgaagccaaaattttttgttgatttcgatttggacataaaccctagctccaatctccccatcgccgcgtcggccccgaacccgtgcgcccccccatcgctcgctgaatcgaagggcgcctaccagtcgattcccccaagacgaggtaatccgctcgaccccctcgagagagagagagcctgggagagaaatcggtgttgttttctgctgaatcgatcgggttggcgggcgatttagggttttgggaagggtggctcgccgccctctccgaaggggactagcctgcgcgtctcgatctcgcggggagctagggttttgtgatccgagtgcgaggagggactggtgtcgccctggttctgatgagaattggcagtggaatgctcagattggctgccggcgacgacgagaggagcagctcccttggcagcggcggcggaggaggcgccagattcaccgcccccaaggtccgcacgcgcgataagggcgcgctcgtggccctctgattcgaggagggttgctggtgcgtagacgtggagccttctctgaggagagtgggagatgacgaggatcttcgtgcagcgcggggctgccggctcctcgtccagctccagccgctcggggtcacagacactgcagcagcagcagcaactgcaggcgacatcagcggttgcccgggaggaggagctgccgccgcagcctcatcagcatccatcggagctcacggcttcagacaatataactgaccatctagtggaggatgctgataacagcagtaatagtaataagccattggggctagatgatcccacatcagagagttcaagctctgcagaggagagggctgttatggagaaacctcccaaagacgactccagtgtgatcgatcctgctttcttggtggaggaattaacaggcctccagttttctgatcagtttgagcaggaaaatctagtgcagtcaggtattggtccatcacagattgctggtgcagcatcacacccaccacctccaccagctccaccagccccaccaccgaaaccatcgtctggtaataatgggttaaggagaatggggtctggaagctcaaacaatgcacggattggatcttcaagaaggccagttgcttggccaccagtggcagttcggtcatctgcttcgggttcccgaccttcttcacctagatcacttgctgatagtgaagggtataatagtgcagatgagcagggcccctgttacgcctctaattattatgattcggaaagggagcgcatgtttgaacatgacctaagacgagtgagaggatttgaaatcaataagatggctgaagatgggaattgtctgtttagagcagttgcagatcaagtttatggtgatccagaagcttatgacatggctaggcagatgtgtgttgattacatggaaagggaacgtgatcatttctcgcagttcatgacggaaggttttacatcatattgtaggagaaaaagaagagataaggtatatgggaacaatatggagatccaggcatttgctgagatgtacaatcgtccgattcacatatattcctatagtacagagcccattaacatttttcaaggaagctacaatacagatgtccctccaattaggctaagttaccatcatggtaatcattacaattcggtggttgatcctcgtgggctgacagtaggggcaggcctgggatttagttcccttagagggacaaataacgttgacagggatcaggtgaaggctgcaataaaagcacagcaagatcagcagattgagaatgcacttctggctgaaggacgactatactctgatttggagttgacagagaaggaaatagagcggatggtgatggaggcctcacgagcagagtatctaaagcagcagcaacaacaacttaacttcagagagtcatcaacatcaggggcagagccatcttcttctgctgcgattagtgggtcttctcggtcagctgggactgccgatagagttggcgaggagtgcttcgttctcccggacaccgtgctaacccgcagcatgcagctcctcctggcaatgggcttcaactacatccaggtcatggaagcctatagcatatttggcgaggacgtcgactcaatgatctactaccttgtggagatgggaggcaccggagcctctgcaggtggtagcaatcgcaggaaaggaaaagctgctgagtgatctgtgtacctttcaccggctatgacgaatcgaaataaaaatagttatgcataagccacaggagagggatggcaagactcgtggattaaatgagctgaaatgtcaatatactttccactgtatggagtgataacaaaataaaattcacttcttccataaaaaaaaaaaaaaaaaaaaagaaaacctctctcgccctccctcgtccacacggaaaaccctaaaacattgtactacctctgtcccatattacttgtctttttgagcttctttgagtttttgtttgtcaatgtttgattattcgtcttattcaaaattttttggaattattattaacctgcagcccgg

SEQ ID NO: 43061 - DNA, 598 bp, Oryza sativa
  unsure (1)..(598): unsure at all n locations
  Clone ID: PAT_MRT4530_46254C.1
caagtcacacaattagcaagtgactgaactagaacttgaagtttaggactctagggtcgatgttctcttcttaacactatagtacaaagaagggagcaaggtcttagaagaggttccagtgggggtctgtccacaaagggcaaagcaggtgatatctaagttgagtttttatggataagtttgaaatttggggttagtcatggtgataaagcagaacttgtatctgaaagaataatgtgaaatatgatagaggcttaaaaatattatgcatcttcaagatagtataatcagtttcagagtgctaaagttctaagtaggaattggagacccaggaaacaaaattgaacaaataagagttngtataccatgcaaaggaaaactacatagacaaactattatttgaattaagagtacaatattgagtattataagacaaatagtaataaaatttaaatacaaatttcgtttttaaagaacttacagggtcagttcaggaaagacaaaagtaaaataggttcaaaagcatcttaacctggtattatgttaaacaaaaaaacacaaaaaaaccagcgagccatttcatttttgaaattatatc

SEQ ID NO: 43062 - DNA, 631 bp, Oryza sativa
  Clone ID: PAT_MRT4530_46255C.1
ggggggaggaggttatttttctggaggaattaagggggaggaaattctttcgttttccgacttgtccccgaaaatgataacagttaacagataagtagactcttgacttgagaaaacccctaagcccaattaattgacctttgcagggggacggggcagttcttggcaaagcttaattaatcagcatagctaattattcaatcttggcattgacaacgggacaccctgcctggggaagctgaaaacgacgttgccgaatgattttgaattttctctcgtcatgagcagcgggcaggcaggggaatgtaccttgatatatatattggcctctgaaactgaagcatattcatttccaagcccagctgaaacttgggaaaactttgaaaatatacaaagcatgattggatgggactgcatgggggtattttggggggtaacacagtgtaagggaaagggtcactgtccaagtagatgtcacactttacacgagcaaaactcacactggtcagcaacagaaacgtgagagtaaagtccatcaaatgacactgggttctgaagctgcaggcattcagatcctgtaaccagttcagagcttgggcagtcacatggacaactgggggcgccacgtgtc

SEQ ID NO: 43063 - DNA, 699 bp, Oryza sativa
  unsure (1)..(699): unsure at all n locations
  Clone ID: PAT_MRT4530_46256C.1
gcctgtttggggggacnattttttggggcacggtgctggancccacggcggatgcatacctgcatgtgcctgctgaatatggcgtttcgtggctgggataatgagtgttgtgggattgggatgacttgtgtggtgataagattatgtggttgacctggcggcctgctgtgacgctgctttgtatactaggnatatacctcatggccccgtgccggtgtatgatggatgaggcaaagggtgctaggatgtgtagcggcctgatgatacacatggaaatgcatgaatactgtgtgcgttgtgttgggatgcgatactgctagactacacaacctgatgcttacacttggtcctcgtgcgcctcgggcccacgcatgcggccctgcaccggcccggggccccccgaccgggccctccacgccgggctgctgctgtgtctgcgcctgccgggtctgcctccggtgcacgtgcttgggcctgcgtgttgtcaccatatttatattgatcttgatgaactttaacatcagatatatgtctagattcattaatgataaatatgaatgtgaaaaatgctagaatgacttatattgtgaaaccgaagggagtagatcgtttggaggaccccatgtcagctgactatgaatgtgtcagcttattagctgcttcaataaacccccgtttttgtaaaaaaaaaaaaaaaaa

SEQ ID NO: 43064 - DNA, 243 bp, Oryza sativa
  Clone ID: PAT_MRT4530_46257C.1
atggcgcccatatacgccaccgggctgtccggctatctgctgtggcacaacgggtggcaggatgaggtcgctgcagcccatggccagcgcctgctcgggtactttgctgctgcacactctggtagcctgtgccatccatataggcttaacatgaacccctggcctggtgaactggcgttcagtgacaggacgaagctagaatgcaaggttgagcttgattttgttagagatgctgtacactag

SEQ ID NO: 43065 - DNA, 957 bp, Oryza sativa
  Clone ID: PAT_MRT4530_46258C.1
atgtcgacctccgccagcccgtctgccgcatcatcagccgagtatgcagagcatctctccaacctggtcgcaattccaagcctatcgcatgagaaccattactttctcggtccaatcggcaatcttgatcctactgagttcatcatcggtgaaaccaataggattcctttcagattagccaatccgaatctaggtcactggaagaatacctttaaatcttggccatctctcgagaaaacttcacccgagaagagctgggttacatggtacaagcgtgtgtcggctagcaagaaagttcattgggatgagatcggaatcggccaagcgcttgctcttaccatagccaattcagctaaagatgaacctctaatggctgtcgccacctatttctggtccaataccatcaacgcttttctgttcaaccaagggccgatgaccccaactctgatcgacatcaccatgatcattggattagatgtaacctcattggctaaccctatgagtatgaacaccaagaaccaattcgatttcaggaccaagagcataggtggttggtctggctatgtagcagcatacatgggcaaagggccagtcacctctcgagagcatgtagcttttctgctcatgtcgcttgaaaagttcctattctgcggatcaagttgtggccctacaactaactggcagtttgtagccgaagccctagaatcaaaaaaacaatttcctctaggcaaaatcctcctcggctacctatatcaaatgttgaacaatgcatcggccaagatagctgtcggcttagtggttggagcaggtggactatggtggctactgcagacttggctgaatctggtagtcatgaaagctgtgaatcggccatctgtgacagaagccgaattcccaagactggagctgatcacagaagacgatggagaagagtgcacctggactgtctactattga

SEQ ID NO: 43066 - DNA, 192 bp, Oryza sativa
  Clone ID: PAT_MRT4530_46259C.1
atggcaaagaagaaagactcaccccagtccccagaggccttaggtgcgtacagccacagcatcaccggctgcaaggaagacgatgagcacgttcctgtgtgcattaggagtttgtttttcgccaaattgcagaaaagacaattcatcggttttgacattccagaagccaccgttcctctattgtctatatag

SEQ ID NO: 43067 - DNA, 1064 bp, Oryza sativa
  Clone ID: PAT_MRT4530_4625C.1
ccgccgcccctccccaaccccgactcacgcggagccaccgccctcgactgtcgccgctccgccgtcttcgcatccgtcatctccgccaccgatccccgcgccaccgccgtcgccgccgccctcgactgccgccgctccgccgtcatcgcatccgtcgtctcaccgccaccgattctcgtcgccgccgacgccttcctcgcctggtagctgccgagaccttccgacgaaaattcagattgccgaagaaaaattcaggctgacaggacaccatgtcaactactattgtttgctgcacaatcaacgaaatttttggctgtttctactaaatttctatttggtataggtaatttcttccataatgattaccccttgcaaatagtgcaaatgtatacttcgtgggtcaatcttcgcacttacttcttctgtattgtagtaaggcatggcatccatggatgatgtggatttttcaccacatcaagccacacctaaggagtcaatgaactccaaggatgatgcgaaggtgcagccttcgtcagggcaaacaccaaacaaggggaattattacatgggccacgcgaatgccatcatgatgatgtttcaatacatacgtgatggttgccgacgtgttgagagttccatggaagactacacgtgcaagaaggtagaaaaaggatacggtgaaaaaaggaaggtgggagaagggtatgatcctcgctggtcttctcccatcgagataacaatgaagatctgcaatgacgacgtctccgatgaagcaaccgagaaggaaccatgatttagtattatcactactgtgttttggctttagaataaaataacatttcttgtgaattacacaagaaaattcagtaaacaatgtcgttcgggcctattcagtattgcttgtgaaatgcacaaccaaattcgatgaaactttgttgttatgatgcctattcagtattgtttgtgattgagttgatttctgggacctatacaaatgtgctctacctcctgttgaactactatgtatttgtttggcacggttggatgcatagcaatgttccttt

SEQ ID NO: 43068 - DNA, 1893 bp, Oryza sativa
  Clone ID: PAT_MRT4530_46260C.1
atgggcatttggtttcactaccatcctctatgccaaaggaccaaggctcttactttagcatgctctggaatttattttgctactcgtgctttctgtgacaagccgaaccacaggattgtccacaaggataaaaatcctgttcgggtccgctccgccctctcccgcgggtttacactccatgaacttctgcagttatgtgcaaagaggaggtccctcttagttgggaaaagctgccatggattagccattcattttgggctggtaactgatactgtcacatgcaatattctcatcaacttgtacacaaaatgtggccagaatgattgtgctcgtcgcgtttttgatgcaatgtctgtcagaagcataatctcttggaataccatgattgctggatatactcataatagagaggatgtagaagcactgaagcttttttcaagaatgcaccgagaagggacccagatgaccgaatttaccttatccagcactctctgcgcatgtgctgcgaaatatgctattattgaatgcaaacagttacacactattgccatcaagcttgcacttgattctagcagttttgttgggactgcatttcttgatgtttatgcaaagtgtaatatgataaaggatgcctgctgggttttcgagaatatgcctgagaaaacttcagttacatggagttcattatttgcaggatttgtgcagaatggtctccatgaagaggtattgtgtttatttcagagtacacaaagggaaggaatgcaattgactgaattcactgtttcatctatcctcagcacatgtgcaagcttagcattgataattgaaggaacacaggtgcatgcagttattgttaagcatggttttcataggaacctctttgtagcaacatctcttgtggatgtctatgcaaagtgtggtcagattgaaaaatcatatgaagtatttgctgatatggaagaaaagaatgttgtcttatggaatgcaatgattgctagtttttctaggcatgctcattcttgggaagcaatgattctctttgagaaaatgcagcaggtggggatttttccaaacgaagttacctatctctccatcttgtcagcatgcagtcatactggcttagttgaagagggccgtcactactttaacctgctattgtctgatcggaccgctgaacctaatgtccttcactattcttgtatggttgatgttttggggcgatctgggaagactgatgaggcttggaaattacttgataaaatgccatttgaaccaactgcatctatgtggggatctttgcttggatcaagcaggatccacaagaatattagattagccagaatagcagctgaacagcttttccgtcttgagcctgaaaatggagggaaccatgttttgctatcaaatgtatatgctgccagtggaaactgggagaatgttgttgttgcaaggaagtatttgagggatagtggtgctaaaaaagagatgggcaggagttggattgaggcgaaaggcaagattcatgtttttgttgctggagagagagaacacccaggaataactgatgtatacaataagttggaggaaatttaccatgagatgagaaagatttctcacagagccaacacacaatgtgatctgcatgatgtgcatgctgaccaaaaagaggagctacttaaacaccacagtgagaaactagcatttgcttttggtttaatcagcttgccccctaatataccaattactatatacaagaaccttaggatctgcggagactgtcattcctttatgaagattgtatcctgtattacagaacgccaagtcattgtcagagatatcaatagatttcaccattttaaggatggctcatgttcttgtggggacttctggtga

SEQ ID NO: 43069 - DNA, 693 bp, Oryza sativa
  Clone ID: PAT_MRT4530_46261C.1
gaaagtaacattccatgggtttcattatcatatctttatcaaacccctcaaagggcaaccaagtttatttcaaattggaaatgcgaacgtaggtacatctaagaattttacaatcccgcataaacgaatgccgtgggattgtggagaattattgttgaagtctcggtgttttaaaagatgtaacaggacacaaactgaatttttctagatgcttgagagctaaacagaagaaccagagtggagagagcttcttgcgatctctaaggcatcctcgacagaggttgcacttttgagcttagctttgtctacaacgggctgagacttagcgagttgaggaagaagcgaaaattcctctgagctaccactctcaaggaaaacacccttcagtcgactatcagagtcaatccagaaggtagcaatctttggttcaaagcttcccacttcaattgtttcgccaacattatcaccgtaaaattgccaccaaattttccttgaacttccttcgtactcaaaaactcttgaatagaaatatggaaggtagtcatacggctttgtgtgtgatgttaggagtgcttcaacacagtggtgtgcagacttccgagcatgatccacatgctcaactcgagtcattctatcatacatcttgaggggaaaagctgctacatctccaatagcaaagataccaggtatact

SEQ ID NO: 43070 - DNA, 760 bp, Oryza sativa
  Clone ID: PAT_MRT4530_46262C.1
agcaggtaaccttgaagcttcacagccagtagaaataataagtgacccatacttcagaattttccctgatgaagttttaagggtatgtgttttgccatcaaacgctacaactggatcctcatacaatacctctatccgttctccttgtaccattcagcagtctgcctctgcccacctgatccaacacaggtatgaaagccaggtagacgagcaggcttcttgtctggagggaaaagatagccctttgtcagtgctggtcgctcatatggcggatacgcctccttggagacgatgcaaaggcggccatcagccatgccgtgctcgacgaacgtcctcgccgcgtaaccggccgcgttgcctccacccacgatcacatactcgcgattctcgttgtcgaaccccgcacccgccgccgcggagacgcagaatctccggcggggaagcaccgggacagcccgcgcaccaccaccaccaagcccacgctgccgcagcgcccacgagatgcacccctgcgacgacgccgccgcggccgtggaagccatctccgccgccttccgccggagagctgaggtcatggccgtctctctcgtcggcggcggcggcgcggccttataggtggaatagtttaaaggggaaggggttgggtgcgatttggcggcggaggaggggcgcggtggccgttgagggaggccaaggggcggcgacggagtggagagagaaagaagaagatggccgtcgagttgagaagagcggacgcgtg

SEQ ID NO: 43071 - DNA, 3955 bp, Oryza sativa
  Clone ID: PAT_MRT4530_46263C.1
tcccctcaacatgtatgatagaatgcctcgaggtgagcatgtggatcatgctcggaagtgtgctcaccactgtgttgaagcactcctaacatcacacgcaaagccgtatgactacattgccatatttatattcaagagtttttgagtacgaaggaagttcaaggaaaatttggtggcaattctacggtgataatgttggcgaagctattcaagtgggaagctttgaaccaaagatcagtgccttatggaatgactatgatggaccaccacccgccgccgccgtcgccgccgcgggactccggcggcagcctcgaggtgcgcctcttctacgtccgcctctcgccgcgggggcccaccccaccgccccgcctcgcgctcgcgctgcgcagcagccgcggcggcgacgaggaggaggccccgacgcccctttccctcccgctccgcctcgatcgccgggacccggcctccggcgaggccacctacgtgtccaccgcgtccgcccgcctccccccaccctccgcggccttcgaggtcgccgaccaccgcggcgccgcgctgctccgcggctctcttcggcggtgccctgatgccaagcccgattcctcccccgcctgggcaatcgactgcatccccgccgcgggggcggaggcggagacctccgcgttcgaggtctacgtcgccggatgctgcgccggcgagcccgccgtcctcacgtgcgctcttcggctagccacccccgaagaacagaaagctgccggcgggttggtccgccgccgatcgccgacttcgaacgctgctggtgatgaagatgtcaatggaagtatacagcatccagaaggttggtactccgacgatgatgacgggcaactcacatggttcaatgctggtgttagagttggtgttgggattggcctgggagtttgtgtgggtgttggcgcgagcggcttcttttcccctcctctcccaaatccaaccacaagaagaggaggaggaggccaccgttcgcatccgccggatgccaccgccgccgacgacgacgacgccgccatgaccggcgccgccgcatggccggtctgcaccatctgctacgaggacctccgcccgctctccgaccagcacctccactgcctccccgcctgcggccacgtcttccacgccctctgtttggagcaatggctggagtactgcccgggcgggaagaagaagctcacctgccccatctgcaagcagccatgcggcgccgcccacccaccgacccgcctcttcttccaatccaccggcgcgtgccccacgcagaccgcctcctcctccccctcgcggcacgagcccaccgatggcggcgccgaccgggatgagctcgccgccgaggtcgcgcggctggagcaaaaggccgcctccctcggcagggtgctcgacgagcagcgcgacgggatccagaagctcaacgccgaggcgagcgctgctgctggccccccgaatttgggtggatcttgtgttgctatgtggagggagaaggcggccgaggcggaggtgatgaaggaatcggtcaggagggagaaagaatgtgttcagcatctgctcaatgcgaaaacagaggaattgtcaaggaagtcatcagaatgtggcaggttgcaggagaagggcctctcattggcgaaggaacttgcagcattgaagctgtcgacagatatgaaccttcaggaggaagagatccttaagttggcatcacttggtaaccatggaaatgctgcgaatgcggttgatgttttgacgagatctcttgctcttcggaacaagagctacaaagaattgatgatccaatgcaatgttctgggaagatcagaatctcgttcccagcagaggtttgagaaggcaaaagaactcattaagaagttaaaggcaagagtacaagaccttgagaaggaacaagaagaaaaagaaaatggtgtgattagggacctgaggtctgcaaagaaatttaaagctgaccagacaaattcaggaaataccacagttaataatggtttctcgggtcttgctgctggatgtggagattatccgatgaagctcgatgaagtggtgcaggatccatgcgacaagcctgggccatcacctgaagctaaaaatgacctgaatataaaagacaaaatggacgacaagcatgcggatgtgattgacttagatgctgatgattctgtcttccaacatgaacacaagaaaggactttctgccaaaccatttgggaacgatgctactagaatggctcctggcactggaccccagcaggttcacaatttcaattctctttcagatgacttccaaataccaattagaaatcttggtggagagggaacaggaaaaagcgtcggcaaatggtgcaagggcgtagctacccctggatctctcaacacaaatgcaaataaaaggaatctgatcgccgtagggccagacggacgtgggggaaaggatagcaagactcaagcactatggcctaaggcacagaaggttggaagcagagcgattgttccctcccttggagaggtggccgtagctctccggcggaaggcggcggagatggcttccacggccgcggcggcgtcgtcgcaggggtgcatctcgtgggcgctgcggcagcgtgggcttggtggtggtggtgcgcgggctgtcccggtgcttccccgccggagattctgcgtctccgcggcggcgggtgcggggttcgacaacgagaatcgcgagtatgtgatcgtgggtggaggcaacgcggccggttacgcggcgaggacgttcgtcgagcacggcatggctgatggccgcctttgcatcgtctccaaggaggcgtatccgccatatgagcgaccagcactgacaaagggctatcttttccctccagacaagaagcctgctcgtctacctggctttcatacctgtgttggatcaggtgggcagaggcagactgctgaatggtacaaggagaacggcatagaggtattgtatgaggatccagttgtagcgtttgatggcaaaacacataccttaaaaacttcatcagggaaaattctgaagtatgggtcacttattatttctactggctgtgaagcttcaaggttacctgctaagattggaggaaatttgcctggagttcactatatacgtgatgttgctgatgcggattctctagtatcttcattgggaaaagcaaagaaaactgttgttatgggtgggggccatagccaaatcgcactcaaacccgtcccctttgaactattccccctatcagccagcatcgccgcagccgaccacagtaagggaagtgtccttagctctccggcggaaggcggcggagatggcttccacggccgcggcggcgtcgtcgcaggggtgcatctcgtgggcgctgcgggagcgtgggcttggtggtggtggtgcgcgggctgtcccggagcttccccgtgggagtgtctgcgtctcagcggcggtgggtacgggggtagcaaaggttactcgcgagtgtgttgtcgttggtggaggcatcaagggtggttaccttgagagtggttgctcagaggaatttacgcttcttcctcacctcgctatgtctcagcccgttgtagacaaagctaagctcaaaagtgcaacctctgtcgaggatgccttagagatcgcaagaagctctctccactctggttcttctgtttagctctcaagcatctagaaaaattcagtttgtgtcctgttacatcttttaaaacaccgagacttcaacaataattctccacaatcccacggcattcgtttatgcgggattgtaaaattcttagatgtacctacgttcgcatttccaatttgaaataaacttggttgccctttgaggggtttgataaagatatgataatgaaacccatggaatgttactttcagctaaaaagtgcaacctctgtcgaggatgccttag

SEQ ID NO: 43072 - DNA, 1661 bp, Oryza sativa
  Clone ID: PAT_MRT4530_46264C.1
ttgtgcacaaagatcaatcaaatgcagatcaagagaaggcaagttcagttcagttcagttcagttcaagatgcagaattttgttttccctcttgagtaaggtagatagatatgcatgtcaccttcagacaagttatgtctcacccgatgcgaagaatcaaatattttcggttgctagaaccttggtgattacaacaagggacgaataatcacaaatgtacacacttccagccagccacacatccgcaagaacaatatcgatgtctcatacttcttaacttaatatctatcatacaaaaggtagaccaaagttttatgacccggcattttctccagggttagttgcccgagcattcagcaggggttgcagcgctttcacgacaatgctcatgtttggtcgaaagtccgcttcatactgaacgcataacgccgcaacagctgcaaactttgcgacagctttaggaggatagtcccctccaagtcttgagtcaacacattgcctaaccttgtcttcactaagccttggggtggcccaagtcacaagactctgctgtccccttggtaatgtatggtcaacaggtttccttccggtcaatagctcaagaagaacaactccaaaactgtacacatcactcttggagctaagctgtccagtcattgcatacttcaggtgcatgatatccaaaggttccaagaaccctagtagagtgaagccgagctgccatgtcaggagcttggtttgacaaatcaaagtcagctattttagcaacatcatcatcgaaaaggagaacattgctggacttgatgtccctgtgtatgatatgaggctgtgctttctcatgaagatactccaggccttttgctgccccaacagctatcttcacacgttgtgcccatgataagactggaccaggttgagctcctttaacacccttccttccatgaagcatatcatgaagagaacccatagtcgcaaactcataagcaaggacacggagatttccatcaacacaataaccaagcagctcaacaacatgttcatgcttaagcctcgacaccatagatacctgtgccaaaaattcttggtctggctgcttactagagtctagctttttgaccgctgcacttctaccatttcttagaacaccaaaatacactctgccaaaggaaccttcaccaatcaaagcttcatcaccaaaattcttagtcacttccctaatttcatcaacaggaatgatggggactgcaattggttgcactttcacaggttgaggacctcttggagttggatcagctgtgcgatatgcatcgctccttgctggatggttccctgggtatggattcctgttgtctggtactccttgagtatcttcatcaccacagcatgcaaagcacgacatattctactagaaacaaacccttttcgcgtccccggcgccggggaagaagaagaagccggcggcggcggcgaagaaaatcgcggcgaggatgggatgtaggaggaggaggaggagacgcgcacgcagcagatgcccgccgtgtgtgagctggtgtggtgacccgcggtgaacttaaatacagcagctttgatagttgctactgctacagaagagagccagccaactggtcgtcgctgcggcagcttcctctctcctctactct

SEQ ID NO: 43073 - DNA, 367 bp, Oryza sativa
  Clone ID: PAT_MRT4530_46265C.1
attatcatcacatgtttgaactaataaataaaaaaaaaaaataaaaaaaaaatatttaattaaaaataaaaaaaaaaaaaaagaaataataattaataagtttttttttgaaatattggtttgtcgtttttgtgtgtctagtcttttattctcttgtgtccttccttataaggggttctctcttttagggtatcttcttttctctcccgggcttttcccaactttttttttttttgggccccttatttttccttctttgtccgctttgtttcacattcccttttgggaaattctcgtcttttcccatagttcttgccttttggccctttcccttttttccccgttttttattttatagggccccccc

SEQ ID NO: 43074 - DNA, 658 bp, Oryza sativa
  Clone ID: PAT_MRT4530_46266C.1
aaatgggtcctaaaaaaatacccaaaaggtagtttcactcaaaacaatctgtccccacctaaagtttagcctcgagctcacactacttccttgtccaaaactaaatcaagtggttattttattcattatgctctgaaagcacttatgttggttcgtccccatttctacttatatcattccaagtcccctctatcttaatctttagagtcctctagacttaggcgtcaattcaaaatttacctcttctcttaaaaaaccttcccttgttctactgaattaaaaatcatctctaagaatacctaaaacatagtctcagttatttgaaagaaatcttattgtattgtgttatgacaaactcttccaccactctctttaattataaattaaatcttatgcttttcaactggtcactgacacttaaactacctgacttgtcttgtcccttctactattagacattacattgcctgaagataagtaccctcataatttaaccctcatagggacactgaaaatatatattgaataatatgtactgaaaaatatggtatacccttgtacggccttgcacacaatggatacttaattgctctttataacaatattgattagttcttttctagcatatttttcctagtactgtagaagaaatataagg

SEQ ID NO: 43075 - DNA, 1259 bp, Oryza sativa
  Clone ID: PAT_MRT4530_46267C.1
atggcaggtggagccgtgctcgctggcgaacaccaaggaggagctgtgcgccggcggatgtggaggaggagccatgcgcgccgcacggaatcgaggactcctcgccacgtcgccatagccccctgccttggcagttggcagttggcagcgtctgccgcctccaccgtcctcaacgcggcccaccgttggagcagcggtggagggcagaggccagagggcgtcgagctccggtggcaaagctctatacgagctcgaggctgcggtggcggagattggaccggcgatggctcggggcgtggtggcagcagcccggtgcggcagcggttgagcttggggacgatacgagcgagctcgccagaggtcaccctcgtgctgctacttcgtgccgtccgcgcgcatatatggcgccgtccgcatggaggaggaggagctttgctggtgtggggaggacgagctcgccgacagccaaacagcgcgcgcgtgggggaggaggagctcgccggtgtgagagaggacgagctcgccggcggccagatgcgtgtgggcaacggcgcgacgcacgtggataggcagtgggcggcggcgacgacgacgcacctggagcaggcgggtggtcggcgtgcgggggtcgacagcagagtgcgaggatggcgcggcgccggcgccgaggaaggcgttggaggaggcgggctaggcagcgggagacgagtcctccacggggagggcgcggcggcgctgcacgcggcgcgcgcgcccacgacggatctcgcgggaaggaatcgacgatcccgctgccgtgtcgagctccctcggcgaccctccttcgtctcgcgccgcctccgtttcccgtgccggagccgaccgccccagctcggcctccgcgcggcggcgccctccactgccgacaccttcatcgacggcgaggctgtcttccggggaggcgacgcatccgacgaggctgcagcgggcgcgcagacctgcgtcgtgttcgttggtgatgacggtggcgccgacggcgtggccgcgtgggcgacggagcgcgccgcggcgaggtttctgttggtggcggcgcggccgcacagcgaggccgcctcctcctcatctctcgccgccgtctcctcacctcgtgccgccttggcctccgcagcggcaccctccaccaccgacaccaccgccggcaggtgccggcgctacacctcctccagcccaccgcccgtccctgcatcgccgcccacctcctcacccctgcgcgctgccct

SEQ ID NO: 43076 - DNA, 528 bp, Oryza sativa
  Clone ID: PAT_MRT4530_46268C.1
atgagctcctcgtcggaagatgcggtgtcaagcctaggcactggcaaagaagacgagaaggaggggcgggttggaggagccattgaagcccgggtcgtcggcaaggactcctccaaggatggcgggcggcggggacgtgaggccggggctatgtgtgaccggccgagggatcgagaacggttttgggggttaatgaaaatatttcctgggtttttggccaaaagccttcctcctaggctagcccgctaccttcctccatttggtctgcttctcttcgaccctaccatctttaacttcccgaatatgactaccatcttcaacctcccgaagataatcccgtgcccgtacgtttgccagagcaaatctcccccatcaaatccggccaaatctttcttgggtaaccaaaattgttcgagggtttttgatccactcgatctactctttccgttttccccaaaatcagagcgtaaaactcgggataaaaatgaccggggaagatcactgtcatcatcggcaactgcagaatag

SEQ ID NO: 43077 - DNA, 308 bp, Oryza sativa
  unsure (1)..(308): unsure at all n locations
  Clone ID: PAT_MRT4530_46269C.1
gggatcaggagggacgggcgggcgcgagcgtgtgcaagccagaaaaggccggcccgggcgccccgatcgaacaaagcgcgacgcgtacgggcgcccgccaccggcccggcccggccatgaagccgtgggccgcgccccgggctttcagccaaccaccaccttggttacccagaaaccacccaacccttcgcccgcccgtgcttggttcccttttgtccttccttgggcccgtcgtaagcgcttgccaacttggcgggtggcgaattgccgggcgttcggcggggaaggaagaagganggaaggaagga

SEQ ID NO: 43078 - DNA, 914 bp, Oryza sativa
  Clone ID: PAT_MRT4530_4626C.1
cgccgccgcatgctccgtgcactgccacgcctacgccgaggatggtcgccgccggcagcaaggagctcctccgcaacgaggactgattcaccacggaggacgccgtggccatggacttccccaacatcgtcgccctcgctgagacgccgacggccaggacatcgccgccgccgccgctgccgaccacctcaaggccatctgagcgagctagctgctctcctcaaggccatccgtgcagcgccggcgtgccgcccagagatccttggcgtcgaggcggctgcagcggagacggcttcccgctcccgctgccgccgcggctccttgtggtgctcggtggcgtacgcttgcgggtgaaggtggcagagcagcaccccggacgtgtccgcctccaccctggccgacagctgcctcaaccgcgactccacccagccctgggggcgtctgaggccgagctcgccgtcgtcgtgctcgatggcgcgcagcatcaccgggctgggccacttctaccgcgcaaagacgcggaagaagcgcgggagcagcatgctggggagctttgcgatccgaacaggacactggatgcggatggatttggtaatcaaaaggaaaaggggtacctgaccggcgccaatcttggagaggatgttcgtttcgtgcgtgcaccgtgcgcctttgtaaagtgcccgaggttgctgtaccattggaggatgaaggatgagcatttggagtctatacggagcaaaccacttgataacttgcacttgcagcttacggcgatgatgactagtgaagccttctgcggcaaagcggcagtagtgactgttacagtgtgcccttcattgtctggagtgcagaaaatgatatctgcagggttccaaagtactgaaaatagttcagaacattgcacccaaatttga

SEQ ID NO: 43079 - DNA, 392 bp, Oryza sativa
  Clone ID: PAT_MRT4530_46270C.1
gcgcgctcggcctgcggatgcagtgctgccagcagctgcaggaggagagccgcgagtgccgatgctccgccatccgacggatggagaggagctaccaggagagcatgccgatgcccctggagcacggctggccggcgccggcgtaagaggactaccgtggggaggggacgcccggcgcagcaagcggactacggcgaggggctgtctgaggacggctactactgcgagcagcatcaccagccggtgatgacccgcgcgaggctgaccagggcgaggcaacacgcggcgcagctgccgtcgatgtgacgactagagccccacgagtgcagcatctgacgaggcggacaacactacgctgacctgggtcgcctcatagctagtacgatcacacc

SEQ ID NO: 43080 - DNA, 424 bp, Oryza sativa
  Clone ID: PAT_MRT4530_46271C.1
tcgtccacgcggacggtatgaactgttacagagagttttgcctgtagaggccatgcgacctatgatggctaccattctgcgtactatactcagctgaatttcgaaaggaggcatggacaaccatatgatccggttacaccatatgactgtgagctacctacatccaatgcagaatcatcacattggtcagactgtttggactaactgtggaatgagcaaacctacagctgctactatggatgagggaatgcctagtagtggagacgctgatcgcatgtgttcagtacagagactgctgtattactttgcaagaaaggattcttgaaggagaagatagtatggatcctgatgaatgacattgaacaggccttactactcaaggcgtatttgcaactataggatgcattggtgactgtctgatgac

SEQ ID NO: 43081 - DNA, 288 bp, Oryza sativa
  Clone ID: PAT_MRT4530_46272C.1
atggctgctcgccttagcgttggcgttgggttgcaggcaatcctagtgacgtccctcttgctgcagatgacattatttctgccgtgtgcgctcgccaccgatggcagaaagccttcccagctactgatcatgggcagagagatgcatcaaggcttggatccaaccaaatccacacgatgtcgtcgaatcctagtgccgcggctagtgaagcacaactgggatccgggtcattgcaaacattatgctacataccctttcatgattcgtgcatttaattcatcgagataa

SEQ ID NO: 43082 - DNA, 650 bp, Oryza sativa
  Clone ID: PAT_MRT4530_46273C.1
cccacgcgtccggacaattagttgctctattcctcttcctattccattggtaacttacatcaattactcttaattgattgttggttgatggttgtgtagtggaggatggttcatggctagttgatgacaattagttgctccattcctcttcctattccatgactcttactcttcatcttccatttctcttataaaatgagaatggatttgatctcccgcgagaagaagaagacacactttcatccattttaaaaagctgttgctgctacggtaatcccatcccgacgagtgtgtgcacacgcgttgggagagtaggcctccgaaaccacgcgctgctgcgacgtttgcacggacgggcgggcgatcaggtttttggggagcgcaaggcgcgactactcactgttcgtcaacatctacttcaccttcaccaatatgtcgaacactggagacaacggcaacactggatacaaggagaaggaggctcccgtcaacaccaacggaggcaatactgcctcaaactccagcggaggaccattcttgggctcgcccatcaggcccggcctgcttcccatccgaaagaaggcagccagcctagtgccggattcacagctcgtccaagatctcttcgattacaatgcctccgaccggcc

SEQ ID NO: 43083 - DNA, 2094 bp, Oryza sativa
  Clone ID: PAT_MRT4530_46274C.1
atgccgtccatgcgcgcgctcgagcggctcgcctcgtggccgacgcccccgccgccacctccgccgccgccgccgccggcgaaggcggcggcggcggaggcggagaggccgtgtccgccgtcgtccgccgccaccacctcgtcgtcgtcttcttcctcggcctcggccgcgcccgcggcggcgggggcgccgcgcgtctacccgctgcgggacttcccggggagggaggcggcggggctgggcggcgcgttccgggacaacgtgcggtggctgctgaggcagtggggcggcgcctcccccgcctcccccgccgccgggggtcctgggtcggcgtcggcggcggtggcggtggcgtggcgggtgctcctctccgacgaccgcaccggcgtcgtcgtccccatcttcgccgtcgaggagcccgtcgcgtcctcgcccaagccgctctgcgattactgccgctgggcgggttggagccaccattgggtgtcaaagcggaagtaccatttcattattccggcgcccgctgactgggaccgccagcttgctgctgatgtgatccttggacgcaccgaccacctcctccatggcctgatccacagcaatggttttggtcaccttgtcatgctccgtggtcgcgatggcggctccactgcactatctggccgtgacatcatggacatctgggattgcctctgctccgctcttcgtgccagggctgtgtctgtggtggacttttcccagaaacgctctctggatcttcgtctcctgctcagcgtggcacatggtgacacatggttcacccgatggggatactgccttgcaaggggttgcttctgtgtgtctacctcgacctatgcagcttccgtggaagcgttggctgccctgcctgtggactatcttcgcagccgtcacgtccgccgtgtggtaaccatttaccgccgcctatccaacaaacctctggttacagtccgtgagttcctccgctgcctccttgattggaagcaccttgagccaccccttcaattacctcctgtgaagacatgcacacggctgcaattcatgctgccaaagccatctgtgatgaagagacacaggcagcagccatgccagcgctttgaggatgtgattgacctgctccagtgtcgctggtccaagaagcggcttcttgatgctgcagaggttgttgttgacaggctgctagagcatggcagcggggcagagatgacacggcaggcggtgcgagatgctgcaaggggcgccattggtgatactggtctccttgactttgtcatcaagtcccttggtgataccattgttggcaactatattgtgcgacgtgtgcctgatgctgaaacacgtgtgcttcactttagccttgaggaatatgaagagccaacaccagcactgttggatgttgaggtagagtgcacaccattgccacctgtggtacggtggcctagcacagtggaagtagagcgagatctgcgtgctgtctaccgagcaatggtcgaggtgcgcagtgaggcagcacaggctgtgctggactgcaagcactgggtgaagtggtggggccttggggatgagtccgatgaccagctgaggtttttcgttgagtggcaaccccagccatgggaagctgctgagcttatacggccaatgccactgggggagattgtggtggtaccactccatgcatccatgggtgagcttcttgtcgagtcagagcatgcgctgcgggacacttactacttctttgaggaattccaggctgaagggctgcatggcattgctggggagaaatgggatccagtgatgcttggtggggcagagaatggtgacacaatcagcgtgtatggcaatggggcagacatggaaactgagctgcggtgccatggtggacttgacttgtgggaggtgcggtgcgtgtgtggtgcgcaggatgatgatggtgagcgcatgatagcatgcgatgcttgcgatgtatggcaccacacacgttgcgtgggcattgcagacagcgagcctgtgccaccattatttctttgtgtgctctgcggtggtgcgctcatggcggctggaccgatcaattcttga

SEQ ID NO: 43084 - DNA, 301 bp, Oryza sativa
  Clone ID: PAT_MRT4530_46275C.1
gagcatatagctggggagagatagggctccactggaggggaaacttggccactgcttatgctcccatggcaagccaactgatcaagatcaggctgtagtgctacaagcccacggggctgcatggagcttcattgacaaggaggacccaatttacaatgaagggcatccaatcaaagacgccaacttactaggtggcgcggacactcaatggcgaccccttcatctgaagcctggagacgctcttgacctccaggccgatggtagcgtggtacctctccaacttcccggcgtaccggaccgc

SEQ ID NO: 43085 - DNA, 1022 bp, Oryza sativa
  Clone ID: PAT_MRT4530_46276C.1
atggccgccgccgtccacctccgccctatccactcgctgtctctccctctccctctcctcgcagccaaggccgccacgcccaatcccggctggctcccgctctcggcgaagccaggcgcagggaggaggagaagcttgctggtctgcgccgcctccgaccccagcaaggccgcggggaagggcgaggcgggggatgccgtcgccaggtgggcggcgtggatcccgcgggctgcggtgggaggggccggcccggagcaggtcctcaggctcatctccggcgccgcggccacgcccatctgccagttcgtcgactcgccccgcaccttcctccacgccatcgatccccgggttaagctggtgtggctcttggctcttgttgtcctaccagccagatcaaatatttacttgcggtttggtttagtagcataccttactctcctctctatgtgggttctcccaaaccatatttggaaggaccaacttggaagggtcgctctgctttcaggcatcatattcataatgctgggatttggttctgatggtgctccttcattagtccagacaagaactcctcccccatctgttataggtttgccaaacatacctacatccacaaatggctattcttacacaatcatgaaactgggtccactgcaatttacaaggaaaggcctatcagtagcgagtacgtcagcatgcctctcatttgcgatatttcaaagtgcaagtctctgcttgacaacaactactcctgagcagcttgcttctgctttatggtggtttatgattccactgaagcatatcggcgtaccagtacctgagataatactcacactcttactatctttgaggttcattaatcttgtatttgatgaggcaagtatagggtgctcaagttcgcaattcagcactggcgattgtagcacgtcggataaattgggaaaagctggcaactatggaaactattgacattttcttcaactatgtgcggcgaattttcaaaaatatatttgatcacgcag

SEQ ID NO: 43086 - DNA, 690 bp, Oryza sativa
  Clone ID: PAT_MRT4530_46277C.1
atggaggactttttagactctattgaattccctcaattaaatgaagttgataaggttcttcttgataaacccatctctaaaaaggaattatttgatacaattgcttcaatgaaacataacaagtcaccagaatcagaacaaattcctggtgcaatccttctccttgatattcaaaaagcttttgatagtgtttcccatgatttcctatgttgtgtactaagaaaattcaatttcagtaatgaattcattgattggataaaagtattttactccggtaggaaaagttatgtatctaactatggtaatttgaccagaccacttaatatggaaagaggtattttccaagggtgtcccatatccccatatttatttttgctagttattgaatctatggctcttgctattcgacaaaatcctaatattcaaggtatcccagttgcagaaaatgaactgaaaatttctttgttagcagatgattctacgtgctttattgatggctcagataactcttttaaatcattattcgacactattgggtttttttctgagagctctggctgtaaacttaatatttcaaaatcagaggcaatatggattggttctttgaagggttgtcaaaggtatccattttgtgagaaagtagcagagaggatatactatggaaagcatatgctcctcaaagcatattaa

SEQ ID NO: 43087 - DNA, 357 bp, Oryza sativa
  Clone ID: PAT_MRT4530_46278C.1
atggcggcggcaaagctactgttgggtgatgctcgccgcgaaccggaggctaagatcgcctccgctctgggcgcgctcggcgtcgccgccatctccatggccaccactttggccgcagagttcgagccgtcgccgggcggcctccgcacaaccacctacaaccacctcgctgtcgcggggctcgcagggaccttccttggcggggtggccctggtcggtgcttcagtctgggtgtccgacaacccagctgcccgccgtgcagccggaaagaagttgctctacttcgccgccccgccgctcctcgccgcggtcgttctatcggtggcggcgctgctctgcaaatggggagctatttag

SEQ ID NO: 43088 - DNA, 436 bp, Oryza sativa
  Clone ID: PAT_MRT4530_46279C.1
tttgtttttttttttttttttgttttttttttttttttttttttttttttttttttttttttaaaggggattccacattacataacccacatgtccccccattaaaggaaaacaaaagttaaaccatcacccctaaagtttggcccaaaaaataatttttttttcatggaacccataacaaaaaaaaagggttgggggggaacaaaccccccccccgggggaaaccggggggaaaaggaattttcacatccccatcggagggggggttcgaaataccgggatgccccatggtttgggctccggaacggaaacacccatcccttggagctccggggggagcccaacctggcccccgagccgcgcgagtttgttaagctcccggttccggaccccccgggggaggccctacccctcctcccaagaaggaggggggagc

SEQ ID NO: 43089 - DNA, 648 bp, Oryza sativa
  Clone ID: PAT_MRT4530_4627C.1
atgttgggcctgccctccatcgatggcagattccgcgtgacggctggaggaggcgaggtcgggcctgccctccaacgacgctccacgtcgccgcagcccgcagccccgtcggcgccgtcgctgtgtcgctccatcaccgtcccgacctcgaaggcgaaccggcttcggtccctcgcgccgccactgatccagggctcctcaaccctgcaagccgtcatcctgcctgcgaacaaggatctaatatttgaggactcctgctctgctggtgactacttcactccagttattcaaggcatggcatccatgtatgatgtggatttttcaccacatcaagccacacctaaggagtcaatgaacttcaaggatgatgcgaaggtgcagccttcgtcagggcaaacaccaaacaaggggaattattacatgggccacgcgaatgccatcatgatgatgtttcagtacatacgtgatggctgccggcatgttgagagttccatggaagacttcaagtccaagaaggtagaagaaggacgcgatgagaaaaggaaggtgggagaagggtatgatcctcgctggtcttctcccatcgagataacaatgaagatctgcaatgacgacgtctccgatgaagcaaccgagaaggaaccatga

SEQ ID NO: 43090 - DNA, 915 bp, Oryza sativa
  Clone ID: PAT_MRT4530_46280C.1
ttttttttttttttttttaaaatatgtaagtcaggattaatgctaacaatagagctggttcatatgaaactatcatttatactacatgtgtagatggataatagatagatagatagcacaaaactatgaacaaaatagatgtgtgcctatcagcaatcttgttgacaaaacaatctaaacaggcgcatgtaaacataactaatattgctattcaaaagagagaattcgttatccttcagcaagtagataaactgaatccttggaagtaaaatacgtacttcgggtgacagtatgcacagaatgatcctcaactggcaggtcggcataagcctgttcttgcatggaccggatgtgtcctgtatcatgtgctgcgggaggtaccggcaactctgcgtctgcagatcacagaacatccatagcttgcacgatagacggtcgctggatcgggtcttgatgtgaacagcagagacccatgacgatcacacgctccatttgctgctgattgaactcgccgttcagtctctgatctgctgcgtcaagaatcttgccctggtcatacaaatcacgcacccaggctagcagtgatgaagctccatttggcagctgcctcgatgccggccgcttgccacaagctatctctaagaggacaataccgaagctgtacacatccaattcggtgcgaggccagcggttgttgatgaattctgggtcaatgtatccaggggtccctgcgacaacttgtgttgtttgtggctctcccccatgctcaacaagccttgctaacccgaagtcaccaagcttagcattgtgtgacacatcaagcattacatttgcaggcttgatgtctccatgcacaatgcatttctcgcagtcatggtggaggtagagcaaagcagagcccagatcaagtacaat

SEQ ID NO: 43091 - DNA, 270 bp, Oryza sativa
  Clone ID: PAT_MRT4530_46281C.1
atgggaaaattgggaagatatataaaagaagatgaaaatggtaaatacatatatgaatggaataagtctattttgcgtcctttgtatgaggagacagagccctcccttcaggagggactagccgaattcaggaacgagtatgaagagaaaggctacatcgaggctggtgaagactaccacacatacatggctgaggttcaagaatggtcgaagaaatattgggatctttattttaacacttcagagatggaggaggaggaggatgactga

SEQ ID NO: 43092 - DNA, 168 bp, Oryza sativa
  Clone ID: PAT_MRT4530_46282C.1
atgctcatggatttggaggcggaggagatgacaaggaggcagccggtgctcatggtcgtaggcggtggtgtgggacgatgcttgggaggcaaaggaggatatgaagatacgaccaacgctgtatctacaaagaaggcctccgtcacagatggaccaataaggatgtag

SEQ ID NO: 43093 - DNA, 1182 bp, Oryza sativa
  Clone ID: PAT_MRT4530_46283C.1
tttttcacggatgcgtacgacctcttctgcatctccctcgtctccaagctgctcggccgcatctactacaccgacatcgccagcgacacccccggcagcctgccgcccaacgtgtcggcggcggtgaacggcgtcgcgctgtgcggcacgctcgcggggcagctcttcttcgggtggctcggcgacaagctcgggcggaagagcgtgtacggcttcacgctcgtgctcatggtggtgtgctccgtcgcgtcgggcctctcgttcgggcgcacggcgaagggcgtcgtcgccacgctctgcttcttccgcttctggctcggcttcggcatcggcggcgactacccgctgtcggcgacgatcatgtcggagtacgccaacaagaggacgcgcggggcgttcatcgccgccgtgttcgccatgcaggggttcggcatcctgttcggcgccatcgtggcgctcgtcgtgtcggccgggttccggaacgcgtacccggcgccgtcgtacgccgacggccgcgcggcgtcgctggtgcccgaggccgactacgtgtggcggatcatcctcatgttcggcacccgtcccggcggcgctcaactactacttgcgcatgaaaatgcccggagaacggcgaggtacaccgcgctcatcgcgcgcaacgccaagcaggccggccgccgacatgtccaaggtgctcgacacggagatccaggaggacgcggaccgcgccgaggcggtcgccgccggcggcgccggcaacgagtgggggctcttctcgcgtcacttcgtgcggcggcacggggtgcacctggtggcgacgacgagcacgtggttcctgctcgacatcgcgttctacagccagaacctgttccagaaggacatcttctccaaggtcgggtggatcccgccggcgaggacgatgaacgccgtcgaggaggtgttccgcatcgcgcgcgcgcaggcgctcatcgcgctgtgcggcaccatcccgggctactggttcaccgtcgcgttcatcgacgtcgccggccgcttcgccatccagctgatggggttcgccatgatgaccgtcttcatgctcggcctcgccgcgccgtaccaccactggacgacgccggggaaccacaccggcttcgtcgtcatgtacggcttcaccttcttcttcgccaattttgggcccaatgc

SEQ ID NO: 43094 - DNA, 452 bp, Oryza sativa
  unsure (1)..(452): unsure at all n locations
  Clone ID: PAT_MRT4530_46284C.1
atttcttgcaacacaggatggtgcggaagtctctttacaacagatggttgaagagttgatgatggatcctgtcaaggctgataaatctgcagtgccagatactggtgtcgaccctgactgggaataccagctaagctctatattcattgacactgagaaaggacaggcacgatatggaacacgaagcatgactgctcttgctgtgaagttcaacggcgaagtaactttctatgaaaggtacttggagagcaatctatggaaggagaatctcatngcaattgagttggagatgtcacagtgggaggatctgagaggaacttcaaatatttctccaaagagttgctgactgatgaaagttctttgcttggccttattgtttgacatgagtaaatcttgtaaatactgaaaacgcaacaacaggaatgtgtgcagtctgcagagtctcaaaccta

SEQ ID NO: 43095 - DNA, 1081 bp, Oryza sativa
  Clone ID: PAT_MRT4530_46285C.1
cctgaagctagctaggtagagctcactgttacctaccatgccttctcagcagcgcagcagcagtggtagcactgcgaaggccggggacgccgatggcgacggcgacgccgccgccgtatccttcctcggcgacaagtcggcgaaggtcttcatcgccggccaccgcggcatggtcggctcggcggtgcaccgcaagctggacgcgctggggttcaccaacgtcgtggtcaggactcgcgccgagctcgacctggcgtgccaggccgccgtggaggcgttcttcgccgccgagctgccgcggtacgtgatcctggcggcggcgaaggtcggcggcgtccacgcgagctccgccgcgccggcggagtacctgacggagaacctccgcatcaccgtcaacgtcgtcgacgccgcccgccgctgcggctccgtccgcaagctgctcgtcctcgccagctcgaccatctacccggcggacgcgccgcagccgacgccggagtcggccctcctcaccggcccgccggcggaggggagcgagtggtacgccatcccgaagatcgccgggatcaagatgtgccaggcggtacgcgccgagtacggcttggacgccatcgcggcggcgccgaacaacctgtacgggccgcgccacccgttcccgccggaacactcccacgtcatcccggcgctgatccggcggttccaccgcgcgaagctcgagggcgccggcgaggtggcggtgtggggcagcggcgcggcggcgcgggagttcacccacgtggacgacctcgcggaggcggtggtggtgctgatggagaggtactccggggaggagcacgtgaacgtggggagcggggaggaggtgacggtgagggagctcgcggaggcggtgaggggggtggtcgggtacgagggggtggtggcgtgggacgcggcgcggccggagggggtggcgcggcgggtggtggacagcgggaggatgaggaagctggggtgggagccgagggtggcgctgcgcgacggcatccaggacctctaccgcttctacctgcgtcacgagtgcggcggccaagctcatcatgcatag

SEQ ID NO: 43096 - DNA, 515 bp, Oryza sativa
  Clone ID: PAT_MRT4530_46286C.1
ggtcaaatggccaatgcaattgcttatatgccaggcctaaccgaaagcatcagctgccccagcgtacggcactttcgaaagaggaggaacgacaaaggaaactcgccgaggaaagagagaaaagagcagccgcagccgaaagaagatttgcggctctggcggcacaatcaagtagcacatcagggacagcagcagcagaacatcccccacagagagcagccgcggcagacgatacttcttgttcgtgctgtttttcttccttggtcggcaaagtaccattccacaggtacaattacaagtactgcagcaccacatgtatgcatcttcattcagaaatgctggaagatgattgaggaaatcaggaaattgtatgacgagagacatgagatttaattatacctttcacctgtttttcttatgcatgagattcaataacaggtctatctaccagtcttgcttaatctttagctaatccgaatcttgttacaaatttccaaattaagaaggataaaaaa

SEQ ID NO: 43097 - DNA, 156 bp, Oryza sativa
  Clone ID: PAT_MRT4530_46287C.1
atgttgcccactgcaagaacgaagcggacccaagaaggcgaaggcttcgccgaacaccaagatatgaaagcttttgaaccgaaaagactatcaacagtcatcgattcaaaggaacttctccaaagcaacgcccccaaggaatttctccaatcttag

SEQ ID NO: 43098 - DNA, 355 bp, Oryza sativa
  Clone ID: PAT_MRT4530_46288C.1
tttgtgagttggtaattgatagtagcaagacaatgtgtgggggagcgatcatcgacgacttcgtcccgcccgccggcgcccgccgcgccgacgcctccgacatctgcgacaacgccgtcctctccgctgccggggccggtatttctatctatctactcctattcgacatgaacagatgtttcccatgttcatttctttgcagtcctcgcatgcgcaacgtgtccactgtttagatggatgcacacggatatggaacgtagctgcagagtcctatcctatatatgcgtggttaatcttctaattggctgctttcctgggcaccgtcttttttgtgcaagtgacgagtcgttcgcgg

SEQ ID NO: 43099 - DNA, 1140 bp, Oryza sativa
  Clone ID: PAT_MRT4530_46289C.1
atggctggcagcacgttcaattgtttcggtgcatgcatgcagcatcacgctcaacaagttcatgagcccaagaaggtggtggcgccgtcgtcgagcttcgatttccgggaggagtacacgagcgcgttccggaccgagtcgtacaacgacttctgggcgcgcgtcctggacatcaccctcgcgcacggcgcagccctggtgccgcgccatggcggcggcggcggctgcgcggcgtcgaagcggctcccctcctaccgcctcttcgccgagcacctgctcgagccggaccagcgcgccgtcgccgcagccctcgcgtcgccgcgcgggagccgcctccgccccgacgtgcgcggcctcctcgccgcctactacgccgagacggccaacgcctcgttcctctgcagccacctgctcaaggacatcgagcatatacgcctccgctaccgcccgctcaagcacacgctccgcaagctcgcctccgacgtcggggtgtccggcctcgccgacgtctccgccgcgctggggcagccgttcaccgcgctggccgcgtcgcaggggaggctccgggaggtgcaggccggctcgggcgacctgctcaggggcctcgacgccgggaggaagaaggcgcgccaccggatcaggagcgtcgcgcggctcaggcgggcgctgtcggtgtccttcgtcacggccgtcgccgtcgtggccgtcgtcggcgcctgcatcggcgtgcacatcctggcggcgttcgcggcgttcccgatgatgtcgccggcgtggctaggggagcggttcttctccgggcgggcggcgcggcgggcgctggtgcagctggaggccgcggcgaagggcacgtacatactcaaccgggacatggagacgatcagccggctggtggcgcgggtgcgcgacgagggggaacacatggtggcgctgcggcggctgtgcgtggagcaccggccggcggcgggcgccggcgggaaggggaggctggtgcaggaggtgctgaggcagctgagcaagaacgaggagagcttcaggcagcagctggacgagctcgaggagcacctcttcctctgcttcatgaccaccaacaaagccaggatcatggtgatgaacttcatggctgctgctgcaaggtag

SEQ ID NO: 43100 - DNA, 1163 bp, Oryza sativa
  Clone ID: PAT_MRT4530_4628C.1
gcttatctttgtaaaggttagcaaatcatatccaaatctctgtcagatgctattgtggcaatatttccatgtattacatgcccatacatgtcaactcacaagacatacaaggcaatattgatatgtctttccatagatatcatgatagcaacaatggtaacattatcctccttagcctatatatatgtgggtgaaggagtgtgatccaaaaaaaaattactgatcctccttagccggctgcatacgactgctcaactttaactcatcatcttggtatcgttctccaagctatctcttatgtgttggaaattattatatactttagtttgcacctatagatctaccatttcttatgtattgaggtcgggcctgccctccatcgatggcggactccgcgtgacggctggaggaggcgaggtcgggcctgccctccatcgacgctccacgccgccgcagcccgcagccccgtcggcgccgttgctgcgtcgcttcatcgccgtcccgacctcgaaggagaaccggcttcgagtccctcgcgccgccactgatccagggctcctcaaccctgcaagccgtcgatcccgcctgtgaacaaggacgaaaattcagattgccgaagaaaaattcaggctgacaggacaccatgtcaactgctattgtttgctgcacaatcaacgaaatttttggctgattctactaaatttctgtttggtataggtaatttcttccataatgattaccccttacaaatagatctaatatttgaggactcctgctctgctgttgactacttcactccagttattcaaggcatggcatccatggatgatgtggatttttcaccacatcaagccacacctaaggagtcaatgaactccaaggatgatgcgaaggtgcagccttcgtcagggcaaacaccaaacaaggggaattattacatggggcacgcgaatgccatcatgatgatgtttcaatacatacgtgatggttgccggcgtgttgagagttccatggaagactagaagtgcaagaaggtagaaaaaggacacggtgagaaaaggaaggtgggagaagggtatgatcctcgctggtcttctcccatcgagataacaatgaagatctgcaatgacgacgtctccgatgaagcaaccgagaaggaaaca

SEQ ID NO: 43101 - DNA, 399 bp, Oryza sativa
  Clone ID: PAT_MRT4530_46290C.1
catctacatcaagatgggctacagatgcaactagagatgtatggtgtgctgtgtagaggttttggatgtgggggaaattgaaatgaggctgtttttcctgtgcgaattgctgagtttgcttcaactttcatccttcccatggtcacttttggtggagataacatacagagggagacagctcctcccaatcctgacattgcagcattgctgctaagctcacggggaagatcttggtcatgcgacatctggtgaaattttggttactgtgattgtatctggaatgtgactagatttggctgttaactgtgttgtaaattttgtgttgtattggatgttggtcgagatgtgttggtttgaatctgagattgtatgatagatgggattgaatttggtgggctc

SEQ ID NO: 43102 - DNA, 2223 bp, Oryza sativa
  Clone ID: PAT_MRT4530_46291C.1
atgcagtacctgtacgtgcgcgtggtgcgcgcgcgcggcgtggcggcggtgggcaagaccgtcgcggaggtgaagctgggcaactaccgcggcgtgacgcccgccaccgccgcgcaccactgggaccaggtgttcgccttctccaaggagaccatccagtcctcgttcgtcgaggtgttcgtgcgcgcgcgcggcagcgacgaccacgtcggccgcgtctggttcgacctctccgaggtgccgcgccgagctccaccggacagcacgctcgcgccgcagtggcacatcatggaggaccgcaagggcgagcgcggcgccgcggaggtgatgatcgccgtctggttcggcacccaggccgacgaggccttcgccgaggcctggcattctaaggcggccggcgtccatggctacggaccattgggctccatcaagtccaaggtgtacgttgcccccaagctgtggtaccttcgtgtgtccgtcattgaggcgcaggacttgatccctatggacaagggaccaatggcgattggccggtatccggagctctttgtgcgtgcgcaggttgggagtcaaatgctgcgcacacggcctgcgccagtggcggcgaatcgaggaccatcaagcccgttctggaatgaagacctgatgtttgtggttgctgagccatttgaggagttcttggtgttgtctctggaggatcatgtgtcaccaggaagggatgatgtgcttggccgtcttgttgttccagtatcctccattgagaggcgctgggatgagaagcttgttgtctccaggtggtttgggctggatcgtggcactggtggtggcaatgttgcaagtggcaatacaaataggtttgggagccgtgtgcatctccgcttaagtcttgatgggggataccatgttctggatgaggctactgcttacagcagcgatctccggcctactggaaagcagctgtggcagccacatgttggggtgcttgagctcggtgtgcttggtgcgactggattgataccgatgaaggcccgtgatggcagaggtgcaacctcggatgcatactgtgttgcaaagtatggccagaagtggatccgcactcgtactgtcgtcgactctgtatgccctcggtggaatgagcagtacacatgggaggtgtttgacccttgcactgtcatcacggttggtgtgtttgacaattgccatgttgacaagccagcttctgggaataccacattggctgtccgtgataattgcattggcaaagtacgtatccggctttcaacattggagactgatagggtgtatacacatgcctacccacttctcatgctgcatccatcaggggtcaagaagatgggagagcttcacttagctgtgcgcttctgctgtggcaatgctggcaacatgttccatgcctatgtgcgtccgctgcttccaaagatgcactatattgagccactgcttgtgcgccaggttgagagcctccgctttcaggctaccaatgttgtagcagctcgccttggccgtgctgagccaccacttggcagagaggttgttgagtacatgctagaccaccgttcacatctatggagtatgagacgcagcaaagcaaactttttccgccttgtcactgtactctctggaccgatcactattggcagatggtttgaacttgtccgctcttggaatcgcccggtgcattcatgccttgctgtattcacattcctggtgtttgtcacaatgccggagctgattcttccgacggcattcttggcaatggcattcactgggttatggaggtaccgtgtccgctcaaggcacccgccccacatggagatgaggttgtctcatgcagacgcagccactgtggatgagctagatgaggagtttgacacattcccttcgagcaggggagatgttgtgcgcttcaggtatgaccgccttcgcagcgttgctgggagggtgcagacagtggttggcgacatagcaacacagggtgagcgaatgcaggcccttctcagctggcgtgacccgagggcaacagtgcttttctcgatcgcctgtgtccttgctgcggtcattgcatataccattccgatgaaggtgctggttgggctctggggcctgtatgctatgcgtccgccaagattccgcagcaggatgccatctccgctgatgaacttcttcaggaggctgccatccaaggctgacagccttctctga

SEQ ID NO: 43103 - DNA, 388 bp, Oryza sativa
  Clone ID: PAT_MRT4530_46292C.1
atatggatattaatgaatctagacagagatcataccttaattgtacaactctacatgacaactaggccattcaaagcacgcaagacaggatgcagctgcttgaacggaaaacattcacgggggtctgtcttattaagccacctgtaccgggaaaccgtgcccgggccgcattgaccgtaactgtaacaacagcatggcttcctcgagccctaccaagagcggtacgaccttgagcacctgcctcacgtactatgacattaccttgtagacactggcgccaacgttgctatccaacatcgggacagacaggtagacaaccagggacagtgcgtggtgacaaaagtggatccaccttgagctgtagagactgatcacatccggcctatgc

SEQ ID NO: 43104 - DNA, 1285 bp, Oryza sativa
  Clone ID: PAT_MRT4530_46293C.1
ttttttttttttttttttttgggtagaatgagagcgatatttatatgattatatctccagcagaaatgtttcttaagtggaataaaaaaggaaaacaattacagggaacatattgcaagtgtaatgggaaagggaaaaaaatacagggaacatattttatcacctcaaaagaccaaaaccaaatcgtgaatgggattaggttgggatttaatcattcagaatcaaatctgagtgagattagctaggtcagtatcatcagaattggatgaaggcattcaaaccaagctaactattgctctatgctttagcaaacaattgttaacaataacggggaaaaaataataccaccaaccctcactcaacaagcttataaacttgagcatatccgactgccttcttaacttgcaagtgtcaattcatttcctccgaaccgtgatagcaacatctcaggtaaaactccctcaacatctcggtgcgtgttccacgtttaaccatttgaggcactgatgcacatcaaacagcaggaaacataaatatatggacctttacattataggccattgatgtcttctgaatttaccaggagctatgtatccaacaatttatcttggttcaggctagcttcatgctttttactttcttcccttatgacacgtttaaagttagttagctccgcggactcctcaccatacaccatcttgatggtatccacacaagcactgcaagcttccctgtcaaacgtgctgggtcggcttggcacgccgaagtactcctcgaaaaccttcggttccaccctgcagaagacaggcctctcttcgtagatgttgcaggtgcgagtggacttgtcgtagttgatacaccatccatcggcgccgatcatgctcttgtacagcttgaggtcctcggggtgctcggcgaagatctcctcgggggaggggaagtcggggcccttgtccagcttgcagcacgcgccgcacccggccgcgcacttccaccgcaccacgcgcttcgccttctcctgcttcggcggcggcggcggcggcggcggcttcttcctcctctcgacctcatgcctctgcaacccttgcgccgcctccgccgccgtcctcgcgtctggcttcttcttcttcttcgtctcgccgccccgcagctgcggcgggggtgggggtgggggcttggcctcgccccgccgcccggccttcttcctcctgcccccacccgacgaggaggagaggcccgcgattggggtcagcctggtgggtttgcacctgacgacggcggccat

SEQ ID NO: 43105 - DNA, 1653 bp, Oryza sativa
  Clone ID: PAT_MRT4530_46294C.1
atggtgctcgagctcgaggcgacggtgatatgcgtggacgactccgagtggatgcggaacggcgactacccgccgacgcggctccaggcgcaggaggacgccgccaacctcgtcgtcggcactaaaatgacgtcgaacccggagaacacggtcggggtgctggccatggctggggacagagtgcgcgtgctcctcgcgcccaccagcgaccccgtcaagttcctcgcctgcatgcacgggctggaagctagtggtgaagcaaatttgactgctactctaaatattgctgaactggtacttaaaaatcgtcccgacaaaagactgagtcagaggatagttgtttttgttggcagccctgtaaaagatgaaaagttagagacaattggaaaaaagctgaagaagtataatgtttctcttgatgttgttgaatttggcgaatctgacgatgaaaagcctgagaaactagaagctcttgttgctgcagttggtggcagcagccacatagttcacatcccacctggggaagatcttcgtgccgtccttgccaatacaccgataattactggagatgaaggagggggtgctgcagccggtggagcatctagatatgaatacaatgttgacccaaatgtggatccagagtttgcagaagcacttcgtttatcagagatagcaaggcaagaagctgcagccgatggagcatctagatatgaatacagtgttgacccaaatgcggatccagagttagcagaaacatttcgtttggctgcaggggaaccttcaacctcaaacactgatactgttctcttggaatctgactcagacacttatgttccttttcatgagttcatacaaaataatccttttgtgactggagcggaatctgcctcagatagacctgctgacgatgagagggcaacggaagaagggttccgtatgatacgagaagctcttgcaaggtctgcaaatgcagcacatgctgaaatatcaggcaattcctcatctgggcaggagttggaattaggttggcaggttgcgcttctggtttttttaagtcatttctttgttaataatactggcattaaacaatatccgcaaaggactggagagatatgctttcagtttgaagtggaagatatcatcaatttgatatgctggcaagggtggcagcaatgcaaatacaggaggtcctgtcctagcacacgcacgcggaagctagggcacccgcggagcagggctgaggatgcgcgcgcggcgcttgtcggggataggagccgcggaggcggcggagccgcgccgggccggctgaggtggctgaggtgcgcggaggcgcgtggagccatggaggcggcggatgcgcgcatggccggtgggggcggcggggccacgcgggggcgggcggggctggtggaggcgcgtggggccggcagaggcggcagagtcgcgcgtggcctcgcgctcgtccaccgcctcgtcgccaacggcgacccgcgctctaccccatggtcaaggagagcacgcagctctcctctgatgtcgccgtcgtgctcgccgtcctccttgaccgcttcttcgacatggagcaccgccaagcaaatcgacgacctcctcgccttctacggctggtgcgatgacgtcggcctcgcgcggtag

SEQ ID NO: 43106 - DNA, 2229 bp, Oryza sativa
  Clone ID: PAT_MRT4530_46295C.1
atggggacgtcggtgcaggtgactccgttgagtggcgcgtacggtgagggacccctctgctacctgctcgccgtcgatggcttccgcttcctcctcgactgcggctggaccgacctctgcgacccctcccacctccaacccctcgccaaggttgcaccaacaatagatgcagttcttttgtctcatgccgataccatgcatctaggagctttgccatatgctatgaaacatctcggactatctgcaccagtatatgccacagaacctgtatttagacttggcattttaaccttgtatgattactttatatcacgacggcaagtttcagattttgacttgtttactttggacgatattgatgctgcattccaaaatgttgttagattgaagtactcacagaaccaccttttgaatgataaaggtgaaggaatagttattgctccacatgttgctgggcatgatttgggtggcacggtatggaagataacaaaagatggggaggatgttgtttatgctgttgacttcaaccatcgtaaagagaggcatttgaatggtactgctcttggatcatttgtacggccagctgttctgataactgatgcatacaatgccttgaacaaccatgtctacaaaaggcagcaggatcaagatttcattgatgcattagtgaaagttctaactggtggtggtagtgtgttactgccgattgatacagctggtagagttcttgaaattcttttgatattggagcagtactgggctcaacggcatttgatctaccctatctactttctgacaaatgtttctacgagtactgttgattatgtcaagagttttcttgaatggatgaatgattcaatctcaaagtcttttgaacacactagagacaatgccttcctattaaaatgtgttacacagataataaacaaagatgagcttgaaaagctgggagatgcaccaaaggtggttctagcatccatggcaagcttggaggttggcttttctcatgacatatttgttgatatggcaaatgaagcaaagaatctagtactttttactgagaagggacagtttgggacactagctcgcatgctccaagtagatccacctccaaaagctgtaaaggtcactatgagcaagcgaattcctttagttggtgatgagctgaaagcttacgaagaagaacaagaacggataaaaaaggaggaagcgctaaaggccagtctaaacaaagaggaggaaaagaaggcgtctcttggatcaaacgcaaaggcttctgatcccatggttattgatgccagcacatctcgcaaaccatccaacgctggttcaaagtttggcgggaatgtggatattctcattgatggatttgtccctccatcatcaagtgttgctccaatgtttcctttctttgaaaatacttctgaatgggatgacttcggtgaggttatcaaccctgaagactatctgatgaagcaagaagaaatggataatactttgatgcccggtgctggggatggtatggatagtatgcttgatgagggctcagcacgcctactccttgattctacaccctcaaaagttatttccaacgagatgactgtgcaagtcaagtgttcattagcatatatggactttgaaggtcggtctgatgggcgctctgtaaaatctgttattgctcatgtggccccattaaaacttgttttggttcatggatcagcagaagctactgagcatttaaaaatgcattgttcgaagaactcagacttgcatgtttatgctcctcagatagaagaaactattgatgtgacatcagatttatgtgcttacaaggtacaactttcggagaagttaatgagtaatgttatttctaagaagttgggtgagcatgaaattgcatgggtagatgcagaggttggaaaaacagatgacaagcttactttgttgcccccgtcgtcaactccagcagcccacaagtcagttcttgtgggtgatttgaaattggctgattttaagcaattcctggcaaataaagggctaagagatttcttgcaggttgaatttgctggtggtgctttacggtgtggtgaatacatcacactgcgcaagattggtgatgctggccaaaagggcagcacaggttcccagcagattgtgatcgaagggcccctgtgtgaggactattacaagattcgtgagcttctttactctcagttctacttgttgtaa

SEQ ID NO: 43107 - DNA, 1420 bp, Oryza sativa
  Clone ID: PAT_MRT4530_46296C.1
cgagcaatacactacgaagtgtatctcgaaattaattaaccacaagattaacaggatcatccgtagtaagctagttagcttgaaaaatcaaaacgggctgcagttacaaactgggtaataaggggatcttgcggtagtgctcttcactcctttcttacatgcattcaactacgagtaattaacctttattacaaagtacatactaattctatccgatatgcatgcatgcagcagatcgatcgatttctatacacaaaactcttatactatatagcagcacacagctccaatcatatacacacacagatgaggacacacaatataatcacacacaatataagcagctagggtaggtaacaacaaattaaagaacaagctggagagaagaagaaaacaaaaacggccgtacgagtggaagcaaaacctcgcgtcttctcaactcataagtcatcaccgacaccaacctttcttgatttcctccatcttggacagcgatgcacgccgaaagatgcttgtcgcgttctcgatcaccccggccggcgtacgatcgattgcgcgctcgaccctccgtctatagctgtgttctcgtctctcccggcgacggcgacggcgaggcgtcacaccgggcagtcgtcatccttgggctgatcgttcttggccggctcggcggcggcggggtggagcagcacggcggcgcggcagagcgggcaggtggagtggagctggagccacgcgccgatgcagtcggcgtggaaccggtggccgcaccgggggaggaggcgcgcccggtcgccgtcgcggaactccacgatgcacaccgcgcactccgccgccgccgccgccttcccgttccccccggcgtcgccgacgtcgggggcggcggcggaggaggagtacacgaacacgggcagggacgacgcgatgtcctcccgatcctggtggtggcgccctggcgacgtgtcggccgacgacgacgacgacgacgccccctcctcctcgtcgtcgtcgccgccgctggccatcgttgacgttgacgacgtcggcgggccacgcttcccggagaagaaccgccagaagtagaagaacacgaggaggaccatgagcaggttgatcccgacgaggcacgccgtcagcaccggcccgtgccgcgtccagtgcttgctcgggtcctccaccaccgccgccgccggcgccaccatctgcaccgtcggcgtcgacatggcgccgatgatgaccgaaacaataaggtagcttctgacaacacaagcagcaaacagtagcagctgccaatggtgtgcataaaccacaaaaagccactgcttcagaacagaagaagctggagattgcagatgttctttagaagaaaagataggggaagaagaagagatagaagataaggaggagcacaagagggaagaaa

SEQ ID NO: 43108 - DNA, 198 bp, Oryza sativa
  Clone ID: PAT_MRT4530_46297C.1
atgctgactcgacatctccaaatcaagcaaggcaatcagattccagaggtatggatgttgttcactgtttatgaggtggccattgaagattcgagcgacaacctgctcaattggtggtccttgtatgaaagatcaagtacctccaagtcggacaacgaatcaatatttgaagaaatagatccactggatggttgtgac

SEQ ID NO: 43109 - DNA, 182 bp, Oryza sativa
  Clone ID: PAT_MRT4530_46298C.1
caacctaaagccctcttttttcatttttttttttttttttttttttcgggaattaaagccggtggtccattttaccatacccaggttttgtttacaggattcccaaaatcttctcccgaggacgggtgttattttttaaaaagcacagggtcaaatttttgggacaaaattttttgatcccc

SEQ ID NO: 43110 - DNA, 680 bp, Oryza sativa
  Clone ID: PAT_MRT4530_46299C.1
gtggatcccccggggctgcaggaatcggcacgaggccctctccctctgtcttctttttttttttttcggctccgcggcctgtcccccgccgtcttcctcctccctctcagtcgccggcgcgccccgtcgcctccttcctccctctccctcagtcaccgaatccgccacaggtgaccacgagcacgagcgcgggcggaggagctcgggcgtgggcggggagggcggatctgccaccgtcgagccgcggggagggcagatccgccgctgccgggccgcgggaagggcgcctccaacctcgtctttcgggccgcgccatccaccaccaccggtacgtccgtctcctcctccttcctccctctcggcctctccctcagccgccgaatccgccacgggtggccacgagctcggacgcgggtgaggagggcggatccgccgccgccgtgccatggggagggcggatccatcaccgttgggccgcggggagggcggatctgccgccgccgcagggagggcgcctccaccgccgcctccaacctcgtcttctgggccgcaccaccaccacccgccgtcgcgtgcccgcctccgccgtgcggttcgaccggccctccgcggtgctcctgctcctgtccgcggcggagacgggcttgtgcaggccagggcggtcgccgccgccgaggcat

SEQ ID NO: 43111 - DNA, 717 bp, Oryza sativa
  Clone ID: PAT_MRT4530_4629C.1
ggtatttccataattttcatcaagatcatacctgaacattggagcacatcctggagttcaaatttcttttttatcaacagatgatggctcagagacatgttcctcggtcgaattgatcgaagtagacggttcagtctttgattcgattaacaagggttcctcgatcctagccacatatgcctcagggaggggttcattgcactgttccatgaagtaagttttttccataattcagtctaggattacttttccttcggatagagttatatgtatgaacgaccctccggcagtaatgtctagataaaatgcagactccttataactgaggatttccacacgaagcgcagtaatacgggttataggaaaaaaggcaaggcagaacctgtctcgtaatttctcccagttaccgcttacacacctgacgatagatgtgtaccattgttttgctctctcttgaaggtagaacagaaacaatttccactgtacagtttcttgcttcatgcctcgaatctaaaggcatgagcaaagctgctcaaattcccgcagatgatggtaggagttttcttggtcaagaccaaagaaaggtttttccctaaccatacttattaatttggggcgaatttcgtagccagttgtaaaaattggctcttatgaaggaggtggctcgtagaattcgcccctaggggctgattgttgacggctgtttagtaccaaatt

SEQ ID NO: 43112 - DNA, 398 bp, Oryza sativa
  Clone ID: PAT_MRT4530_462C.1
ggaagataaacaaccttaacaacaaaattggggggggttctatagagagaaacagagctacttccatacacgggatagaaccaaccaactgaaatgatgaaggggtgaaaaacagaaagaaggccccggaccccaacacccaggacaccgccgcgcgccgcgtaacccgagcccaatattttgaccccaaccacggggctggctatataacacaccggggagaacaccgagccacccccctgttacaaacggggttgcctggcaccctaaaaaggggcaccaatgccacaaccccggggccggcgacggggcccccctccctttaaaccgcgggggcgccccaaaaagggacgggtaaaagccgtcccccggcggaagaatgggagggcccgcctccg

SEQ ID NO: 43113 - DNA, 420 bp, Oryza sativa
  Clone ID: PAT_MRT4530_46300C.1
atgacggcggggaagcacgtcaacggcggcagcggcgtagcctcctcgatggatccgatggtagcgaccctgccctgcgtggatccggtagtaggggccatcccccttgcagatccggcggtagtagcctcgggagggcggatccgccaccagcctttggtgcggtggggtatcgatgacgacaacagtgggggccctctcctagccggatcctacggcgggggccctcctccctcacggatccggcggcaacggcctcaggacaggcggacaggtggcctctggtgcggcggggtatcaatggcgacgacggcagcggactgcatcgatgacgacgacagtggtcctcttcctcacggatccaacggcgcagccttggtagtggcggactcacgcctgtggcggcagtgcctgatctag

SEQ ID NO: 43114 - DNA, 1518 bp, Oryza sativa
  Clone ID: PAT_MRT4530_46301C.1
atgtccatgcgttacaacgggggtatcttaatctttgtcaatggcgatgccaacgccatgacaattcttttcgttgattcaccgtatgctcctgtgcggctactagctggtaaccacctacctcctttccttcccatcctcgatgcagctgacccgcgtttgggtttatttgcttgcaagcaaacatcccctgtgctaactgctaagcgcagcagtgattttgatgtatttatgatatgtgggccagttgctgtttggtcctattttgcgcgagatttggttggaatcccctgctctgcccgatttgggcttgaattcggtagtggtagggcttttatttatgggttccccttaccgttttcggcgtggttaccggacccccgcggtaaccgccaaaaaccacacaaatttcagtttcaaaaatttgaattcaaaacaaccgtgataccgcagttttgggcgcagtttggggcggttactgcggtatttgcgcgaacattaggcatccaaacatcgtctcgatacaaaatttttatgatgaagctggtgaggccagatttgtcatctcatgggttgatgggacccttctttgcatggattaagtccaaaaaaggacaacagggaatcattgagtcttcacatatcagcagtcgcccttcaacaacattccgccaaatcattattggaatcagcaaggctctggattgtcttctacaacacaacatttaccctagcgagattcgaattgaagatgtatatgttcgagtgaagggtggaattaccacagttaaactgcttgtttatgaagctcaattggcaacatcaagaaatactactgctagtaatcagaatgcacagaggatcaaactgtggaaagatgtaaaaggggttgcagacaaatgtgtagaacttgctgggcttaaaaagcagatccatcctgactgtgataggtttttgaaatatattggtgctgggaatgtcaagtggttagaggattacccggatgaatggaatgatgacaaaaaggcctgttacttgaaggcacttgtggcgtctgattctaaatatgtcagatccaagctgcaactcattggttttacatggcctgactacagtgacttcctcaacaacttgataactgatcaagtgaccagattggacataaagtacaacattttggatccttatgactacctgcgattgtgcagaaacctggtcaaacattggctctctctgccctctaatctacgggagaagaatgatgattacgctttcttccttcgaaagatggagaagtggacaccgaggatttggtgtaacctgtatgaggccattgggtggcctccgaatttggttctgtatatttctgagttgcagcagcaacaggttttgatcgtgtcagtgccaaatgaaagaaatatcaaggttttcggagtagcagcagcttttgacagtgtgagggacagatttcgatcaaggttttctgagttgcagcaatttaagaaaacgcaatgctga

SEQ ID NO: 43115 - DNA, 612 bp, Oryza sativa
  Clone ID: PAT_MRT4530_46302C.1
atggccaagtcctacatcgatcacgatggcaagaggccgcatccaggggcgctgcatttcatggacaggttccgcaatttcccatgtcccttgctcaacctccagcccaccccaatgcatcaccgaaacgaaagatctctcgacttggtcacccttctcggcgacgacgagaccaagatcctcaccgccgacaaccatggacacaccgtgctcttcgacgccgcctcctactccgtcgtccacttccccaacctcaattgttccaaggggtatgatgccatggccgtctccatcaaccaagaaccggactgcctctacgtcctcaacctcagacaccaccccactaccagcaaccattgcttcgaggtgctcagctatggggttttttgtgaaaggatccccatatggcgttctctaccgccgccgcccttcacaacgaccacccaaactacaattacctcctacacaacactatctacgtttcttccaagctctgtggcactcacgcctttgacacgatggtgcctccccgtggtaccaaagatgatcaacaagccccctggatggtcaagcacaagtccatatgctacccatttggctactataacataa

SEQ ID NO: 43116 - DNA, 783 bp, Oryza sativa
  Clone ID: PAT_MRT4530_46303C.1
atggtgcttggcgctcgcctcctcctgggcctcgccctcctcgccgcgctgctcgccgtcgtcctccagctctaccgcctcaggaagccggtgcgttctctacttctacttctcccgaaattttccactggcttacctgtgagtttgagctcggtgtttgatgtcacaaaagggaagtcgaattatggtcctggaggtggttatcatcacttcgctggcagttcttggaagctcgccaaatttcaatttctgccagaaattgatgtaataggatctgcatccacatctttcccttcaagtgatggtttgacagattctttacagggcttatctagcatggagtattatgcctgtgtgttctctaaaaaaggtattattggttttgtaacttcctttcaggtaaacagcattgttgactggagaaaattttacttcgagagatacatattcgctggtaaaatcgttggacgctactacgacgatgaaggcaaccctacaaaatatctcaagggtatagagatgaaggcaaagagaggtgctcagcttcttgagaaacagaagagtgaagaagctaaaatacccaactgtaattcgaaatggagccagcaagagggtggtgaagtttggtgcgaaacaggctatccaagattagtcagaagaccaggtgacatagctctgacggggcaagttagccagcggtgtgcctgttacaaggaggaggagttggacaaggctggcctggttgtgtacgaagggtgtgattatttgtctacatcttgcaaa

SEQ ID NO: 43117 - DNA, 809 bp, Oryza sativa
  Clone ID: PAT_MRT4530_46304C.1
ccatgttctcattcgtcggcacgagccccacattcgcaaacgaggagactgtgaccgagaatgagaagctctctctatctacatggactactaaggtgtgtatggcagccctagccagcctccaaagatcagcttcgtctatcatggcccgagcgatctccacccaagttatgctgacctgattgaaaactctattgtttctctctttccagatcgtccatgctaccagggttgcgatggtgtcaaatccccgacgatgcgccttggtcatcttctttttgctatcacagagccaatgatgaaaggaaggttcattgatcggcaagcatttcgaaagcccaattgctctgagagcaatccaccacagctgccaagactctggacatgcaaccaaaaggtgatcgatagtctcgtcactttgatcacaaagaacgcaacgcacagggtgcgacaagccatggctctggagacggtctgccgtccagcatctgttgagagcgaccaaccaaagtaagtagcgacaacgaggaggcgccaaggatttccaattaggcttgtactccaagtcagagagtcaggctcatccgagagttgaactgatctgaggatgtcctagagttggctctgctcccggatagcttggacgccaagagcggcggtgatgttcctaatccaccctctgtcgtgaagcgcctcagccaccgtacggcgatttctcaaacgggcagggacaaccgtgtatacggccggtgccaatgagcgaaccgatgagcgttgatcggcatctattgctaggtgcatgtgcaact

SEQ ID NO: 43118 - DNA, 392 bp, Oryza sativa
  Clone ID: PAT_MRT4530_46305C.1
ttcggccttcctttttttttttttttttgttttttgtttttttctttttttttccgccaaccgctgaattaaatcgaacttttacagatcaggtacgcagttgcaatagacaagtcacaagtttcgccaccaaagggggaaagaacagttgaacaaattttccaacaacatccaggcactggaatttttaacccaggccgatagacacctcaggcctcagcccccaaaatccagaccaccatgctaaaccggggggggcttgattttaattgcagggagggggctaatattcgcaatcaagatcctaacaaggaggggcactttttaatcaccctgggggaagaatattgggatcttcctgagttttacacaattgaacatttcttctattt

SEQ ID NO: 43119 - DNA, 881 bp, Oryza sativa
  Clone ID: PAT_MRT4530_46306C.1
atggccatgttggagaccggtgggtttggactggacgacagtgtggcaccattgtggcagaaccgcagtctagcaaaggttgttcggttggtggagaaccgaggtggcgaagataggtgcgggaagggtgctgcaggaaaaagcttagctcagggtttccctgagctggcaacaatgacatctttgagcgccatgatcgccccttggggcgttgttgagctaccaccctcccactccttggcagggcgctccagccagagtggcgccgcccctcataccacggcgccagcatggctggcgcgcccctcctctgcgggccccaccaactttctccctcccctcaaaattttcaccctgttctgcctccgggcaacggctggcgccccccctcccctcctagaccgcggcgaccccgatgcggacaaccccgacgacgacgactgggcggcgacgacgaatggacgcccgaatctggcgggcaaaggtagcggagagcggcgcaacgatgacgctgaccccgcgacaacgacgacgaccccgacgacgagtgggctcccggatccggcgggcggaggtggccgagagcggtgcgacgacgaccccaacgacgatcccgacgaccacgacaactgggcggcgatggggcggcgacgtgggcctcgtccctcccggatccgacggcggcgggcctcgtcccgtccagatcggcggtggcgggcctcgtcccactcggatccggcgagagcgagggtggccggcggtgggagagggagcgggagcgggcggcggcggaaccggggcgggcggcggtgggagcgggggcaggtggcacgggagcggtcggcgagctcgggcagcggcaccgccgcctgcgggctagg

SEQ ID NO: 43120 - DNA, 181 bp, Oryza sativa
  Clone ID: PAT_MRT4530_46307C.1
atggttgagggggtttacctgtacaatcctaatggaccattactttacaatatgggggtcaaatcacaaggtctaacacgaatgtacttatagttaagacggcataaatggttacataacattttccacaaaagaaaaaccaccacatgcattaacttctttaggagggggtaccctaaaa

SEQ ID NO: 43121 - DNA, 319 bp, Oryza sativa
  Clone ID: PAT_MRT4530_46308C.1
gggggggggggttttaaattttttttttttttttggggggcggaatttcattctttggcgcctcagaacattttacatggcggggatacacagagggcccatgataaagcaccctgaacttgggagcatgcaatcctcacaagaaaacacggggggggggcgaccctttggacgaaccccacttattagggccgaaaacaatatggcggaagcacagcccctccttacaggccaagacccggttaaaggccctaatataaaccgctaaaaaatctggaatcaaggggaccccaccggaaaggaataaaagccggagaac

SEQ ID NO: 43122 - DNA, 1104 bp, Oryza sativa
  Clone ID: PAT_MRT4530_46309C.1
gcacggggggactgagagctagtggtgcactagctggctgtgaatctagccatggctctgtccacgttcgtccttgccgttcttgtcatgagcggcgccgccgcccttggccgcgagctcgccggcgacggcgccgccgccgccgcggcggccgacgtggccatggcgtcgaggcacgagaagtggatggcgaagcacgggaagacgtacaaggacgaggaggagaaggcgcggcggctggaggtgttcagggcgaacgccaagctgatcgactcgttcaacgccgccgcggagaaggacggcggcggcggccaccggctggccaccaacaggttcgccgacctcaccgacgacgagttccgtgccgccagaaccggctaccagcgcccgccggcggccgttgccggcgccggcggcgggttcctgtacgagaacttcagcctcgccgccgcgccgcagagcatggactggagggccatgggcgccgtcaccggcgtcaaggaccaaggctcgtgcggttgttgctgggcgttctcggcggtggcggcggtggaagggctggcgaagatcaggacggggcagctggtgtcgctgtcggagcaggagctggtggactgcgacgtccgcggcgaggaccagggctgcgagggcggcctcatggacaccgcgttccagtacatcgcgcgccgcggcggcctcgccgcggagtcgtcctacccgtaccgcggcgtggacggcgcgtgccgcgccgccgctgggcgcgcggcggcgtccatccgggggttccaggacgtgccgtcgaacgacgagggcgcgctcatggcggccgtggcgcgccagccggtgtccgtggccatcaacggcgccgggtacgtgttccggttctacgaccgcggcgtgctcggcggcgccgggtgcggcacggagctgaaccacgccgtgacggcggtcgggtacggcacggcgagcgacggcacgggctactggctgatgaagaactcgtggggcgcgtcgtggggcgagggcggctacgtcaggatccgccgcggcgtcggccgcgagggcgcctgcggcatcgcacagatggcctcctaccccgtctga

SEQ ID NO: 43123 - DNA, 1076 bp, Oryza sativa
  Clone ID: PAT_MRT4530_4630C.1
ttttttttttttttttttttgaagagattgaaaacaaggataattgattatcttcggagttcggagtgagctcaaacaaagatgagaattttcttttctttttttttctcttctttgtttgagctcgattctgattctctcttgctaggaattacaactagttaattaattaaaagacattagtagagcaaaagaagggcgctgattaggacatgaaagcatggtaattaacggcctagtcaaacactaacacggtaaaacctctccctctctcatctgatcatctcatggacaattagaagcgacgacgctgcagctgctgctctcttctccctcctcccccgcgtcgccgccgtccgtcacgcaggacgacggcgaggacggcatgtcgtcgtcgtcggcggcggcggctcgccggcgtggcgcgccacggatggacggcggcgaacggcggtgagccagcgtggtggtcttcttgaatacgcggcagaccacccagacgtcgttggcctccggcggatggtcgtcggcggggaggaggcggtactcgtgcatggcccagtcggtgcgggcgccgccgcggcggaagaagacgagcgtccgcttggcgccgacgggccgcttgccgcagcgcggcgcgacgacgagcttctccttcccggacgccctccacgcgccgccgccgccgcccgccctgctcccgccgccgcccctccgccagcagctcgtcgccggcaggtggaagaagtacctctcgccgtctccctcgcctggaaggtcccatggatggaggcgggcgaggtcggcgacggggatgacgtcggcggggagggggcgcgacatgaccttgcggcggaggtagtggagcaggagctcctcgtcggtgggtcggaaccggaaaccgatcggcaaccccgcctgcggcagcatccggtacccaccaccgccaccggaggccgcctccgccgccatgaatgagagcttagacgccggcgacgacctcgctggcgggcggcggcgcgggtcggggttgggtttgttggtcagctcgcttattacatgtcaggtaagagctc

SEQ ID NO: 43124 - DNA, 386 bp, Oryza sativa
  Clone ID: PAT_MRT4530_46310C.1
acacgcgcgtttatacgccgcctcctccttctcctcctaggggcatttttactcgccggggggggcttaaacagcggagaggcgacatgaggtagatcctgaacatccagagaggccaatgcgggtaccatatcggggacaagctatgggaggtgatcttcgaccagcaccgaatccaacacacctgcgagtactcccttgactacaacctacagctggaacgagtcaacgcctactacaacgaggtcagagtacaccattacttgccccactgcatgctaatggtcctttagcccgagaccatggactcctgcctctcagaacattattggcagaccttacagcaatggatctcgttcttcggacttttcgaagaccagcacaac

SEQ ID NO: 43125 - DNA, 1668 bp, Oryza sativa
  Clone ID: PAT_MRT4530_46311C.1
atgccgtcgccgtcgccgagcgcaccacctccgcctccgcctcgcgtcgctgctgtcgaccgccgacgtctggatccggcctccattccagatcccacttcgccgccgcactccctgctcctgccgccgccgctcctggtgctgcagatcgagggacgactcaagacggcgagcttcatgtggcggagtattccttgtggcggcggcgactacatattcccgacggtgacggcgtctttcggcgacaacgggtctactgatgataacttgactcaggagaggctggacatcggcaagcaggagctggggaacatcgacaacgagctagaagcgcagattatggcgcaggaagggaaattggatctgctgctcaagacaatggaggagaatgagaagaagagggcggaagcggaggagcggagtcggctggatctgaaggacctcaaggcggcggtagaagcaagacttccacaagtggagaagcaggtggtggatctccatgcatctctgggtaacctcagtgcgaaggtggagcagatggagagttctctgttgaagcagagccgcggagacaaggggattggagaagagaccctggttcgccagtggttccatatcagacaaactggatcagtgtctgaatatgtggagaagtttgattgtttgatgcatcagctcttggcttatgaacaaattgtgcccccagtttattttgttcagaagtttatagatggactgaaggatgaattggtggggatggcaaagtctggtgctattatgtacatgataaaaattgatgaggttgtgactgaaggggaaacagaaatcccagctcctatccagcaagtaattcaacagtttcaggaagtttttgctgaacctaagggagcaccagctacatttcaagctgccatgaacaagaccctggctccagtgttgagaaggtctactgatgataacctgactcaggagaggctggacatcggcaagcaggagctagggaacatcgacaacgagctggaaggtgtacaggatggaggcgcactgaaggaaggcgttggctcacaaggaaagcgtgttcgtattgctaatagaaacctcgcgccgccgtcgtcgccgccgctccagccgtgcgtcgccgttgctccagtcgtcgccgtcgttcgggaaggccgccgtcgtggtcgccgtcgcgtcgccgtcctcgtccgcccctccatcgttgctgtagaccgccagagcaccgccgtcgtcgtcaagccgatcttctccgccgccttttcctcgacgccgtctccgtccgttgatcttccgccgccgttttggtcaccggtgagttcgccgcgtcgctctctacgtgctggtgccctccgtttgtgccgtcgcgccgtcgttcgccgacgagcttgcgcgcccgagccgccgccggtggtgacgtcaccgctgacgttatcgtcgtcgtctctcgtggtccggccgtggaccgggggtgattatgatccaggaaaggtgcgctgtggtggattgtgttgtgcgaggggtactgtcacagctcctttccgaggtaccatggtggtattgaggcacatggtgacatgttgtggggctgtgtcttgtgggtacagtgaggaggagttctacagtgatgctgatggtgtggaggattag

SEQ ID NO: 43126 - DNA, 369 bp, Oryza sativa
  Clone ID: PAT_MRT4530_46312C.1
atgacgtcagcggtgacgtcaccaccggcggcggctcaagcgtgcaagctcgccggcgaacgacggcgcgacggcacgaacggagggcaccagcacgtagagggcgacgcggcgaactcaccggtgaccaaaacaacggcggaagatccaagaaaggagacggcgtcgagaaagagcggcggcgacgattggcttgacgacgacggcggtgttccggcggtcgacagcgacggcagaggggcggacgaggacggcgacgcgacggcgaccacgatggcgacctccccgagcgacggcgacgactggagcgacggcggcgcacggctggagcggcggcgacgacagcggcgcgaggtctcacggggctag

SEQ ID NO: 43127 - DNA, 672 bp, Oryza sativa
  Clone ID: PAT_MRT4530_46313C.1
atgacgtcagcggtgacgtcacctccggcggcggctcgggcgcgcatgctcgccggcgaacgacggcgcgacggcacgaacggagggcaccagcacgtagagagcgacgcggcgaactcaccggtgaccaaaacggcggcggaagatcaacggacggcggcggcgtcgaggaaaaggcgcgacggcgaaggggcggacgaggacagcgacgcgacggcgaccacgatggcgacctccccgagcgacggcgacgactggagcgacggcggcgcacggctggagcggcggcgacgacggcggcacgaggttacacgcccgtcaagggtgaccaacacctctgacaagttcaactcaccactcgtcacagccaccggtggggtggtgaagaagaagccgcccgccaatgaagaggtgctggatccatggtgggggagagcccgcggtgaaggcggctcccgccggatctgccagccgccgatccggtggccggtggtcggaagtcggccgggggaggcggcgccggccgccggtctggaggcggaggatgaagcggccggtggtggccactactcgcgcgtggagtcggatgccgccgccagacctgcacctttggttttcaaggatcaaaagaagaagaagcgcgactggctcaaatcgagccaattcatctag

SEQ ID NO: 43128 - DNA, 1419 bp, Oryza sativa
  Clone ID: PAT_MRT4530_46314C.1
atggtgatcttggagcagccacagctgctccttcttcttcttcttcttgtagcagctgcagctgcaaccggcgccacagcagccgacgacgagttggagtgtccctcctccatcttcgatcacgctgtgaactctcaaggcgccattcagttccccgtgttccacaagaagcaccaatgcctccgcccatggtctgtccgtgcaacccaggcatcctcgaccggagcatcaggagcaggaaaaggaggaggattgaacaatctacaggaagaggagatcacttcatcaagtagtacaaaaatcgacgtgatcgaagacagcagcatcaacgacttcctgttcctaatggccgtcagtctgggcaagccaccggttgtgaacctggtggcgatcgacacgggatccaccctctcgtgggtgcaatgccagccgtgcgcggtgcactgccacacgcagtccgcgaaggccggcccgatattcgatcccggcagatcctacacatcccggcgagttcgctgctcgtcggtcaagtgcggcgagctgaggtacgatctgcggctccagcaagccaattgcatggagaaggaagacagctgcacgtacagcgtcacgtacgggaacgggtgggcgtacagcgtgggcaagatggtgacagacacgctgaggattggggactcgtttatggatctcatgttcgggtgcagcatggatgtcaagtacagcgaattcgaggccggcatctttggtttcggcagcagcagcttctctttcttcgagcagctggcagggtaccctgatattctgagttacaaggcattaagctactgcttgcccactgacgagaccaagcccggatacatgatcctgggaagatacgaccgtgccgccatggatgggggttacactcctctcttccggtcaatcaacaggccaacctactcactgacgatggagatgcttatcgccaacgggcagagattggtgacatcgtcttcggagatgatcgtcgattccggggcccagaggacgtccctgtggccttccacttttgctctccttgacaagaccatcacgcaggcaatgtcgtcgattgggtatcaccggacatcaagagcgcgccaagaatcatacatctgctacttatcggagcacgactattctggttggaacggcaccatcacgcccttctccaactggtccgccttgcctctgctggagatcggcttcgccggcggtgctgcactcgctttgccacccagaaacgtcttctacaacgatccacaccgcggtttgtgcatgacctttgctcagaatcctgctctcaggtctcagatactggggaacagggttactcgatccttcggaacaaccttcgacatccaggggaaacaattcggcttcaaatatgccgtttgctga

SEQ ID NO: 43129 - DNA, 606 bp, Oryza sativa
  Clone ID: PAT_MRT4530_46315C.1
gtctaaaacttaaatagtaagttatcccatgaaaggtattgtcacatttccccactccagggcttgttagcaaggcattattgggcaaacgaataaccgttgtatcattgaagcctctctttttcttgtattagacggcaattccgactctgcacggaaagtatcattttaccctaaatctcccgtgcactaaattttaactacgcttttttttatgaattagggccttgacctgaccatgtaagctctgattttttgtcctgcgaagacttaatattggcagacccagcggttgaactggtatacccttaaccatcactttacacattgttttatgcatcctttatctgcacaatagcatttccttcctttaaaagaacattatgaactgccatgcactatacaattgcatgtatttggttacatataatattatcatcaacaatgtggtaactcagaactccctttcaaaaagaaatgaaagcttcatgattattgatggcaatttcctgagcagtattgagcgaagaagtgctttattcttagtcttgcttgctcataccatggtagatagaagaaccaattaattatcagttgatttggatt

SEQ ID NO: 43130 - DNA, 881 bp, Oryza sativa
  Clone ID: PAT_MRT4530_46316C.1
tatttttgaaaaggaaaaaggggtttattgcgtcagcggctagggtttgcggtggaccgagtgcacggggcggctcacagaaacgaacggccgagatccatccatccaaaactgacggccaagatccatcggtccacgaccggaccacgggggacgacgacgatgacgtcagcggtgacgtcaccaccggcggcggctcgggcgtgcaagctcgccggcgaacgacggcgcgacggcacgaacggagggcaccagcacgtagaaagcgacgcggcgaactcaccggtgaccaaagaagaagcggcggcaaccttcggcttgacgacgatggcggtgctccggcggtctacagcaacgatggaggggcggacgaggacggcgacgcgacggcgaccacgacggcggccttcccgagcaacggcgacgactagagcgacgacgacgcacggctggagcgacggcgacgacggcggcgcgaggtcccacggggctagggctctacgggcgaagagagacgaaggcgagggtggcgacgggggcaaggaggcggcggcgaaggcccacggcgaccggcgacgcgatagaaggtttagggttcggaggagagagatcgatccgaattgaactcgaatccacggatttccaaagcgatttagacgatgtttccaaaagggaaaagatagagtggatcacggggatcctttctcctcaattgatttcaccggaaacggaaaggggcggcgggccccacctgtcagcggcgaacgcgcgcacgggcgggcgactgcgggccggcttgggccggggagagagagagagagaaggttttgggccgactttcggcccaaagccaaaagagacttttaaaaccttttccaatt

SEQ ID NO: 43131 - DNA, 1103 bp, Oryza sativa
  Clone ID: PAT_MRT4530_46317C.1
atgctgttgcggacacaatcctcttatgctgtctttggaccgaacagagctcacaatcctccgcaacagccacaacggggaatggctcatgggctcggcccatatggcagaaaaaacagcccacgcggtatcgacgccacctccgagccacagccgccggcgccgctaggaaacaaatgggggaggggaggcctctgcgccatcggcgtcgccgccaccgccgcagcctgcacctcccgacgtggaggtcgcggctgcctcgacgacaacggcttccacggtggtgccctcgcggagtcttttgccaccacccacctcggggctctcatacacctaggggacccccggtgtctccgctacccgtcgccaccctcgccttcgtctctcttcgcccgtagagccctagacccgtgggacctcgtgccgccgtcgtcgccgccgctccagccgtgcgtcgccgtcgctccagtcgtcgccgtcgctcgggaaggccgccgtcgtggtcgccgtcacgtcgccgtcctcgtccgcccctccatcgttgctgtagaccgccggagcaccgccgtcgtcgtcaagccgaaggttgccgccgcttcttcctcgacgccgtcgccgtccgttgatcttccgccgccgttttggtcaccggtagttcgccgcgtcgctctctacgtgctggtgccctccgttcgtgccgtcgcgccgtcgttcgccggcgagcttgcacgcccgagccgccgccggtggtgacgtcaccgctgacgtcatcgtcgtcgtcccccgtggtccggtcgtggaccgatggatcttggccgaatggtgcactgtggtggattgtgttgtgcgaggggtactgtcacagcccctttctgaggtaccgtggtggtattgaggcgcatgcggtggaggacggcggcggcgcccgcgcgggggagggcagcggcggtggccgccgcgcggtggagggcggcggccgcggtgcggtggagggcggcgcggtggagggcggcggcggcggccgacgccgcgaggtggagggcggagccggcgtctgcggcgcggtggaggctggaggaggcggagcgatggaggctggatga

SEQ ID NO: 43132 - DNA, 927 bp, Oryza sativa
  Clone ID: PAT_MRT4530_46318C.1
atgggtatctcaagtgctctgcaacggtgggaggagtggcagctgcgcatactcgccctcagcagcctcgttgttcagtacatcctcctcatcatgtctcctcggcgtggtgacacattattgctgctaacagcggtgtttcttttcatccctggggttctgaaatgcttggagaaaccttgggccctccatagtgctagcattaatagcctagtgaactctccgcaaaatgttcggaggacaacaggcagaaatggcaagattgattcaattgatgatttcgtgacgatggtgaggggctattattctgatgttaatggaacaccaggaacaacggtgaactttgacccaagtgaaatatttgtagacctttcatctccttcttttgattatcggcttaagaaactaaagtggttctcagcacttgacgcagacaaaacaaatggttggctgcagaaagggttatctcacaccttcgatcttctctacacgaaacgaaagatgtaccttcctcctgaaggtcgtgttcaacaaatgatgcaaaatgtcaaacgagattggttgaaggggttatttagaaaatcaattgttggttcactgctacgtatgatagctttatacctgcaatttggagccataggcctatttcaccacagtcacagacaagcttacaatgatagggatgtgaagcacttgaatttttttggccaacttgctctggatattgttaacactgctgaaaggaagtcgagttcatccatagggagaagcaaaactggtatggatggcaatgtttcccagcatatggatgccatgctttaccaacacaacctcattggatgcttcatctgtaaccaaaggcattacattaggagctttgcgacagttttgggtgcaaggactaccttgatcagaggtggcaaatga

SEQ ID NO: 43133 - DNA, 933 bp, Oryza sativa
  Clone ID: PAT_MRT4530_46319C.1
tgcagaggaaccgctcaaagcgccacacctgggctggggagccgcgaagccacgagccgaagcctcgcgttggaggagtcggagccccgagcgtcgcctcatccagtcccctcgtgcacctaccccaaatccccatctcaccatggtcgtcgtcgctgctcacgtcgccttgtcagatccgccgctgccgctgtggtcgttgtcgctgctttggacattatatgagagattgtcataattggaagaaggtgttgatgactaaagaaggctatgtttctgagagtttattaggaaattcagaaggtgtacagcttgatcatattctaactgcagggtttcgagatattgatgattcatctatggatgatggtgccgaacaaaagaatggtttatctatgcttgcacgcgcagtacaatgagatggctctaatgttgatgcaaaggggcagcgctacaatattttccagtcagagcgcaaaattcaagacaaggtatgcaaattgataattgatggtggtagttttcagctcagatttggtgcatgctttatctttatctatgcaaaggcttcctacgccgcgttatattcaatggatgaatcaagcaagcacgcttaaaattactcataaggtgagagttacattttctattgggagctatgttgataaagtagaatgtgatgtggtgccgatgaatgcttgtcacttgcttttgggaagaccatggcaatttgatcttaatgcaacacacgagggccagactaattacaattcttttatacatcgtggtgttaaacacgtgctaaaaccagtgcatgatagtgctatcaagtcagtggtatttcttgttgtaaagaagaaaaaggaacaaccttacactagctcatcattttcattccttgccaatattatgcagttgagtaaaattcttcca

SEQ ID NO: 43134 - DNA, 206 bp, Oryza sativa
  Clone ID: PAT_MRT4530_4631C.1
aaaaaaaaaaaaaaatgggttggaataaaagccgcttttcaaattaacaatacccaatatttttttacaaaaaaccaaaaaaattattcccggggacgggttttaattaaaaaaaagcacaggttaaaatttttagaaaaaaattttttgaaacccgtgtttcgccccttaaattacaccccgaattttgaatgcttaaaaatttt

SEQ ID NO: 43135 - DNA, 345 bp, Oryza sativa
  Clone ID: PAT_MRT4530_46320C.1
atggagcggaggcgcgcggcagcagcgacggagccacgggcgggtggggcgcggatcatcagagagcccatggtgacgacggggttttcgcgcaagaccgccgagacggaggaggagatgggccacgggaatatttgggctgtgcgctcgcgagcgcggccgaaagatgcatgcgaaaagcgggggcccggcccgcgtatcgaagcggagaaaaacgaccggacaggaggagacggcgaggagagagaggatcatctatctgaagctgactcatcatgcggcgaccggcacgcaacgggacaccaccggccggccgtctttacgcgagcggctgatatcccctag

SEQ ID NO: 43136 - DNA, 582 bp, Oryza sativa
  Clone ID: PAT_MRT4530_46321C.1
ctctccgcgctcgggatgggtgcgtctcgctctcttctccctgttcatccctggtctcgatttggcgttaattcggggggttttagggtaataggagtgactcttgttgagttgattcgacctagaagttattaggttgtgggagaatgcgaacgatgcaagaagttactgtttgcatgtgcaattgctctgttgtttcatgattgacttctggattcccaatctatttttatcaaggtggagcatttttctgtttcgcgtttgtgtgctaggtaatcttagtattgtgttctaggatatgccattttgcgaagcagtgtatagttcaatagttggtcttgaagacttaaacgggtggtctttgtttcgtactcgcattgatatgtacataaccactcataaaatgagtcatgacaccctttcaccactcttcattacctttgcttttggtcaagtaaaactatttactgttcttaaaaaaaaaagctgtttataaatgtttaactcttagatgagtgctgactgtcagcccatttggttggtcggtgtagttcgatatttcctttcttcaagatgtggttt

SEQ ID NO: 43137 - DNA, 304 bp, Oryza sativa
  Clone ID: PAT_MRT4530_46322C.1
cccactcgtccggttcgaagtgctacagggacttagctaaggtcacgacaatgacggggcggggtttgaagaagaagggacttacgccatcatcgaattttaagacaccattgaagccagccaagccagtactatttactgccgagctgtagaggtatacataccgttacaggagccctttaagccatccttcaacctatgcctgatatgccgtctgaaggttggactgacttgcttttagtgtcattacgtacgtacctttgagttaacacacttgtgtatcgaagcttaagactgatccttt

SEQ ID NO: 43138 - DNA, 442 bp, Oryza sativa
  Clone ID: PAT_MRT4530_46323C.1
gcgagaaaggcgtggcgctcgtgctctcgttctggggcctcgcctgctactcctacggcgagtacgccgacgccgaggccaagaagaaagcggctttggaagctgatgaagcctcatgaatccgagtgtatatattgcttactttgcttatgctgtgccagcggtcacggatatattagattttataagccataaagtgagctgtatctgcagcatgtcaactgctcgtggagcataatagcaaactgtgtgcacattgcactatttgagtactgtatgtgatcgaagctgttaatgtgggtaggcgaaaacaagctactttactgtatatgtaatgactgagtacagcgcaatgtttgttcttgtgctctggctgatcatgtgtgtgatttggttactaaaataaatttgtgtttccttttatctggaaacatgtatgaat

SEQ ID NO: 43139 - DNA, 309 bp, Oryza sativa
  Clone ID: PAT_MRT4530_46324C.1
ggactgttgtttggacgcggggcaaacgcttcccttctgcggagaagtgtacttgacctacagtggtcgacgcggcgaagagcgagcggtcatgaacaaggtgcaccccaaggatggggtggtggagccggcggtggtggaggaggagaagggggagggagcgacgttgacggtgtccgggtggtagttgatgtccaacgggaaggggtacacggagctcgacggcacggggaacctcatgtaccgtgtcaagagctacaccaaggggtcgccgagggaggtcgtgctcatggacgccgacggccgtac

SEQ ID NO: 43140 - DNA, 3007 bp, Oryza sativa
  unsure (1)..(3007): unsure at all n locations
  Clone ID: PAT_MRT4530_46325C.1
atgagtacagagtactctacttcatatctgcgccaaaacagaacaaattagagttagagtgactctccgtgtagcaaaatttcactgctgcactacagcaacatacatactnttccacgcgccacaaatcgcatacttttccatgangccatacanaacctctcnnattttgatgagaatanncctatacaccttccaggggtttggtttcaaacttcgccgcgacgaaaaattncagctcggttattgtttgggtgtctcctcccttcttcttttaggggtggctatgttctcaccttttacatcatcaaactaatgaacgattatacgttggaagtatttccaggtcccatcacttcctcttatttgaagctatcgcctttgcttgcttcgcagaggttctctttgctttggggtttggaacagctctctggatgacccttttcggttcatcaggcttctcatggggatcaacctcttcatattgtattggcttgataacaactccaggcttcttaacaatcgcaggtcgattgagagcagcaactgatatcgctggattgaaatcaggtccaataggcatacggatactctgctcatatacatcctttgaagtgtaaggaaaaggcagattcctcactaaaagcttttcagccttcttgtcaacatgttcagaaatgataacatgcttgagcttagcatccttcctcctcttcaaggcttcttccctcttccttttcgcattttcatgttctttcaccatccaagaaggaagtccttttttctgttgaatgtcagtccactgtccccaaccaggaacaagagcaggtttttcaggttcaggattctcttcatttaaaacatccagtttgtccttctcaaattcagcctcaacatcatcaccagcaaaagcctggcgtataagatcagcttgcgacggaattttataattttcctttgcatcggagatggtcaataaaccctcaaccatctcatcctccgaatctgaatcagaattgtgatccaattgcttaagcttttggtctgccatataagaaaccttcactgtggatttatctatatcaccattggtattgctcccatcatttcctttgctactcttgaacttcttccatgaattatcagctaacattccaacttcaacagttgttttgcggccaggattttttataatatcatcgaagcttttgaacagatcatcctgtggttcatcatcatccaggagtgcagtcccaatttgcacatcatctatcttatgtacttcattgtcatccagatgttgagcagagtcagactcatattcgctatcactgttcttgtcgccgtcatctaatttttgcttcttatttgtcactttgtttgtatcttcggcaggtccaaaagttcttttaccagtaaccttcactgaatctccattctcttcagtgttaccatcctccaatttcctcaatgattcatcacactcttctagagctagccgtgcttcctcataagttgcttcctcatgcttcttcatagcgcgctccatgaaaggcaacgaaaagactccagatgttggtatctcattatcatccccaagaattttaagaatcttttcttttcctttgttcagaatgtttgcttctgattcatcgtcatcttcctcatcatcagaactttcctcactactactagaatcgtcttttgtggaattcatttttctagtaagaagagcattttgttggagttgtgctgcaatagcagcacgagtgccttcatcttgaacatccaatccacgcttcaagattcgcttagcccatttggaagtattcttgtgctttaatctcattcgttcctctgcacgtttaaattcctgtttcatagcatgctctttggcagcttccggatctgcctcaaagtctgctgatgctgccttcagtttatcctttttcaacatccggtgataagtcctggacttgatcttctttatccgttttgctttcatctcatgacggaacagaaggctgcgcattttagcaagtcgattttgacgttctctcacatcttccatgtcaatcttgttaagttccagtattttaacaccatcgttcttgtgtgcttccatcatttctgtgctacgcataatctcagccatctgcttctcaaattcatttcttggtttaaattcactagctattgccccaactgtgttaacccctaagttgagatcattttcaaagtagagtgtgggtgcctcacggttcctcttaactaatggctcccacttggtgacctccttcttggattgctggtataccacaccacgctcgagcttctctctctccacttttgcaagtggggcctgcacgactattggctttttctcctgctgttgcagcctctttcggagcttgctatacccaggcttaccctgaatattattcaagagatcatgaattgtgactggaccatctccaactccaggctgaaacggcagctccaatggctgtttcttcctcttacccccatcaaacgcttccctaggcatgccagtcgtctcctgaagtattcttatctgcttctcctcatcttcatcctcgccggcatcatcttcctccatatcctcaccttcatctgatggcacgtcttcatccgcattggaggcgtcgctgtcgaactcgtactcgtacttctcgacggcgtcgtagcggccgttcttcccggcctcctcctcggggaccccttcctcgtactcgtacacgtcgtgtgccccctcgtcgtcggacccggcctcctcgtcctcgtcggaacccctcgaggtgccgggccccagcgcgtcgagctgccggcgcagcgccgtggggaggcgcgggccatggcggccgccgcgcatgtccccgcgcttccccgccccgcccgtcacgcccttcttctccttccccccgtgagctgccccggcaaccagagccctggatttcggcttccctctgggcttcgtcccagccat

SEQ ID NO: 43141 - DNA, 179 bp, Oryza sativa
  unsure (1)..(179): unsure at all n locations
  Clone ID: PAT_MRT4530_46326C.1
agggtncatggtctaacgntgttgttgttgacntcaaacgtcgncgggaaattatttgnnccttgcacatgnaatgtttgntgancganccccttttggtgatcgganagntgttcnttcggactctgtnataagccatatatatgtctaatnaaatttcaattacatgtggcaattag

SEQ ID NO: 43142 - DNA, 307 bp, Oryza sativa
  Clone ID: PAT_MRT4530_46327C.1
caattgttacccaggatgatgcatgattttattaacaacattggaaccaaaatacgataacaaataaaaaccagacaccaacaacggggggaatgcccgtgggaacaaggaaagaggcaggaaagacaccacaaatggaaggcaagaaaaaggccagcaaaactggaggtggagctggagtcggaacaaagaacacaacaccgacctgctgcaggtgaaatggcagaaaaaccgcctgaacgctactaagggcctggaaaaaagactggagcgcaaccagccggacctgagggggacccgggggcaa

SEQ ID NO: 43143 - DNA, 1257 bp, Oryza sativa
  Clone ID: PAT_MRT4530_46328C.1
ccggagtctctttcttcacacgcgtgcacccataaatgcaccctttactacggccgtgtttagatccaaagtttttcttcaaattttcaactttttcatcacatcaaaactatcctacacacacaaacttccaacttttccgtcacatcgttccaatttcaaccaaacttccaattttgacgtgaattaaacacagcctacatctcaactgcgtaatatttcacttatcatactacaggtcggactgttgatttactgaatttggtgtgacaagtgaagcatgagggtggtaaattaacctccaacgagcactctaacataatattccttctattttgtttcctcccagagatggctgcgctcctctaccgattcaacattctctctgcttccaaaagcacaagaggaagaaaggaggaggaggcagagaaggccaccaaaaacccaatcccccaaaaaagaaacccagaattcaaaccaacaaaaagtttgcccaaaaatccccaaactttccaaaggccaatccacactacacagtgccatgtaccggcgttcgtgcgcacgggtttccgcgcgatgagggtctcctcggcgtccagtacgccgccgccgccggcgttcgcggccgcggcgtgggcggtggtgctgctcgccatgctccgctccgacgtcgccctcgccgccgccgcatcctccaacgacgacacaggtctctcgccgttgatgccgccgccgccgctcgccgccccggttcccgcggcggtttctccggccccggcgacgcctcccgccgtcctctccccccgcaagctcctccgcccgcaaggcgcggacgtcgtcggcgtcggtttcgtctccggcagcggcggcggaggaggaggagacggagtacggacgcgccgggtggacgacgggtgcgcgggggcggacgacatcgcgatctaccaggggagggcgacgccgctgccgagcggggtgccggcgtacacggtggacgtgatgaaccggtgcgccggcggcggcggcggcgacgaggagtgccccatcgcggggatccacgtgcggtgcgggtggttcagctcggtgagcctggtggacccgcgcgtgttccgccggctcggccacgacgactgcctcctcaacgacggccgcccgctcctcgccggcgagaccgtctccttcgagtacaccaactccttcccctacaagctctccgtctccgtcgcaacctgcgtcgtcgaccccgccgccccatag

SEQ ID NO: 43144 - DNA, 608 bp, Oryza sativa
  Clone ID: PAT_MRT4530_46329C.1
aggatgaagccggtctattaaaacacgcttagggcatcagccccctgaccatttatcaggcagggtgccttgggtggaaacgagagcatatgcccgaaactagtaagatgtagctatgaacaagacattgcacaagaaacattggataataaattaacaactcaaatatgcaacagataatagatcaacacagggccaacatatttttacatcttgaacaaaacaatggcgacaatctcacggacagcagggcacttcatccaccacaacgttgcaccgttcaaatggaagttggttgtcctcaccaccgtctccattcagctctgatcgctctgttgtttgtagaagaaggtagagactggcggcgtgtgaagccattcatgtctgctggtgaatcagaatccagtcttggtgaattctgtcctcgcaactttgcctttgcagattctgttgcagccatatagcttggcttccttcgtggaactggcgtattctgggctccattttccgggtaatctgatttggtggagaacgaagacctcctcttgctagttttaaggtttccattagacagaggttcttccttggaccttggcttctctttcttc

SEQ ID NO: 43145 - DNA, 197 bp, Oryza sativa
  Clone ID: PAT_MRT4530_4632C.1
atgcaagctccgccggcgggaggtgaagagaggggagatggggagaggagaggggagagagatgaagagaggggagaggggaggaggaagaagaggagggatgagcaccacggcgatgttgagcaccacgagtccacgacgaggacccccatgaagaagccgaagctgagcacggcggacctcgacacgcggagtat

SEQ ID NO: 43146 - DNA, 2190 bp, Oryza sativa
  Clone ID: PAT_MRT4530_46330C.1
tcttgaacaaaacaagtggcgacaatctcacggacagcagggcacttcatccaccacaacgttgcacttagtcaaatttgaaatagattggtccttgtgtatgaggtgagtgtgggttcaacttactgtttgtagaagaaggtagagactggcggcgtgtgaagccattcatgtctgctggtgaatcagaatccagtcttggtgaattctgtcctcgcaactttgcctttgcagattctgttgcagccatatagcttggcttccttcgtggaactggcgtattctgggctccattttccgggtaatctgatttggtggagaacgaagacctcctcttgctagttttaaggtttccattagacagaggttcttccttggaccttggcttctctttctttcctaagacaccattttctgggaaattatcttcattatcaatgttctgcagtggcagaacttcaacttcttgagcatcagcagtagaatcattaaatttttcccaggttaaaatcgaagtgaaaggagtttccgggttagatattaaatcaggttccaacagattcatatgtgaattgtcctccaacagaatgccactgtgcaactcctgagtttcaggaggaaatgacacgcatgcattctgttgtgcttcctcacattggttgtcttgatgatcagagatcccattcacgagactaggtgggatttgagccacggaatcagatacctttgaggcatcagccgtggagctagacacctttgaggcatcagccatggagctagatacctttgaggcatctgccctggagctagatatctttgatgcttcagccatggaattagttaccttccgaaggttcctcttaaccttctcaagttcagataactggctatctggtactgaatcagcagcggaactagagaattttcttgaatttcgtttaattttttcaggttcaactgtcatattagtttggaagctatcaacagtgacagcagaactcttccgaacattgcgctttaatttggctgactcagtttccattgcataactggccttccttacttgtggtttgccatcagcaactttttttggttgggaagaggacttccaaatctggcttatagtccatctctccaaccagttgtacaatgaattggggtccctcttgtcatactgcaagtgaagagcttctaacccaattgatgaagatagaagctttcgaacatatgcgtttgaagataccttctctttccaagcgtccgatggtttatcactcagaaacttatgttggccggacttcacaacaaattgaatggaagcaccggagagtctaacatttcttccacgaactaaagcttgaagtttcacgatcaaccatgtcacacgaagggttgatgcagcttgtctccttacaagatgtcctcggatcagtgcctggagtcttatgataccttttaatgcacggaatgccctacgtgccaggtaacctcggaaggccgcttgtgccttcactgcagctagctcttcgcttagtttctctggactagttggtgccttggagccaacaatgttttggttctccactccttgacccatggcttcaactgcaactccgtttggtaacttgcaattttcagcatttccatcgttgtgagaattaacaagagctggctcagaaatcacagggggatcctcagaaagcacaggcttgttatttgcagccttcgccaaatccttggccttggtagagttggacttggctgatttcttcccgaggagcacagacttgatccacttcgccggagacttccccatggttgacgaaacagcccgaacaccgtgcaatccggatcctcagaaacacgaccggaatgccgcgcgcgagcgaagaggagcaggcgtcgccgcaccgcacaggctcggctcgctctctctctctctctctctctctctctctctccaacgaccaaatccggcctctaagactcaggcctccattggtagacagaggcttggtctgtctagttcagggctcaggcgcgagacggcgaggggaagacacagaaaaagctgacgactttgagcccgagcagaagcacacagcgcaagtgactgacagacagaggaacagtgcagcgcgggggcccacaggaaaaggaatccaacaccgacatccgatgagcccctga

SEQ ID NO: 43147 - DNA, 1890 bp, Oryza sativa
  Clone ID: PAT_MRT4530_46331C.1
atggagcgagagcttggggaggcgtgcgagtacaccaagcgcggcagacacaggtggagcggcgtgacggggttctcctccgtggaggcgatgagcacagccgcggtggcgatggcaggttcccagacccggagccagcggttaccgacgccgccgcggcaagtagcgggcggaagggcggtgtcggcggctgtaggcggcggaaagcggcggtctgggcccggggactcgaggagaaggaaacggccgaagaggaacctgcggtgcacgagctcgtcgcctggacggagcttgtcgctggcctcgtcggacgccagctcgtactcggggtggtcgtacaccggacgccgcgggtggcgcgcgtcgaggggctccctcgctcacaccggccggacgctccgcgccttccgcgagctcaccgacggcctgcaagaactgcgtgatccccgccgcgtcgacgagagtagtggccggtcggtgacgacggcgaagttgctatccggcagggtcaagagttcgccggtgcaagggatcggcgggcacagcgagtcaccgaactcctctagcgagacgtcggcgtcggcctcgacaaacgagacgaacgcggaggaggctgatgaggaagtccaccgcgtccttgcgcgcctacgcgagtgcttgtccaccagcagcttcagctgtggcccggccccggcaggcttcgccggtgccgtcgtgtcgttcgccgtctgcaagcacatagtgctcctagcaatcaataatgatgtccacatttttattgatgggagcgatcaaggagaagctgacggaaggggagaaaaggcctcgccggcggcgcgccccacgagaactccgatgatttgcgcctcccccaccggcggcggtgcggtgatggatccttcgccggagttccgcgactgggccaacctgccggagctgccgctctcggaggtgctacggggcctcctcccctgcctccgctccgtctacgccttcgccgccgcgtgccagccctggcgccgcctgctccgggactccgccgccgacctcgtccgcccccgcatcccgccgctcctcctcctctgccccacctatcgcgtcgtccctttctcccagctcgtcgtcgcggcgctcctctcctcctaccccgtcccgggcgacgccaccctcctctcctcctcccgcggccacctcgtcctcctccgccgccgcgaccccttccacggcctccacctcgtcgacgcgctcaccggcgccacgcgccacgcgctgccgctcccttccccgcacttcgcctatcactacgccgccctcgcgccatcccgccgcctcctcctcttccattccaagcacgccttcttctccctccccgtgggcgacgcgggccacaaccctcgcctcgattggaccaagcacagcctcccccgtgccgcctccttcgttcgatccatcctcgaattccgcgggcgcgtcctcggcttgaccgatcgcgcgcagctgctggagttccacctcgatgccaaccctccgaacaaatccgcccaaatgttgcacgccgccggcctccctgaggtcagcacgttcgaccggtggcacttcggcccgcatctggtcgccgccggtgatcgattgctcctggtgctcttcatgatggggccgaaattgggccatatgtttgagacattggtgagtgtgaagaaggttggcgtctatgcacttgacatggtgaagatgaggtgggaagaggtggacaacattggggcttacagcttgtttgtggactgcgccgggaggagtacagctgcttgtgtagacgtggagaactgtggcgtggaggcgaaccgaatttacattgctgctcctgggtgccgtgactggcttctcttttag

SEQ ID NO: 43148 - DNA, 398 bp, Oryza sativa
  Clone ID: PAT_MRT4530_46332C.1
gaccaggggacacggcaagtatcactatcgcaatagaccgcccaacccacagcgggaggaaacaaacccgagcggaaaacgaggggatcgcggaaacggagcgcacgcgcgcgcacgtgcgcggcacgggtgggagggcccccgctcgggttgggccgggcgaccggcccagtaagaaaggagggggaggcggcttgggccgggcaggccgggaggggggggagagacagcccgggagagagagggaggagggagctgggccgaggggaagggaaggcccaagagagaaggagagggagaggaatagagggaggggagagggacttcggccgcgggccgagagagagagagaggactttgggccaaacttggcccaaagggaaagagagggttatttt

SEQ ID NO: 43149 - DNA, 567 bp, Oryza sativa
  Clone ID: PAT_MRT4530_46333C.1
atgtcagttgcacatcttttttttctctcttttgttcttctcctcttctctcttctctcttcagcgagcgcagcagccataggcggagcgacggcgaacgacacgacggcaccggcgaagcctgccggggccgggccacagctgaagctgctggtggacaagcactcgcgtaggcgcgcaaggacgcggtggacttcctcatcagcctcctccgcgttcgtctcgtttgtcgaggccgacgccgacgtctcgctagaggagttcggtgactcgctgtgcccgccgatcccttgcaccggcgaactcttgaccctgccggatagcaacttcgccgtcgtcaccgaccggccactactctacgtgcaggtgacgagactgaggtgtggcggcttcgtgttcagcacccagatttgccacaacctcgtcgacgcggcggggatcacgcagttcttgcaggccgtcggtgagctcgcggaaggcgcggagcgtccggccggatgtcacgtcagcaaaaccaggcaaaaatactgccaagggaccttcggtgaatggtttgagagagtttag

SEQ ID NO: 43150 - DNA, 528 bp, Oryza sativa
  Clone ID: PAT_MRT4530_46334C.1
atgtggacatcattattgattgctaggagcactacgtgcttgcagacggcgaacgacatgacggcgcaggcgaagcccgccggggccgggccatagctgaagctgctggccgatgccgatgtctcgctggaggagttcggtgactcgctgtgcccgccgatcccttgcgccggcgaactcttgaccctgccggatagcaacttcaccgtcgtcaccgaccggccactactctatgtgcaggtgacgagactgaggtgtggcggcttcgtgttcagcacccagatctgccacaacctcgtcgacgcggcggggatcacgcagttcttgcaggccgtcggtgagctcgcggaaggcgcagagcgtctggccggcgacgagctcgtgcaccaccgcaggttcctcttcagccccgacgacgtcgccgcgttgcgcgaccagctccccacgcgcctcggccccggatgccacgtcagtaaaaccaggcaaaaatactgccaagggaccttcggtgaatggtttgagagagtt

SEQ ID NO: 43151 - DNA, 1257 bp, Oryza sativa
  Clone ID: PAT_MRT4530_46335C.1
atggcgtcgctcatccgcctctcctcgcggtggagataccagcagctcgaggaggggggaaggagcgggttctcgcgtggcggccgtgtggctgcgccgtggggcccgcaggtgacaaccatcactctgttcgggccagagagcctcgcgttcgacggcggccgcagtgggcccgtacacccagcgtctccgacgagtcgtattatcctcaagtggggcggcgtcgtcgccggctggaccacctccgcttacagcggcaactaccggaggcctctggcccttcggtcccatttgaaatccggcgacctctacatcgccgattcgtcatggcttcatgttcaagttcatgttaaacagatggagtatcgagtgcggcagtcacaggcggagcggcgtgatggggttctcctccgtggaggtgacgagcacggccgcggctgtgacggcaggttcccagacccggagccagcgcgttcagccggagcagcggctgctacaccgacgccgcattctccggcgcgcgctcctcgccaccgcccagatgctgctgctgcgcctgcgtcgttgttgggctcaccgcgcgcaaggacgcggtggacttcctcatcggcctcctccgcgttcgtctcgttcgtcgaggccgacgccgacatctcgctggaggagttcggtgactcgctgtgcccgccgatcccttgcaccggcgaactcttgaccctgccggatagcaacttcgccgtcgtcaccgaccggccactactctacgtgcaggtgacgaggctgaggtgtggcggcttcgtgttcagcacccagatctgccacaacctcgtcgacgcggcggggatcacgcaattcttgcaggccgtcggtgagctcgtggaaggcgcggagcgtccggccggcgatgagctcgttcaccgcaggttcctctccggccccgacgacgtcgccgcgttgcgcgaccagctccccacgcgcctcagccccgccgccgacgccgcccttccgcttgctccggccgcgggccgccgcccgctgccgctcgcctgccgcttgccaccgctgcagtcgcgctctcccactgaccgccgcccctccacctgctccagccgcgctcgcccgctacttgccgcgtcggcgtcggcaaccgctggctccgggtctgggaaccttctgtcgccactgcggccgtgctcgtcgcctccacggaggagaaccccgtcacgccgctccgtctgtggctgccacgcttgctga

SEQ ID NO: 43152 - DNA, 672 bp, Oryza sativa
  Clone ID: PAT_MRT4530_46336C.1
atgggtcacggaaaagacgacaccgggcctccagtagggtgcccatcattttccaccaactccaagcaagcctcaagccctgtagccttagctgcctctgcctccattgcacggctctgcatggacagctctcggaggtccgcaagcctctccagtgcccgcctagcggagtcgcttcaggacttcttggaagaactccctgagacaacactttcttggtctatgtggcatgcgaagaacgctaaaacttggtggcgcactgtgaatggcctaagctgctgcgagctgcgtcacgtcaatggtctaccactgaactgctccttgcggtgtggctggtgcagccgccacgatggccgagtggtttccgacaacggtgcgcctgctgaataccacgtggtgaaggtcaatgtgcttgagaggatcatttttgaagctgatcacacctttcttgaccgaatcctcctccgttcttggactcccaacccgctgccacctttgcgccgctgtcgcccaccaagtctgccgctgtcgcccaccgagtctgccagtgacgaaggaggggatagaggattagctccatctccatccagcacagctacccaccaagtccgcgacgccgtcgatgacaaaggaaggaacggtgtgctagcccctatcaccgccgcccattga

SEQ ID NO: 43153 - DNA, 432 bp, Oryza sativa
  Clone ID: PAT_MRT4530_46337C.1
tcctcctcctctgccccacctatcgcgtcgtccctttctcccagctcgtcgtcgcggcgctcctctcctcctaccccgtcccgggcgacgccaccctcctctccgcctcccgcggccacctcgtcctcctccgccgccgcgaccccttccacggcctccacctcgtcgacgcgctcaccggcgccacgcgccacgcgctgccgctcccttccccgcacttcgcctaccactacgccgccctcgcgccatcccgccgcctccacctcttccattccaagcacgccttcttctccctccccgtgggcgacgcgggccacaaccctcgcctcgatgggaccaagcacagcctcccccgtgccgcctccttcgttcgatccatcctcgaattccgcgggcgcgtcctcggcttgaccgatcgcgcgcagctgctgg

SEQ ID NO: 43154 - DNA, 188 bp, Oryza sativa
  unsure (1)..(188): unsure at all n locations
  Clone ID: PAT_MRT4530_46338C.1
tcnaannntttttttcccccgccaaaggccatcagaggcatcccgggaaacccnnnnnntacatccaccataactcacaacncccgcacgcgcacatcacaagcccaaccctacccgctgccaggacggnngctaacacgcagtaaccagatgcatcgccatccaaaacagaccctcatctagatcgc

SEQ ID NO: 43155 - DNA, 3264 bp, Oryza sativa
  Clone ID: PAT_MRT4530_46339C.1
ctgaactgagcgagctagctgcttctacaactgtgcaggtagctaattaatctagcaatcctcccgtagattggaataatggcagatcagaaggtgattctcgccgagccgctgcttccggggaaggaagctgacttcgccgacgacgacgacgtggaggcgcagctcacttcgtaccacaccggcgcctccttctccaggacgtgcctcaacctcaccaatgccgtctccggcatcggggtgctgtccatgccgtacgcggtgtcgcagggcgggtggctcagcctgctgctcttcgtcctcgtcggcgccgtgtgctactacaccggcacgctcatcgagcgctgcatgcgcgccgacggctccatcgccagctacccggacatcggccagtacgccttcggcgccaccggcaggagagccgtcgcattcttcatgtacgtcgagctctacctcgtcgccataagcttcctcgtcctcgagggcgacaatctcgacaagctcttccccggcgcaaccatggagattcttggctaccagctccacggcaagcagctattcattgtactcgccgccgccgtcatactgcccactacctggctcaagaatcttggcatgctcgcttacgtgtcagcggccgggctcatcgcctcggtggccttgacggcgtcactgatctgggccggtgtcgccgagaccgggttccaccggaacagcaacacgctcaacctcgccggaatccccacctccctcggtctctacttcgtctgcttcaccggccacgccgtcttcccgacgatatactcctccatgaagaacagcaaacacttctccaaagttctcttgatctcgtcggtgctgtgcagcctcaactacgggctcacggcggtgctgggctacatgatctacggtgacgatgtgcagtcgcaggtgacgctgaacctgccctccggcaagctctacaccaagatcgccatcgtgatgacgctggtgaacccgttggccaagtacgcgctgctcgtggcgccgatcacggcggccgtcgaggagaggctgtctctgacgcgaggcagctgttccggcgagggtggccatcagcaccgccatcctcgccagcacggtggtggtggcgtcgacggtgcccttcttcggctacctcatgtcattcatcggctcgttcctcagcgtcatggcgaccgtgctgttcccttgcctctgctacctcaagatctacaaggccgatggcatccaccgcacggagatggtggccatcgccggaattctgctgctaggagtgttcgtcgccgtcaccggcaccaagcgcggcagccacaagcggagcggcgtgacggggttctcctccgtggagacgacgagcacggccgcggtggcgatggcaggttcccagacccagagccagcggttgccgacgccgacgcggcaagtagcgggcaagcgcggctggagcaggtggaggggcggcggtcagtgggagagcgcagttgcagcggctcaagcggcgggcgagcggcagcaggcggcggtgcgcggccggagcaggtggaagggcggcgttggcggctgtaggcggcggaaagcggcggtctggtcccggggactcgaggagaaggaaacgcgagcaccggggccgaggcgcgtggggagctggtcgcgcaacgcggcgacgtcgtcggggctgaagaggaacctgcggtggtgcacgagctcgtcgcctggacggagcttgtcgctagcctcgtctgatgccggctcgtactcggggtggtcatacgccggacgcggcgggtggcgcgcgtcgaggggctccctcgctcacaccggccagacgctctgcgccttccgcgagctcaccgacggcctgcaagaactgcgtgatccccgccgcgtcgacgaggttgtggcagatctgggtgctgaacacgaagccgccacacctcagtctcgtcacgtggaggaggccgatgaggaagtccaccgcgtccttgcgcgccttcgcgtaaagcacgcgacgcgagcgcttgtccaccagcagcttcagctgcggcccggccccggcgggcttcgccggcgccgtcgtgtcgttcgccgtctgcaagcacgtagtgctcctgccgtcacagccgcggccgtgctcgtcacctccacggaggagaaccccatcacgccgctccgcctgtgactgccgcactcgctggtcgatgtcgaccgtcgacgacgccattgacgagcatgaacggcatacgaatcggcgatgtagaggtcgccggatttcaaatgggaccgaagggccagaggcctcctgcacatgctctccgttacaagttgcatactgggttcttggaggaccagcacggagttcacggcgacacgctcttatgagttgtgacctgtctgttcgtacgcacgtattggagcggaagcacgtacaccggtagttgccgctgtaagcggaggtggtccagccggcgacgacgccgccccacttgaggataatacgactcgtcggagacgctgggtgtacgggcccactgcggccgccgtcgaacgcgaggctctctggcccgaacagagtgatggttgtcaccttggcagggttgcctcgccggagtcggccgctcagcaagtcggcgtcaagatcagccctaggcccctgtttgctaaccatgtatatgcactcagttaaaggccatgcctcatcaacacttgttaattgattccagtgggtgggggctccgctcttgaacctgacacgtgatgaaaacgacactgcttcggtgtgcgtgcccgcggcttgcatccgagtcgccaaaccgcggttcggttcgccgcgaccggcgcgaccccctttccttcgcccccttctccccctctcttctctcctctctcttcgcaccgctccttcccccctcctcgagctgctggtatctccaccgcgaggagaggcggatgagcgacgccatcctcccgggtgctttccgcctcgcggagggggcgtgcctaccacgcctcgctcgatccgatgaagcggctggggggcgcgcgatgcggagcccgtggcggtgggggaggatatgtctacaaggaccagtgcgtgcttgcaagctcaacgccgaacgcaagagaaggatcaccatctacctcgcccttcggaagtccgaggccaccaagtcctactgcacggtcatcggtgcccctgatcaccccgactttattaagaacacgatcacgggtaccccccaagct

SEQ ID NO: 43156 - DNA, 2292 bp, Oryza sativa
  Clone ID: PAT_MRT4530_4633C.1
atggccgcgtcgcgctgcgcagcgcgacgggcactggcgctggcggcggcggcggcggaggcgttggagcgcgcgtgctgctcctcggacgccgccgcggtcgtctccgggaacaacaggctgatggcggagcacctgagagccggcaggctggaggccgcgcgggaggtgttcgacggaatgccgcggagggacgtcgtgtcctggaacaccatcatggccgtgcaggcgcgggcgggctcgcacgggagggccgtgggggcgttcttggagatgaggcgccaggggttccggccggaccatacctcattctccaccgcgttgtcggcctgcgcgcgcttggaggctctggagatggggaggtgcgtccatgggcttgtgttcaagtcctgctcctctggtaatgtgtttgtgggtgcttcgcttatcacgatgtatgccaactgtggggtggtcagctgcctggagcaagtgctggatggtgttgagagtccaaatgtggccttgtggaacgcgcttatatcaggccttgtgatgaaccatcgtgtaggctatgctcgcaaggcttttgatcggatgccagtgcgtaatgtggtgtcctggactgccatgataaaagggcactttacagcgcatgaggtcgacatggcgtttcagctgtttaaattgatgccggtgaagaactctgtgtcgtggtgcgtcatgattggaggttttgttacgcatgagaaattcagtgaagcagttgaattgtttaatagcttgatgatgaatggggaggaagtgacaaatgtgatcctagttaaaatagtgaatgcttttgctggcatgaaaagtattagaggaggcagatgcattcatggattggctgtgaagtctggttttgcttacgaccttgttcttgaggcttccttggttttgatgtactgcaaatcgttggacatcactgaagcacgactggagtttgataaaatggaaggaaatcatgttggttcatggaatgccatgttatgcggctatatttattcggataagatagatgaggcccggaaactttttgattccatgaataaccgagataaaatctcatggaactcaatgattaatggctatataaatgatggaaggattgctgatgctactgagttgtactcaaagatgactgaaaagagtttggaagcagctactgctttgatgtcatggtttatagataatggaatgcttgacaaagcacgggatatgttttataatatgccccaaatagatgttatgtcttgcacaactttgctgtttggatatgtgaaaggagggcatatggatgacgcgctggaccttttccacatgatgcaaaaaaggactgttgtcacctataatgtgatgatatccggtttgttccatcaaggtaaaattactgaagcatataagctctttaatgaatctccaacacgtgattcagtgacttggagctgtttagttgctgggctcgctacaaatggtttaatccatgaagcacttcagttctacaaaaagatgctactgtctaatatacgacctagcgagtcagttgtttctagcctcataagctgtttgtcaaattattctatgatggttcatggccagcagtttcatgctacaaccattaagattggactcgattcccacttgctaatccaaaattcactcattagcctgtattgcaaatgtggcgaaatgattatagctcaaagtatttttgacctgatggctaagagagataaagtaacatggaacacgatcattcatggatatgcactcaataatcttggtcaaaatgctgttgaaatgtttgagagtatgacaaaggcacaagttgatcctgatgacatcacatttcttggtgtactttccgcatgtaatcacatgagccttttggaggaagctaaatatttcttcaatgcgatgacatgtacttatggaattttacctaatattatgcactatgcttgcatggttgatctcttttgtagaaaatgcatgattaaggaggctgaaggattagtgaagtcgatgccatttgaacctgattcagcaatatggacttctctattgagcggttgcagattgactggcaatgataagttagcagagcatgcggcgagtcaattaattgccattgatccttgtactaaaatgccttatctgcatctcatcagtgtgcatggattaaccaataaatcgactgtgattgatagtttgagaagtcaaattaaaagcactgccactgaaaaggatgttggctatagctggatttag

SEQ ID NO: 43157 - DNA, 590 bp, Oryza sativa
  Clone ID: PAT_MRT4530_46340C.1
acgagggaagagcatccgggatccccccgtcatcaccgtcagcaagtccgccacctacgcgctctacgccctcacctacctcgacagggatgttgcttacaggcctgacgagaagtatgtcaaaacacacaaatgtgaaccatatgccggtgctaaagttgttggagagtgtgaaaggttatgggatgagaaaggcaatgtaatcaagcaaacagagcctatttgctgtccatgtgggcctcaccgtgtacaatcgaaatgtggagacatatggtctaaactgaccaaaggaaaagctaatacggctcactgtgtgcgatttccaggcgactggttccatgtattcggaattggagcatggtcacttcggttcagtatcagagtacaagtgaagaacggatcttctgtatgggatgttgttgttggtccagagaataaaactgttgtttctggagataactttctgagagtaaaagttgttggtgattatactggttatacaagtatcccatcatttgaggacaactatcttgtgactccacggaagggtactggtagtagtcagccacaagaccttggtaatgaacatt

SEQ ID NO: 43158 - DNA, 204 bp, Oryza sativa
  Clone ID: PAT_MRT4530_46341C.1
atgcgcggatgtgcacgccgacgaccgtgcggggctgcgtcggaggaaggtgacgccgacgatcaggataggcttcctctgcgcattctgttgatgccggcgtcgcccatcgcaacacgggtgaggagtcagatccggcggtgcgccgtctccgttcacgagctgccgcctaggctcactctctcggagcaagccacgtcgccg

SEQ ID NO: 43159 - DNA, 956 bp, Oryza sativa
  Clone ID: PAT_MRT4530_46342C.1
gaagcgattgaatttcgtcgatcgatcgagaggaggattttacagtggaagggttttccagccgggcttacacacgatgaaagtccacgaaccaaacacaaaacaccttcttgattaattaattacgatgaattcgtttgattaattagctaggaaatggtgcgtccgccgtcgacgccgacgacctggccggtgatgtaggaggccgccggcatgcagaggaacgccaccgtggccgccacctcctccggctccgccagccgccgcatcggcagccggtccatctcgctcttgatcagctccgggtctatcgtctcgtcttggcagatatcagtcttgacgcctcccggcgcgacgcagttgacacgaatgccgtcgccggcccactcggcggcgaggctccgcgtgagctggttcatgccgcccttggtcatggagtacacggccagcgccggcatgccgacgctgccggcgacggaggagatgttcaccacgcagccgcctccgccgccgcgggcgccgccggcggcgagcaggagcgggtgcgcgagctgggagaggtggaagcaggactcgaggttggtggccacgagcacggcgaagtcctcgccggagcacgccgccgccgcccggaacatggtccggccgacgttgttgacgaggatgtccagcctgccgccgaactccgccgccgccgcggcgaccagcctctcccggtcgccgcgcgcggagacgtcgcagacggtggcggtgacgcggagcccccgctcctcccaccgccgccggctcgcctccagctccgccgcgttccgggcgcacgtgtgcacgcgcgccccgaatccggcgagctcctccactatcgcatgcccgatgcctttgctgccgccggtgacgagcgccgtcgcgccggcgagggtccaccggtaggggatgctgcgagctgcggcggccgccat

SEQ ID NO: 43160 - DNA, 951 bp, Oryza sativa
  Clone ID: PAT_MRT4530_46343C.1
atggacatcgacggcgcgggcactaaggcggcagcagcgggatggaaggcgccggcgtcgatggtgctggtgcagctgttcatcacggggatgatcatgctttccaaggtgtccatcggcggcggcatgttcatcttcgctctgctcgcgtatcgcagcctcttcggcgccgtcttcatcctcccctttgccctcatctttgagagagggaagtggagggacatggattggcgcgcattcggatggatcttcttcaatgcctttatcgggtatgcagttccaatgagcctttacttctatgggctcaaggacaccactgcatcctacgcagtcatctttataaacatcattcccctattcgccttcatcctctcactcatgttcagactggagacattcgaaattggaagcatagttggggtactgaagatagtgggtgttctgctctctgtgggtggcacaatgcttgtcagcttatacaaaggcaagtcactgcatctctggaattccattttgcagcaccaaaatgaaccggccacaaaaactgcaaccaatcagctaagagggacaattttattggttgccagcagctttgcctatgcttgctggtaccttgttcagtcaaaagttctgaaagtgtacccatacaaatattggtcttccatgataacatgcttggttggaggatttcaggtagcatttgtcggaatcatattaaggagacataagagtgcttggaagctaggatgggatctcaaccttgttactgttgtgtactcaggtgcacttgcaacgggcgggaaatatagccttaattcatgggtagtggctaagcgaggtccagcctatcccccgatgttcaacccactatcagtggtcttcactgttgtgctggactccgtccttatgggggatgatgtgacagtaggaagaagatctcaacacttctaa

SEQ ID NO: 43161 - DNA, 406 bp, Oryza sativa
  Clone ID: PAT_MRT4530_46344C.1
ccaactgagatatagctttgggatcacactttgtagcaaatattcatacgaggtcctgatgatatgcaaaacctccatctgaagctgtcctccccaaggaactattacagagagatcgatcgtcctgatgaccacccattctcaaatggtgagatctagcatgccaaatttgactggctaaggcaaaatctctcaagttccattcagcatgaggcatctttgttgaagcttgaatggtcttaaccccaaacgctttcctattggcacgcttatgacgacgaccatgagaaccaaccctttgaccttcgtcaccatccgacatagtactgccctgagccttcaacttgacggacttctcacgggtgaacttggtgaagccccactccctgctgaggatgatcttttg

SEQ ID NO: 43162 - DNA, 146 bp, Oryza sativa
  Clone ID: PAT_MRT4530_46345C.1
acacactgccacacagggattgagagaagaaccccacggggcggagacaacgcccgtcacaccaacaaacgaagaggaaaaggaggccacacaccaaccctgcaaccccggggacgaaccagccaagaacgaacccccgccagagc

SEQ ID NO: 43163 - DNA, 396 bp, Oryza sativa
  Clone ID: PAT_MRT4530_46346C.1
atggcgcacagccccgcggcggcggccggaggcaatggcgagcgcgcggaaagcggtggcgcgcgggggaaagagggaagtagggaggagaggggctcctcatcggaggggtggcggcgaccggagcagaggatggaagcggcggcgacggccggcgaacggacggcggacgggcggcaacaacacctaaagaaggggaggagaggagttagggatggagaggacgaccgcgacgaccaaagtggccggccagagatggatgaaaatggagagctcactagcgagcgagggaaacggggcatcgggggtgattggtggcaaccaagaggcggccgaggtgcgggcgggctcagtgagcgcgacggcggcgattgcgcggcacggcgacggctctag

SEQ ID NO: 43164 - DNA, 378 bp, Oryza sativa
  Clone ID: PAT_MRT4530_46347C.1
atgcgggccccacatggcaacgactcggggagggcggttcacggtggaccgagtccacggaccggggaaggggcggcgcgccacgtggtgcacacgtggcgccgacgcggcgcacattcggcaaccacgcgggtggccaaaccgacggccccaatctacccgagggtagatcggacggcggcggggagcacgcggccggcgcgcacgggcggctcgagccggcccggcgaccatggcgcacggcggcgctaccgcgggacggcgacgcggcagacggcggcgtccgacgacaagcggcggcggtgcgacggcgcggcgacactggctgtggctaagcggctaggcagcgacgcgacgactagacggcgcgggagatag

SEQ ID NO: 43165 - DNA, 1179 bp, Oryza sativa
  Clone ID: PAT_MRT4530_46348C.1
atggcattcttcctggtggcatgtctgccatgggtttgtttcatcctcctctccctgtacgtcttccagttgttcgccgatgcgcgccgccgccttccacccggcccatggccgccgaagcctctcatcggcgacctccttgcccttgggaagggcgaccagcagcaccgctccctcgcgcgcctcgctgaccgctacggccccgtcatgtcgctccgcctcggcacggtcctcaccgtcgtcgtctcgacgccggacgccatgcgcgagatcttccacaagaacaaggataacctcgcgggccggcccaccgccgacgcctttaacgccatggggcacagcgccaactccctcctcgggctggagcacccgggcgtcaggtggcgcgccatccggaggttctccaccgcggagctgctcgcgctcagtcggctcgccgagctgcagcccatgccagatcggatcgccggcaagactggcaagagcaacttgctaaacgtggtgctcgacatggagcgcgagtggcaacacaagggctccgtactaagccacgacgcaatgagagtattatttaccgatttatacggtgctggagccagtacgacctcggtattaatcgagtgggcaatagcagatctactgcaaaatccagagtcaatgcgaaagataaaggaggagatcacaaatgtcattggcacgaatgcacagatccaagaatttgacatcgcccggctcccatatcttcaggccgttgtgaaagaaacccttcgtcttcgtgctgttgcgccattggtgcctcgcagagccgaggcaacgatagaggtccagggcttcaccattcctaaaggcaccaacgtaattctgaacttatgggctatcaaccgagatgctagggcatggaatgacccggataaattcatgcccgagagattcatcggcaatgacatcaattatctgggacaaaattttcagtttgttccatttggtgttggacgacgcatttgccttggattgccactagcacaaaaagtgatgtaccttgttctggggacactggtgcatcagtttgaatggacccttcctgaagagctcaaggagactggtatagacatgacagaaaaatgtggaatggtgctatgtctcgcaaaccccctcaaagtcatggctaagaaaatgtag

SEQ ID NO: 43166 - DNA, 479 bp, Oryza sativa
  Clone ID: PAT_MRT4530_46349C.1
ctgctaccttgagccatcaaatggttcttaaatgtgtgcttgaaggaaattaagtgaccgacaagtgcagagggtgatgttgcacctacaaatcgttgcatgttatggcatcttgtacatatattacttcgattaggtgaccagttatttgtgtcatatggttagttatttgagctttttccagattttggaccatgtacaccctgtggatgtactcgcttttaggtttgtgggtttgtctttaggcaatgtgtcagaatgttttttagtccttttctgtttcagatgcaatctggcagacaatagtctctactgtatactactctcagtttcttcttgtttcttagtcagcgtcagttatcaagctatgcataaagtatttggagagatggtatttaaagcgaacccttgtactgtatctcccttgatggtatcaataaagctggtatagcatggtataaaaaaaaaaaaaaaaaaaa

SEQ ID NO: 43167 - DNA, 214 bp, Oryza sativa
  Clone ID: PAT_MRT4530_4634C.1
caaactaaagtgaaaaccttaatttttttagtaaccacaccacatacatgcacagcaagcgagaggagccaagggaggagccagatcgccccaacccaagacgcgccggaaaaaacagggaaccccggaccgggaccggcaggcgcaccaagttagcccatagggagcgccggaaaaactaggaacaaaaaagggcacagccgagacccggggg

SEQ ID NO: 43168 - DNA, 1500 bp, Oryza sativa
  Clone ID: PAT_MRT4530_46350C.1
atggcattcttcctggtggcatgtctgccatgggtttgtttcatcctcctctccctgtacgtcttccagttgttcgccgatgcgcgccgccgccttccacccggcccatggccgccgaagcctctcatcggcgacctccttgcccttgggaagggcgaccagcagcaccgctccctcgcgcgcctcgctgaccgctacggccccgtcatgtcgctccgcctcggcacggtcctcaccgtcgtcgtctcgacgccggacgccatgcgcgagatcttccacaagaacaaggataacctcgcgggccgccccaccgccgacgccttcaacgccatggggcacagcgccaactccctcctcgggctggagcacccgggcgtcaggtggcgcgccatccggaggttctccaccgcggagctgctcgcgcccaggcggctcgccgcgctgcagcccctgtgccgggacaaggtgcggggcctcgtccgcggcgtctccgagctcgcggcgcgcggcgagcccgtgcacgtcaggcgcgtcgcgctcgacatggcgctgagcttgatgctgagcgccatctactccgtcgacctggaccccgaatcgacggccgtgttcaggtcggtggtggaagaggccatgctgctgatcggcacggcgaacctttcggacctcttcccggcgatcgccgccctcgacctccagggcgtccgccgcagggtagcggaactgttcaccatcacgtaccgccaatacgacgagcaggttgcgcgtcgcaggcccgagcgggacgccggcgaggctggcaagaacgacttgctaaacgtggtgctcgacatggagcgcgagtggcaacagaagggctccgtactaagccacgacgcaatgagagtattatttaccgatttatacggtgctggagccagtacgacctcggtattaatcgagtgggcaatagcagatctactgcaaaatccagagtcaatgcgaaagataaaggaggagatcacaaatgtcattggcacgaatgcacagatccaagaatttgacatcgcccggctcccatatcttcaggccgttgtgaaagaaacccttcgtcttcgtgctgttgcgccattggtgcctcgcagagccgaggcaacgatagaggtccagggcttcaccattcctaaaggcaccaacgtaattctgaacttatgggctatcaaccgagatgctagggcatggaatgacccggataaattcatgcccgagagattcatcggcaatgacatcaattatctgggacaaaattttcagtttgttccatttggtgttggacgacgcatttgccttggattgccactagcacaaaaagtgatgtaccttgttctggggacactggtgcatcagtttgaatggacccttcctgaagagctcaaggagactggtatagacatgacagaaaaatgtggaatggtgctatgtctcgcaaaccccctcaaagtcatggctaagaaaatgtag

SEQ ID NO: 43169 - DNA, 252 bp, Oryza sativa
  Clone ID: PAT_MRT4530_46351C.1
atggcggtgccgcgttttgcgccctacgggctccgccagaaacggacggcgctcgcggcgccgctcggcgtcgggagggatgacatcgacggcgccggacggtggggccacaccctgttgcactttcggcgaatcggccataataagcccaatccgcaatccccgatcaaccgtggtaggctacccctttgcatgacaggtgggcccttcaaccaagaggcggggttcctatttaaccttgtgttcgtgtga

SEQ ID NO: 43170 - DNA, 977 bp, Oryza sativa
  Clone ID: PAT_MRT4530_46352C.1
atggcggcagagccgccaccgtctgctagcttctggactgtcccatccgccatgttcaccgcgaagaccgccattggcctccccaacggtgtacaccaccgtaccgctcttctcaccgaaccaccggagctcgatcggggtcgtcctcgccggcctgaggtctggtactcggacgtacacagtgcacttaatttggatgtagaaggattcaatttggactttggtggaggggaggggctgctgatgggctttggcctagagcttggacgaagagggaggctatgtggactttggaaattatttttcgagctgagcggtagaatggtgggtcccacggagatggggttagagcagtgggtcccctggcaggagagcgccggcagcgatccaaatggcgtaggcaggagggcgccggagggcagggcaccggggtgcgccagggtagagggagggagctccggcacggttggggatgcgacgagagcggctgtgctcggcgggcgcggcaacgataggaccgcggtggctttgggccggcggcgcagcttggttcggcttcggcgatggcgtggtgcgagctcgacgcacgcgtggcgtccaggagccagaaggaggatgggggcggcgtcgggcggctcggcggcgctcgggaaggaagggcgtgacgttggcgggcagatagaagacctccttccccacgccacttcttcgatctagaagtggttagcatcgatctgcaactggtgggcttggtgggcttgcttgctgcacggtgattcgtggatgcaccgctattccaattttatttgtgcgattgaattccaattgggatttcttcgggggttgattgaattccgattgggatgggatttgggggtgttgtgacggacaaattttattgggtggattggagttcctcatggatcgctatgctgattttattagggtggattagaatttgattcctggtttctccc

SEQ ID NO: 43171 - DNA, 915 bp, Oryza sativa
  Clone ID: PAT_MRT4530_46353C.1
atggaacgctgccgccgcctcacacaaggccacctcctgctcgcgctccaagccaccgccgtggcctccaccggtctgcacgcggctgcttcctgctcgtgctccacgttgtcgccgtggccaccgctggccctgcatgtggccgcctcctgcttgatgggcgacgcatcgatccatcatggtgtcaatgacggttgctgccaccgcgccgacgagcccaccctcttctacatgccacactacgaggcgtcgctctacgatgccttctttgccgtcaactgggagccacccttgctgctccgccatgtttgcgtgctgggtaacaacttccacaactacgtgatccaggcggaggagaacagatcaggccccgccgccaaggccaagctcatcctcacggcattgcagttctcggatgggacaacagctcatgagaaccatcaaaacacggcggcctccgacagcatccagatcgtgatcgtcgtggtcatcatctccctcattgcaactgcctccgtcactcccccgagcacagccgccacagctctcccgagctaccatcgcccaagcgcaggagacgaccaggcacaacggcctcgcaactgctctgctgcatcggttctgcacggcgtcgtcttcttcgtctacttcctctacatcgctatgtctactggaggaggtaatggtagaggcattggtagtaacgacgctcctagaggtggcggcaatggcgctcctggaggcaacgtcactggagaaggcgagaacgtcaacatcaacggaggcaacaacaccatcaatgcattatccagtaccgaagcgttatccgggacggcaactggcgaggacagtgggacagcggcgggggtggacgcagttcggggcggcgcgatggcgatggcggaggccgcttag

SEQ ID NO: 43172 - DNA, 199 bp, Oryza sativa
  Clone ID: PAT_MRT4530_46354C.1
tgtgccatcctcgtccccaacctttgcctcgttgttgccatcccaaccaccgtgaccgcgacacgtgagggtgtagcggatggtggccgtttcgagctcaacctccgcatagctctagcttcgctttggcccaccacctccgagagccagcttcgcgtgcccaggcgagcttgcgttgatccgcctcctttcgagcaag

SEQ ID NO: 43173 - DNA, 720 bp, Oryza sativa
  Clone ID: PAT_MRT4530_46355C.1
atgagattagcaaccaatcccttcaattggctcctagtaataaagcagttgtatatttgcatcacttccatgaggaccgagattcttatctggattcagctgagctcggagagatgccgatcaaaagccttgaaagtggcatccacggtcaacggagtgcagtctgtcacggtggccggcgaggagaggaacctgctgctggtgatcggcgacggcgtggtggacgccagcaggctgaccaggaggctcaggaaccacgtcggctacgccgagatagtggagctcaccacgtcgtcgtcgacggccgtgccgcccgtcgacgtagccgccgccgcagtcaccgaggacgccgtgcggccgcggtaccacggcctcgttgggggcggcggcggcttgccatggttcgcgcgcgtcggatgccccgtcaccgcccactcggtggtcgccagccacgccgcgccggcggcggcgctgtggccgggcgccggcgaggtcggcggcagctgggcggcctcgtactccgctcatcccagcccatgctaccgctcctcgccgttggccggcggctacacgttggacgtggcgcgcagccacgcggcgaactactccccgttgatcgagcggcacgccggccgcggcggccattacccggcgcatagctgctgctcccgccgcaagcttcttcgccgtagcgtgccaagctgctgcacgatacaatag

SEQ ID NO: 43174 - DNA, 945 bp, Oryza sativa
  Clone ID: PAT_MRT4530_46356C.1
atggaacgctgccgccgcctcacacaaggccacctcctgctcgcgctccaagccaccgccgtggcctccaccggtctgcacgcggctgcttcctgctcgtgctccacgttgtcgccgtggccaccgctggccctgcatgtggccgcctcctgcttgatgggcgacgcatcgatccatcatggtggcgctgggcttctctgtgccgtgccaggtgtcaatgacggttgctgccaccgcgccgacgagcccaccctcttctacatgccacactacgaggcgtcgctctacgatgccttctttgccgtcaactgggagccacccttgctgctccgccatgtttgcgtgctgggtaacaacttccacaactacgtgatccaggcggaggagaacagatcaggccccgccgccaaggccaagctcatcctcacggcattgcagttctcggatgggacaacagctcatgagaaccatcaaaacacggcggcctccgacagcatccagatcgtgatcgtcgtggtcatcatctccctcattgcaactgcctccgtcactcccccgagcacagccgccacagctctcccgagctaccatcgcccaagcgcaggagacgaccaggcacaacggcctcgcaactgctctgctgcatcggttctgcacggcgtcgtcttcttcgtctacttcctctacatcgctatgtctactggaggaggtaatggtagaggcattggtagtaacgacgctcctagaggtggcggcaatggcgctcctggaggcaacgtcactggagaaggcgagaacgtcaacatcaacggaggcaacaacaccatcaatgcattatccagtaccgaagcgttatccgggacggcaactggcgaggacagtgggacagcggcgggggtggacgcagttcggggcggcgcgatggcgatggcggaggccgcttag

SEQ ID NO: 43175 - DNA, 349 bp, Oryza sativa
  unsure (1)..(349): unsure at all n locations
  Clone ID: PAT_MRT4530_46357C.1
cggaccggccggaatttctgtttgactcacgcgcccttggtacccaaacctgaagagcgncagggaanggancgacttgatgggnnacggaaagctcaacatgcacaggannccncnncagaacaacaaagncacngaggagggcngggggaagcacgacaccanccgcanngaggancnngnccacgagaacangacngncggnccacacttcaaggaggccaacaacnnccngnggcccnncaagcngaaggcaccacncggnggccncaagaagaagaggaaccacnangncgagggnggngangccggcaaccgngaggaccacancaacgagcncaaccggagg

SEQ ID NO: 43176 - DNA, 267 bp, Oryza sativa
  Clone ID: PAT_MRT4530_46358C.1
atggtgcggacgaaggacgaagttgagttgggagcggtgctggcggaggatgctgtcgagcggaggaggtggcgctgggtacttgtggagggtgagctcccgagcaccccatataccgcaaactggttcgatcataaaatgcttctcaacttctgcgcggacttataccggttcattcgtcgcgacatctgtaaccatctaggagatttctacgacccttgtagcgaacttcttgcagaccccaaattcaaaaatctaagagagtag

SEQ ID NO: 43177 - DNA, 543 bp, Oryza sativa
  Clone ID: PAT_MRT4530_46359C.1
atggggagctgtgtcccagttgatcattcttttcttgcgagaaccagagatgacgccggaacatggagagttggaccccttggcgtccggatggaggcgaggaaatgtggtgtaggtgtggtctccacgtacgccctcccacatgaatataagatgagatgtaatgaatgccttgaatggattgcaagaggggggcgatgcaatgcaatgcaatcatgccaatgtgccaatggcaatggcaaccaacaagcagctgtcaccctcatgaagggggtgcaaaatgaattcattgaacctcctctagcatttgggagggtaaattcagtgaacatagcaatatccaatctcaaaagttcagatgagccaccatactgtcaagcatgggttcatggatctgccgcaatgatgtggaatgttcgtaatccagaatctaaggaggacagggtagatgccacaaacacacgtggtcaccatgcaatccatctcaattctcaacaacatttcgtcacaatgaaatacatgcatttgttctctctccaatga

SEQ ID NO: 43178 - DNA, 1188 bp, Oryza sativa
  Clone ID: PAT_MRT4530_4635C.1
ccgggctgcaggtatttttgtccaaactgacaccggctgtgtactggctgttcaattagatcgaggtgacaatgcacacacagtcaaaagaaagctgcagcttgccctgaatgttccaacagaagagagttctctgacatttggtgatcgtgtgcttaagaatgatctcagcactatccggaatgattctccattgcttctgaccaagactttcatgcatcgaagctcctccaccccatgcttgtctcctactggcaaggatatccagcagcaaagggataggggtggtccaattgagttgttagtatgcccaagccgttgttctcggactaagcagcttgtgaaggatgttgctagggctataagaaatggtgtggatccaatacctgtcaatagtgggcttggtggtgcctactatttcagaaacagcaaaggtgagaatgctgccattgtgaagccaaatgacgaggagccatttgcacccaacaatccaaaaggttttacagggaaagcccttgggcagcctggccttaaaagatcggttcgagttggtgagactggttttagagaggttgctgcctaccttctggattatgataactctgctaatgttcccccaacggttcttgttaagatctctcatcctgtatttaatgtgaatgaatgcgtcagttcagccaacatgaaggcttctaaggactatccaggggctgtaagcaagattgcatcatttcagcagttcattcctcatgattttgatgccagtgaccatgggacttcaagctttcctgtctctgctgttcataggattggtattcttgacattagaattttcaacaccgataggcatgctggaaatcttctggtcaggaagcttactggaccaggaaaatttgggaatcagactgaactgatccctattgatcatggtctctgcctccccagagtgcttggaggatccctaattttgaatggatcccttggccacaggcgtccattccattctctgatgatgaacttgattacatagctaatcttgatccgatgaaagatgctgacatgcttcgtatggagcttcctatgatccgtgaagcatgccttagagtgctaatactctccaccatatttctgaaagaagccacatcatttggtctttgccttgcagagattggtgagatgatgagcagg

SEQ ID NO: 43179 - DNA, 341 bp, Oryza sativa
  Clone ID: PAT_MRT4530_46360C.1
attatgttaaccacagggatacgcgattgattaatttcactgttaatttttctggtacataacatgacacaaatggtccggaaatacattcctaatctaaagagctaccacctgttcaacgaaaatttcctatgcccttaccgtgcttcagtttgggaatcccacccccttgaccaggtttgacccctgtaatttgacgggggatttaaaaagccacctacaaacgttttaccccaaataattccggataacgtttgtttcctttgttttaccggggttgttggcacaaagttacccaatgtttattcctaaaatcctcgcctggggttacctcctaaaaa

SEQ ID NO: 43180 - DNA, 378 bp, Oryza sativa
  Clone ID: PAT_MRT4530_46361C.1
atgaagcagccggtggtcgatttggtcagcaacaactcgggtggaggagggagacagaaggagaaagaacgtatcagcaattcatcggagattagggttttcggaccctcccctttggccggtgattttcatcggtgtgggaccgatccgagctgtccatcagatcagacaactcagattgacctcgcgttgggccgccaccgctgttgggccatgcggtcattgggccgtggaagacaactaggctgctcagttcgccccgcgtcgggccgtcgccagtggatgggccacgtgctgctcgccgtgcgatcagctcgcgcgcacacgctaaacaggccgggccgatttttgccggttacgaaagtatggtcgaaataa

SEQ ID NO: 43181 - DNA, 136 bp, Oryza sativa
  Clone ID: PAT_MRT4530_46362C.1
agctgatcgacaaaaaattgaagaacggggaacgccgtcctgacgcaaaggatgccgtggcagcatcagatttccacggcaagtttttcccttcccgcggcaggcagtcaaaacaacggcgggtggacaagtcaat

SEQ ID NO: 43182 - DNA, 2367 bp, Oryza sativa
  Clone ID: PAT_MRT4530_46363C.1
atgtcatcctttacaaatctcatgatcaatcttcttgtgttactggctctagcctccttgctctctcctgcacctgcactctgctatatccatgcaggtgaagcaggcagcgtcgtccgtactccgaatggcacgccgccgccgccagccgacgcctaccggacttacatcgtgctcgtcgacccgccgccgcacggcgcggccacggacgacgacgggcaccgccggtggcacgagtctttcttgccgggaggccggcgcatggacgacggcgccgatcaggcacggatcatccgctcctacaccgaggtgttcgagggcttcgccgcgaggctcaccgccgccgagctcgccggcgtggtgtccaagaagcccgggttcgtgcgcgcgttcccggggcgccggacgctgcgcctcatgacgacgcacacgccggagttcctcgggctgacgagaggcgccgggttctggagggacgtcgccggctacgggaagggcgtcgtcgtcgggctgctcgacaccggcgtccacgccgcgcacccttccttcgacgaccgcggcgtcccgccgccgccggcgaggtggaggggctcctgcgccgtcgccgccacgcggcggtgcaacaacaagctcgtcggcgtcaagtccttcgttgacggcggcggcggcggcgacgacgacgtcggccacgggacacacaccgcgtccacggccgccgggaacttcgtcgccggcggcgcgtcggaccgcggcctgggcgcgggaacggcggccgggatcgcgcccggcgcgcacgtcgccatgtacaaggtgtgcaacggctcaggctgcgatgacgacgccgtgctagccgggttcgacgaggccatgaaggacggagtcgacgtcctctcggtgtcgctcgggaggtggtcgagtccccccttcgatgaggaccccatcgccatcgccgccttcagcgcagtggcgcgaggcatcaccgtggtgtgcgcggccggcaatggcggccccgagccgtcgacggtctcgaacgacgcgccgtggctgctcacggtcgccgcaggctcggtcggccggagcttctccaccaccgtgctgctcggcaacggcgagctcgtcgacggccaggcgctcgcccagcagcccaactcctcgacctcgtactacccactccacttctcggagaagcaaccgaaatgtaacgagctcgccggaatcgtcggagatggcgtcgccggccacctcgtggtctgccagtccgatccggtcgaggacgagtccgtcgtgagcgccatgatggccaccggcgccggcggcgtggtgctgatcaacaccgagagcgaaggctacacgaccgtcctcgaggactacggcccgggcatggtgcaggtgaccgtcgccggtggccacaacatcacggagtacgctaggtcgtcgtcatcatcagccggcggctgcaaacccaacgccaccgtggtgttcgacaacacgttgctcagcgtccacccggcgcccaccgtcgcctccttctcgtcccggggaccgagcaaggtcgccccgggcgtgctcaagccggacgtcctggcgccggggctcaacatcctcgccgcatggccgccgcacctccagcacggcggcggcggcggaggcggcgggctcttcaaggtcatatccgggacgtccatggcgaccccgcacgcgagcggcgtggcggcgctcgtcaagagccgccacccggactggttgccggccgccatcaagtcagccatcctgacgacgtccgacgccgtcgacggcgccggcaacccgatcctggacgaacaccacgagagggcgaccgcgttcctcaccggcgccggccacatcaacccggcgagggccgccgacccaggcctagtgtacgacatcgccgtcgctgactacgccggctacatctgcgcgctgctcggagacgccgggctggggacgatcgtgcgcaacgagagcttgagctgcgggaagctggacaagaacaagataccggaggcgcagctcaactacccgaccatcacggtgccgctgccgcggtcgtcgtcgtcggcggcgccgccgccgttcacggtgaaccggacggtgacgaacgtcgggccggccaggtcgacctacacgatgaagctggagatacccaggtcgctgacgatgcgtgtgtcgccggagaagctggtgttctccggtgtcggcgagaagaagggcttcagcgtgacggtgagtggcggcggcggcggcggcgaggtggtggagggaagcttgagttgggtgtctgggaaacatgtcatgcgcagtccgattgtcgccgttccccaaccgtacctgaagttaggaagctag

SEQ ID NO: 43183 - DNA, 114 bp, Oryza sativa
  Clone ID: PAT_MRT4530_46364C.1
atgtgccgttcggtggatctgatgccgttggtgaggttcgtgctgcacgcctacaacccacgaagattgacgttccgccttgttggtgatatgggcccggagtatcacgtttag

SEQ ID NO: 43184 - DNA, 315 bp, Oryza sativa
  Clone ID: PAT_MRT4530_46365C.1
atggcgaggcgaaaaattgttagaggaatctggcagagggagagtatgacggagctcgtggctcctcaccgggagaccgcgcaggcccccctttgccagttcggccgggggcttagggtgaaatctcaagctctctcgggcgatcgcccttctcaagggaagcggtcgggcgtgacgccactcctaaagcctggtgacagtttcgaggggtcggcccctcgactcgcgttcgcccccaactccgacgaggagggcgatgccagcggtgcagacgaccgtgacgacgaggccggcgacccgggcgcatcggattga

SEQ ID NO: 43185 - DNA, 294 bp, Oryza sativa
  Clone ID: PAT_MRT4530_46366C.1
atgcgccccacggtcgccgcatgtcctcccacccacccgcgtacgcctcacagtccgcacatcgtcccacccaaccgcgagaggggacgcgtcaagacggagtcgtcccgctttgacgaggatttggccgccgccaccgctaactgctttgccgaggcgggcggcggtgccgacgatgggggccgagttggcggagacgacgccggtgacgagaagagcatgagccgggagaacatcgacgcggcgccggggccgggaggatggggcggcggcgctgggcagatggagtgctag

SEQ ID NO: 43186 - DNA, 357 bp, Oryza sativa
  Clone ID: PAT_MRT4530_46367C.1
atggggcttagtggaactgcttatcaaacagaaacaagggttggtgtttgtatggaatcagatttgtctgcatcgttcaataaattccgggaagaggggggagagtgtgaaaactgcccgctccgctggcgccgtcgccatcctcctcgccgcaccgccgagcttgtcgccgtcctctccgcaccgccgagctcgtcgctgtctgcgccgccgagctcatcgtcctcctctccaccgtcgctcttcctcgtcctcggagagaggagcgccggagaggggagaggagcgtcggacaccaccgctctgccgccgctccggtcgccgcctcgctttgttcggccggtggagaagggatag

SEQ ID NO: 43187 - DNA, 465 bp, Oryza sativa
  Clone ID: PAT_MRT4530_46368C.1
ctcggttctttttttttaattttttttcaggggggatcattctccgttaacaggccaaacagggggggcttaaggcggaccgcggggcttgccttaactccaaacaaaagttgttgtttgtggttatcaaggaaaacgggggcccaaaaagcgggtggggaaagaacccatcgcccaaccccagaaccgggggccggggggaggcctaaacgccgagggccaaagaagccaggggggaaaaaccccgggcagaggctcaaaggcgggccccgaaagggggggtgaccttaaagaacctgggaagcagggggggggaaaacccggggagtggatgcacggggcaaactaaggggggccgggacctaaccaaaggaggggaaaacgtgggggggaaggcagccggttttaggggcaccgggaaacctttttgggcaggggaaaaaaacggaaacggtggttcttaca

SEQ ID NO: 43188 - DNA, 1455 bp, Oryza sativa
  Clone ID: PAT_MRT4530_46369C.1
atggcgccgccggcggggacggaagcggctggcgctggccaccgcaagaactggcggggcgagtccgggaacctgtggcgcatcgccgggccggtgattctgacggagatcttccagttcctcatcgggttcgtcaccgcggccttcgtcggccacatcggcaaggtcgagctcgccgccgtctccgtcgtcaacggcgtcgtcgagggcctcgccttcggcctcctggtaaaaaatcacgccaggacgcttggcatggggagcgcgctggagacgctgtgcgggcaggcggtgggggccgggcagccgcggatgctgggcgtctacctgcagcggtcgtgggtcatctgcctcgccacgtcgctcgcgctgctcccgctctacctcctcgcgtccccggccctgcgcctgctccggcagtcggcggccatctcgtcggtggccggccggtacgcgcggtggtgcgcgccgcagctgttcgcgtacgccgtcaacttccccatgcagaagttctaccaggcgcagagccgggtgtgggccgtgacggccatctccgccgccgcgctcgccgcgcacgcgctgctcaactggctcgtcgtcgccaggctcggccacggcgtcgtcggcgcggcgctcgtcggcgacgtgtcctggtggctgctcaacgcggcgcagttcgcgtacctcgtcggcgggtcgttcccggaggcctggagcggcttctcgcggaaagcattcaccagcctcggcggcttcgtcaagctctccctctcatccgccgttatgctgtgcttggagatgtggtattacacagcagtgctgattctggtgggttgcctgaagaacccagagattcaagttggtgcgatttcaatatgcatgaactatcagctctggacactgatggttgcagttggctttaacgctgcagtgagtgttcgcgtggcaaacgaactcggcgcgaaccacccgaaagcagccaaattctcggtcatcgtcgccgtggtcacgtcggccgccgtcgggctagttttcactctggtcgctctcgtggcgaggaagcagctgccgaggcttttcacggacgacgacgtgctcgtcagggagactgcaaaactgggctatcttcttgcagccaccatattcctcaacagcatccagccggtgctatcaggggtggcgattggggcagggtggcagtcatcggttgccttcgtaaacattggctgctactatctcgttggtctgcctattgcagccgtttttggcttcaggctgagccttaatgcaacagggatttgggtggggatgctgatcggaacaatcctgcagactgttattctgcttgtcatcctctacagaaccaaatggcagaaagaggccatgctagcagaggagcggataaaggtgtggggagggggtgttgagctgccaaccattcaagaagcaagttga

SEQ ID NO: 43189 - DNA, 306 bp, Oryza sativa
  Clone ID: PAT_MRT4530_4636C.1
atgattgccggcggcgagtccgagtcggagtccgaccgacgacaggagaaccgcgccgagctggaagtgagtatcaatcgtaacctcgccgtgcaggtgtacatcagaatggtcttcacgttcatggcgtaccttgcgttcacgtggtcgacggtagtcctccttggtggctacgtcagctcgctgcaaagaaaggatttcgcgtgcttgacagcaattactgttgtacaggcaaccaggggcgccaccaagccgcggcagtcgaccacgccacatcgccgccgcctccaagccaagctgcagtga

SEQ ID NO: 43190 - DNA, 570 bp, Oryza sativa
  Clone ID: PAT_MRT4530_46370C.1
atggcgccggtggtgtcggcgctggccaagtacaagctggtgttcctcggcgaccaggcggtggggaagacggccatcatcacccgcttcatgtacgacaagttcgacgccacctaccagggatacagctgggcaggagaggttccggagcttgatcccaagttacatcagggattcttctgtggcagtgattgtttacgatacaggcagtcctttttgagtatatcgaagtggattgaagaggtaaatacacaacgaggcggagatgtgatcatcgtccttgttggaaataaaacagaccttgttgacaagaggcaaatatccactgacgaaggagaagccaaggcacaggagcacggcgccatgttcatggaaaccagcgcaaaagctggattcaacatcaagccactgtttcgcaagatcgctgcatcgctgcctggaatggaggcgctctcatcggcaaagcaggaagacatggtggacataaacctacggcctgctgcctccgggcaaataccttcaggggcagaagcacaagaagaacagaaagcaggcggttgttcctgctga

SEQ ID NO: 43191 - DNA, 330 bp, Oryza sativa
  Clone ID: PAT_MRT4530_46371C.1
atgccgaggctggtcagtggcagatccggtggtgggaggcacatgggcagtgggtccagcgataaagaggattgcgggcagcggatctggcggcgggaagggccgaggctggtgaacagcggatccgtctgtgggaggagagtggtgtgggcggtggcgaggttggtgggtagcagatctggctgcaggaggcgcatgggcagcagatcttgtgacgaagaggcttgtgggtggcgggaaggcttgaaggcgtggattcggcagcccagtggagcacggataatggccaagaggccaaaacagggttacgggcacggtggggtgtcctag

SEQ ID NO: 43192 - DNA, 1045 bp, Oryza sativa
  Clone ID: PAT_MRT4530_46372C.1
gcggtataaaacatagaaacttcagggaatttttgtctgtttcaaacctagatgccgctgttaaaaattacacataaatattctctatactcgaatcggcactgacaatccaagctacctgaaattcactgtgtgtactaatttgaagtctgaactctgaagcgacctcgatttccctgaatacaaaactctcagcaggaacaaccgcctgctttctgttcttcttgtgcttctgcccctgaaggtatttgcccggaggcagcaggccgtaggtttatgtccaccatgtcttcctgctttgccgatgagagcgcctccattccaggcagcgatgcagcgatcttgcgaaacagtggcttgatgttgaatccagcttttgcgctggtttccatgaacatggcgccgtgctcctgtgccttggcttctccttcgtcagtggatatttgcctcttgtcaacaaggtctgttttatttccaacaaggacgatgatcacatctccgcctcgttgtgtatttacctcttcaatccacttcgatatactcaaaaaggactgcctgtcagtcacatcgtaaacaatcactgccacagaagaatccctgatgtaacttgggatcaagctccggaacctctcctgcccagctgtatcccaaagctgcagccgtacggttcggtcttcgaggtacatcgtcttggagaggaaatcgatcccgatcgtcgcctggtaggtggcgtcgaacttgtcgtacatgaagcgggtgatgatggccgtcttccccaccgcctggtcgccgaggaacaccagcttgtacttggccagcgccgacaccaccggcgccatcacagcacgccgacgcctagcctaccctgcgctgcgctgatcgattccgcgtgtgggaggagagaattggggcttcgaaaatttcgaaatcgagtttgagctttcttgtttcggagtttggacgaacgcgtgcagatgatggaaaagaggaaggtgtaaaggaggaggaacgaggtgggcttgctttgaacggagaaggaaagcga

SEQ ID NO: 43193 - DNA, 195 bp, Oryza sativa
  Clone ID: PAT_MRT4530_46373C.1
atggggaaaaccgatgacctgctgctgttgtgctggtgcggtggcgtggcgtgctacgtgcatggggctgcggctctcgccgggtgggaggtgagggccgagagaggggaatcgatcgggaattcggaactcgcaacgtgcatgcagagagagcatggagccaggcatgcggcggttgactccacgccgatataa

SEQ ID NO: 43194 - DNA, 399 bp, Oryza sativa
  Clone ID: PAT_MRT4530_46374C.1
atgagccgccggcaggagggggctcgagtgccggtggtggtgggtgggtgccggagtgatggtggacggtgtaccttcggcgacgggcgcgggagcagctccttctaccgcaccgggcctcgggcgacggtgtacctccggcgacgggcgcgggagcagctccttctaccgcaccgggcctcgggcgacgacggtggggagcacgggcggcgggagctaaagaggcggcggcggcggcggacctcgggcgagtgggcgacggtgggcggtggacggtggggagcacgggcggcgggagctaaagaggcggcggcggtggcggacctccggcgagtgggcgacggtgggcggtggacggtggggagccacggggggtaccgaggtcgaattcgtatccag

SEQ ID NO: 43195 - DNA, 390 bp, Oryza sativa
  Clone ID: PAT_MRT4530_46375C.1
atggcgaaccaagtgctcctatctgccacaattgtgggccagtataggccctgccgaaagcgttttgtctgccaaggcgctcggggcgagctccggattcaaggccatgtaagtcgtgtcaatatgcccagctgccacctgagaatcggtgttaacgacaagccggggagcaccatagcccttgccttgcggagcacctgtaggatagctttgtgttcagtcgtgttattagtggccgagaactccaagcgcgccgcaaatgacgttgtgcggccggtgggcgaagtgattatcgcggctgcaccagtcctagacgcgttgcaggctctgtcagtgcgcgctgtccagatctcctccgtgggggcttcgactgctcggtgcaatgcctag

SEQ ID NO: 43196 - DNA, 195 bp, Oryza sativa
  Clone ID: PAT_MRT4530_46376C.1
atggtgaggacgagcgactacgctgtggggcggtggcggcaaatgaggttgaggtgggggaattgcaaaggagttggtggcggcagtacttactccgttacaactcctgctgctaggagtacgctgtcatccagggggagacggagaaaggacacgctattggagggcgagccgagcgagaagcccgagcagtaa

SEQ ID NO: 43197 - DNA, 312 bp, Oryza sativa
  Clone ID: PAT_MRT4530_46377C.1
atggagcgcagctgcgctgccgtgtcgcgctttgcattggcgcgacgccgacgaagcgacgagctgcggagacgcgcgcgcgcgcggggcggcaggacagcgcgccgcgcggcgcggctccttgggaagacgtcgcgcgaggaaccaatcacagagcaggaatcatatcacaattcaattgtgcaacacagcttcatgtcgatagaaaaagcactatacaacaaccacttgatacgctacctcatgatcttcctcaaagcaattgatgagatgcaatgtgcaaaatggttctacatcgaaccatattactga

SEQ ID NO: 43198 - DNA, 1302 bp, Oryza sativa
  Clone ID: PAT_MRT4530_46378C.1
atgccgtcgctcgccacggccgcggccgcgggagcgggagcgcctctccgccgcggcccgtgcgcaccacgccgccaatccgcgcacgcctcctcctcctcctcctcctccctcccctcccccgcgctcgccacgtccacgcgcttcgccgccaccgcccccatcctgcggctcgtccaacgaaggccaagagcgcctctgacggcggcaagagcggcgagccccgacgccgccacgggggcgcgatcgccctcctccggcggccagatgctggtgttcgtgccgccgcacccgctgataaagcactgggtctccgtcctgcgcaacgagcagacgccctgcgccatcttcaagagtgccatggcggagcttggtcggttgcttatatatgaagcttccagagattggctgccaacaatcacaggagagatccaaacacctgtagctgtttcaagtgttgaatttattgacccaagagagcctgtcatggttgttccgatactaagagctggtcttgctatggctgaaaatgcttcatcagttctaccagccaccaagacttatcaccttggcctgcgtagggatgaagaaacacttcaaccttcgatatatctgaacaacttgccagacaagattccagaggggactcgtgtgctagttgttgatccaatgctggccactggtgggacaattgttgctgctattgacttgttggttgaacgtggagttacaagcaagcagattaaagtcgtttctgctgttgcagcgcctcctgcgcttcaaaagctcagcaacaaattccctgggcttcatgtgtacacgggaacaattgattctgaagttgatgagagagggttcatagttccggggttgggagatgccggcgatagaagcttcgcgacttaactatgctaattatcgcagctgctgttctacctccacgagagggattggcgtaagctgaaatttccgaggattcgagcgcttttgacttgggagtcaggaacagtcgagttcacgttcacctgtagattgcctcgttcgagattctcccttcggaacttatcgttttgtaattatccattttgtgttgtcatgttgaatataggattagttcacgtccatccacgtttacaatttgttgggaatatgcatgtttaatgttttcaattatatcttacagatttcttgatactccatgggaaaaaatgttgacgatgccttttccaatcagagtaataaagcaatgtgcaagccagtactgttggtgtgtcgaaaaaaaaaaaaaaaaaaaaaaaaaaa

SEQ ID NO: 43199 - DNA, 837 bp, Oryza sativa
  Clone ID: PAT_MRT4530_46379C.1
aataagcaaacttgaaaaatagggttaatttagtagttagactttaaaacgaggtcaaatgagcaattgccccaatcagtgatgtgcttggttacgtctagctcagttttggtacaatgcatcattacattagtctttacagtggtcaccacataaggctccgtatggttcaaacccctattatggtatattgctagcattttcaatgaccagtgatgaccaagtgcaggcagattcaaatgaagctgctgaagtccagagcattttattccaacgtgcttcaacatcacttggctcgagctcagaatcacatgaaacaggttgctgattctaaaggatcgtgcgctcatttatggtgggtgatcatgtttatttgatgtttgaaccgtatgtgcagcgttctatagccacccgtccttgtgctaacttggctatgaagcactatggaccttatgagattctggagaaaattggctcagtgggatacaaacttaagttatcggagtctaaatagtgaagcattatcacccaagtttcttatgtcttgcagctgaatcactattcctgatcattccccagtgtttactcagttgcctgcttcattggaattggatgtggtggattaatgcccattgaaatacttaatcgtcggatggttataaaagggaatgcaaccatcgttcaaatccagattagatggggttctttaccagcaactatggccacttgggaagattaattacgaagtgatttcctcttgttttccaaaggctgtcaacttggtgacaagctccaattcaagcgggcggcagccgacattgtcacgaccaatgccgt

SEQ ID NO: 43200 - DNA, 585 bp, Oryza sativa
  Clone ID: PAT_MRT4530_4637C.1
atggagttctcggtcagccgccccaccttgggatcgatctccatgacggccaggtctagccttaacggcaatgcactactggagaagcgcccgggcggcggtggcccacgccgcggcggcggcccaccccggggcggctggcggcttgcgtcggcggtggcgcagaggcacgagggcggttggcggcctgcgccggcggcggcaagcgggcccgcgtgcggcggtgagcaggcggccagcggccgcgatggtgcactcatccctcttcggcgatggtcctgtgacaagctccctctccgccgccgtgacgtgctcccacctggcctatcttccctccccactattgtgacgagctccctccccatagaggacgacaaaatcggcagcggcaagctccatgtggtggcactcgatctcgagctctctctcctctccatcaccgagaacgacctaccaccgcctctccttcggtcgccgctgtcggcatggatcaaggctccctccccggccaccgtgactggatcgcaggcgatgcgggccatgacgaggtgtggccgcgcagctcatggacctcgagcttgctag

SEQ ID NO: 43201 - DNA, 1257 bp, Oryza sativa
  Clone ID: PAT_MRT4530_46380C.1
atggccgcgtcgtcgccggcatccagcgggaaggcggccagcgactcgtcggcacccgcgcccaacctgcgcggcctcaacaagcccaagtgcatccagtgcggcaacgttgcgcgctcgcggtgcccgttccagtgttgtaagagctgctgctacaaggctcagaatccttgccacattcatgttctgaaacagaacaacacattgccagataagccacctctgtcaacagctcctctgtcagagcaaccatcagctaatataccttcaaccggttcatcaaggttggcttctctgcaaaggcttccccatcatttcctgaattccctccgaacaaagaagtcccttgccaaaaaggttccatttatattacaggatgttatgggcataaacaagtggaggtttgagaagctaaaagaacatatccaaggagacatcgatgctgaaaatgaagcgtatgaaaggtatacacagaatgttgggttactggaggaaacgttcggtcttacagaagatgctgctgatgaacctgaacctgaagcaacttcttcagaagagaggatggaaacattggtttccgaggcaaaggtgaggctgaaatcggactctgcaaatgcagatggcttccgggacaggattgctactattttggaccagaagataaaggaattgctagaaagcaaaagcacctacgaggatgacaaccctcctgaccaaaatccagatgaccatccaaagcctgtcaagttatccatcaagcagcaaatggagagaggtgcaaagatgactgagctccttgctaagatgataagagcacagagtgaggttgatctgaagatctgctctggtattgcggcgcagctgtttggaaagaagaatgaattgagcaaccaagaatctgttgcatctgttacgattccttattcttttccaaagctctggactagggtggagattgatgatgccatgatgtgtaagatcaacggcgaattttcgtcttcgacagaggtaatgcagctataaacctggaattaatctgttcagacccaatgcttgtctacactagaagaacatggttgaaccacagcttcttttctgcttaacctactgttcgtttaatgtaagcaattgtaattgttttcatcagagacaaaaaccatgagagcaacacagtagtttgaccagtttgtattaaaccatgacatgagagcaatacagtagtatagttgtttttctttaaaaaaaaaaaaaaaaaga

SEQ ID NO: 43202 - DNA, 681 bp, Oryza sativa
  Clone ID: PAT_MRT4530_46381C.1
atggcgaggaacctggccactgttgccccaatcaaaatcagttcatcaaggttggcttctctgcaaaggcttccccatcatttcctgaattccctccgaacaaagaagtcccttgccaaaaaggatgttatgggcataaacaagtggaggtttgagaagctaaaagaacatatccaaggagacatcgatgctgaaaatgaagcgtatgaaagaagagaggatggaaacattggtttccgaggcaaaggtgaggctgaaatcggactctgcaaatgcagatggctccgggacaggattgctactattttggaccagaagataaaggaattgctagaaagcaaaagcacctacgaggatgacaaccctcctgaccaaaatccagatgaccatccaaagcctgtcaagttatccatcaagcagcaaatggagagaggtgcaaagatgactgagctccttgctaagatgataagagcacagagtgaggttgatctgaagatctgctctggtattgcggcgcagctgtttggaaagaagaatgaattgagcaaccaagaatctgttgcatctgttacgattccttattcttttccaaagctctggactagggtggagattgatgatgccatgatgtgtaagatcaacggcgaattttcgtcttcgacagagagacaaaaaccatga

SEQ ID NO: 43203 - DNA, 1186 bp, Oryza sativa
  Clone ID: PAT_MRT4530_46382C.1
aagaaaccctagctcgccggagcaccgccgccgtcgaggcctccggttccccggaatcccaaccgctggtcctgtgcggagttgcggggtggttcacggcgggttcgctatggccgcgtcgtcgccggcatccagcgggaaggcggccagcgactcgtcggcacccgcggtcgcggtcgccaacggcaatgggacgacgccgcagaagctgcccccggcgtccgccttcgacatgcccaagcccaacctgcgcggcctcaacaagcccaagtgcatccagtgcggcaacgttgcgcgctcgcggtgcccgttccagtgttgtaagagctgctgctacaaggctcagaatccttgccacattcatgttctgaaacagaacaacacattgccagataagccacctctgtcaacagctcctctgagagacctggccactgttgccacaatcaaaatcagttcatcaaggttggcttctctgcaaaggcttccccatcatttcctgaattccctccgaacaaagaagtcccttgccaaaaaggatgttatgggcataaacaagtggaggtttgagaagctaaaagaacatatccaaggagacatcgatgctgaaaatgaagcgtatgaaaggtatacacagaatgttgggttactggaggaaacgttcggtcttacagaagatgctgctgatgaacctgaacctgaagcaacttcttcagaagagaggatggaaacattggtttccgaggcaaaggtgaggctgaaatcggactctgcaaatgcagatggcttccgggacaggattgctactattttggaccagaagataaaggaattgctagaaagcaaaagcacctacgaggatgacaaccctcctgaccaaaatccagatgaccatccaaagcctgtcaagttatccatcaagcagcaaatggagagaggtgcaaagatgactgagctccttgctaagatgataagagcacagagtgaggttgatctgaagatctgctctggtattgcggcgcagctgtttggaaagaagaatgaattgagcaaccaagaatctgttgcatctgttacgattccttattcttttccaaagctctggactagggtggagattgatgatgccatgatgtgtaagatcaacggcgaattttcgtcttcgacagagagacaaaaaccatga

SEQ ID NO: 43204 - DNA, 3360 bp, Oryza sativa
  Clone ID: PAT_MRT4530_46383C.1
gcaatacctcttctgctcattttcttgcaaataatctctacgacgcctgactccggtgtgagggctggggtaaggtgcctcgcgcacttgatctcggctggggagaaggcgaactgggaggcagtgcagccgctctatatgttggtgctacgactagcagttgataccaggccaaaggttgggtagtagtctcattaatgctttctagatattctggagagttaccagaagcaaactgttatggtccctgcgagtgaaggaataacgagatgttttgagcgttttctactgcttgctggtggatccaatgctgtaaacacagatgtagcagaaggcggacctaagggggctaaggaagtcttgtatattctgaatgctttaaaatgctgcctccctcttatgtcatcaaaaccttccaataccatcataaaatattttaaagctctgttggatctgcaccaaccaatcttgacacggagcatattggagattctgcatgctgttggcgacagtccaactgtacagcttaaatctgacgtgctactggatatagtatgctctttggggctatctgtctctgttgaaagaaaatcaggggatgaaatggcttcaattgcaaggcttctaaatgttgctactagaaaaatttataatcagaataagaacatatgtgttgtaaagcttccactagtatttacttcacttggagatatattggcaagtgaatttgaagaagcaagattttctgctgtggaggctttcaaaagtttaatagaagactgcatcgatgaaagcatgatcttacagggaattacccagattaagtctagacatccagggataagatctgatcccacaaccatagagaagatatgtgctatcctagagggcttgctaaatgtccggtacggtgatgtctgggacaaatcatttcatgtgatttcaatggcatttgacaaattgggagaatcgtcagctgaccttttgcctgaagcacttaagaacttggcagacatgcaaaacttgtcagacgatgacttctctttccggaagcagcttgattcatgtcttggttcagctgttgctgctatgggaccaaagaacgttcttaaaatcctgcagattcattcaatatctgatgaaaatgaatggatcttccccattttagaaaagcacattgttggtgccagtttacaatttttcttaacagatattcgggacattattagagctgtagagaagaacattccaaagcttttaaaggaagataagcttttctccgccaagagagcagaaggttatgtgtattcactatggtctttgttaccatcgtgctgcaattatgcacgtgatacctcaatccactttagagctctgcagaatgttttgtgcgacacgcttaaaaaccagcttgacttgcgtggtatcatttgttctagtattcaggttttgattaaacaaaacaaggaagcattgtcagttcctgttgaagaggccatacttgctgaggatgaaataagcaaatctgaaagaagagcaaaagaacgctatacgaaagagtttgcagaggaaaacttaaaagcaatacgggctttctcttcaaagtttttggaagttctatgttctatattcttagcttcttcaaatgatgctattggacttctacagcctgcaataagtgatatagcttccatatcagagaaagacactgttggcaggttctttcttgatgcaataaggaagttgttggatgccacaaaagctgttaatgcagaacaaaagaatgatagttcaatgcaaatcgaagctaattccaacacaaataacatggcaagtcgtagggctctcctgttggactttgcagcttcattaatgcctggtttagctgcaaaatcgatcaatgtgctattcagttatgtaaaacctgcaattaaggatactgactcattgattcaaaagagagcatacaaggtcctttcaatgctgctcaagcaggatactgagtttattgagcggaatttggataccttgttgggcttgatgatttcttctttgccatgccaatttccatcaaagcgctacaggcttgaatgcctgcatcaccttattgtttacattttgaaggattcatctaagcttggaaagagggaaattattggttcattcctgactgaaatacttcttgccttaaaggaggctaacaagaagacaagaaacagagcttatgatctacttattgaaattggacgtgcttgtgaagatgcagaaaatgacgggaggaaggagaatttgcaccagttctttggcatggttgctggtggtcttgctggtcaaactccatatgcgattagtgcttctgtaactgggttagctcggttaacttatgagttctctgagcttattggagtagcatacaagctcctcccatcaacttttcttctcatgcagaggaacaaccgagagattgtcaaaataaagtcactgatggaaattctagtgaaaaaatgtggtttggatgctgtgaaggctgtgatgcctgaagaacatataaaattgctgaccaacattaggaagattaatgagcgaaaaatgcggaaatctaaatcttctgaggatggggataacatgtcgatgacctcacgagctacaagcagacaaagtagatggaatcacacacagatgttttctgattttggaagtgatgaggatgactccaatggtcccttttctgcccaacatacagttgcttctcgtactggaacaaaagcttcaacacgcaggtcgaccaggaagcgccaagcagataagagcttgctagagaagttcattgatcagtcaactggcgagcccctagatttacttgaccagaaaacagtgcggttggctctcaaatcgacgaaaaagagggctatgcctgatgaagatgatgatgaggtggagatggaccctgaagggcgtatcattgtgcgggaagagcgggagaggcgcaaaaagaagcagcctatctcccgagacgacgaggccgacgacaggagcatggtccgaagccagtccgtcaagaggaggaagacgaccagctccggctgggcctacactggccatgactacaccagcaagaaggccagtggcgatctcaagaagaaagacaagatggatccgtatgcctactggccattagacaggaagcttctgaaccgcaggtcggaccgcaaagcggcggcacgcaagggcatgagcagtgtcatgaaggtgaccaagaagctcgaagggaagagcgccgccagcgcgctcgctgctaagagaacgcaaacaaaaaaccggaagcagaagaagagcaagtaaggagacgaagggacagag

SEQ ID NO: 43205 - DNA, 1256 bp, Oryza sativa
  Clone ID: PAT_MRT4530_46384C.1
gcggaaacagagcttatgatctacttattgaaattggacgtgcttgtgaagatgcagaaaatgacgggaggaaggagaatttgcaccagttctttggcatggttgctggtggtcttgctggtcaaactccatatgcgattagtgcttctgtaactgggttagctcggttaacttatgagttctctgagcttattggagtagcatacaagctcctcccatcaacttttcttctcatgcagaggaacaaccgagagattgtcaaagccaacttaggttttatcaaagctttggtggctaaatctaaagccgatgtattgcacgagcatttgaaaggagttgtcgagggtttgctgagctggcaaactgatacaaagaattccttcaaagcgaagataaagtcactgatggaaattctagtgaaaaaatgtggtttggatgctgtgaaggctgtgatgcctgaagaacatataaaattgctgaccaacattaggaagattaatgagcgaaaaatgcggaaatctaaatcttctgaggatggggataacatgtcgatgacctcacgagctacaagacaaagtagatggaatcacacacagatgttttctgattttggaagtgatgaggatgactccaatggtcccttttctgcccaacatacagttgcttctcgtactggaacaaaagcttcaacacggtcgaccaggaagcgccaagcagataagagcttgctagagaagttcattgatcagtcaactggcgagcccctagatttacttgaccagaaaacagtgcggttggctctcaaatcgacgaaaaagagggctatgcctgatgaagatgatgatgaggtggagatggaccctgaagggcgtatcattgtgcgggaagagcgggagaggcgcaaaaagaagcagcctatctcccgagacgacgaggccgacgacaggagcatggtccgaagccagtccgtcaagaggaggaagacgaccagctccggctgggcctacactggccatgactacaccagcaagaaggccagtggcgatctcaagaagaaagacaagatggatccgtatgcctactggccattagacaggaagcttctgaaccgcaggtcggaccgcaaagcggcggcacgcaagggcatgagcagtgtcatgaaggtgaccaagaagctcgaagggaagagcgccgccagcgcgctcgctgctaagagaacgcaaacaaaaaaccggaagcagaagaagagcaagtaa

SEQ ID NO: 43206 - DNA, 420 bp, Oryza sativa
  Clone ID: PAT_MRT4530_46385C.1
atgggcgccatattctcccgcgatgacgacgacgacctctccaacaccaccattctctgcccccacacgagtggatcccgccgcctctccacccgcatgtgcgcggatccaccagcgatgatgatgggaggggcggatctggcagcctctccccctcacacgaatcttgccacctcttcgcccccatcgctcgcggacccgttggcaacggtgggaggagtggcggtgtcgagcttcggtagggcagggatcagacagaaccagctagctcgaggacacggcaggaagcgcagcaagtgccgcgagcgcatggatgaagcaggtggcgtccgatggtgccggcggcggtggcatggtggctcggttgcggagcgggcaatgcgcaagattgagagaagcagcagaagtattcaatcttga

SEQ ID NO: 43207 - DNA, 110 bp, Oryza sativa
  Clone ID: PAT_MRT4530_46386C.1
ggctttcttctgaacactactctagggtggtacaatggggggcttcgagggagttatcggcttatttacacatgggtggggagaggtcccacgtcatcgatgtgggagat

SEQ ID NO: 43208 - DNA, 915 bp, Oryza sativa
  Clone ID: PAT_MRT4530_46387C.1
atggccacagcactctatctttcactgaagtcaaggtatgatgaagaggtacatttgaaggttgaaatgttcctcaggacatatggcacatcgaagcccacaaggtacagtttctctgatgtcaagaagataacgagatgcttcaaggaacaattaggtcagggtggatttggaagtgtaaacattgtccgccttctgggattctgctctgaaggaacacgacacattcttatctatgaattcatgcctaatgaatcattggagaaatacatattctttcatgaccctaatacttctcaagaactcctggcaccaaaaaagatgttagatattgccttaggcattgcccgaggaatggagtacctgcatcaaggatgcaaccagcgaatcctccattttgatatcaagcctcataatatcttgctggactataacttcaatctgaagatttcagactttggtcttgcaaagctgtgtgctagggaccaaagcattgttaccttgaccaaagcaagaggcacaatgggctacattgcaccagagctatattctaggaactttggggagatatcttacaagtcagacgtatacagttttggcatgcttgtgttagaaatggttagtggaaggaggaactcagacccaagtattgaggaccagaatgaggtctactttctggagtggatctatgagaaagtaattactgggcaggactttgtacttagtggggaaatgacagaagaagatagactgaaggttagacagatggccctcgtggcactttggtgcattcagtggaacccaagaaaccgtccctcgatgacgaaggttgtaaacatgctaacaggaaggttgcagaatatacaggtgccccctaagccatttgtttcatatgaaagccatgctgtgccataa

SEQ ID NO: 43209 - DNA, 2011 bp, Oryza sativa
  Clone ID: PAT_MRT4530_46388C.1
atgagtagcaaatttctcgccatgtatctcctgcttgctctcctcagccatggcacctacagctacagtgccaccacagcttcaggctgggacgcagtaccatcaggtctagacagcgcactcaccaaattgtatctctgctgctcctcgtggccgcagaccaaagttgcgccgtgagatccacatgcattacccagtgtcccggtccctggaccgtgtaacagagctccgtgccgctcgcgggctgcaatcgtgcaacacatcgtcaaagcatgcctgctgggcttcatgggccaaaactgcacgctcccgccaagacactgccctaccacactcattcctggcgccttgcaacgtctcctccatcaattataaggaggccatcattagcatcagcccgcttgtgtcctcctaacgtctccatgcccttcagaaccccgtctttgacaaactacaacaccatccttacgactaccatctttgtaaattatacagctgggctcctgcaaaaatagtatactgatcaaaagagttctcacgaaatacttctccagtcgatggctacgctttcatgaacaacgccgattatatcaccggcccaatctcctgccccagtgaggcaagtcacttctcatatttggtggatgctcggctatgcatgtatgtgcttcccttggactgcaggatcgtctccagaggctccattccaatacccggtccagcctactctgatatcggtggcccaacattcaaggaaagagcagaaaaattcatcaactttgctgagacgactgtcagttggtattctgatgacgaagttaccattaactgcacagagtgcgaacgtcaaaagcaccgctgcgcattcagctcacaaaggaatcgaacattctgcatgagccgcgagcatcacggttcgagtgtcaaagtcatttcagctacatcatcggcagctgcatttgttgttctttcattgatcatagccactgtgctctatatttcgctgaagtcaaggtatgacgaggaggtacatttgaaggttgaaatgttcctcaggacatacggcacatcgaaacccacaaggtacaatttctctgatgttaagaagatagcaagacgcttcaaggaacaattaggtcagggtggatttggaagtgtctacaaaggagaactaccaaacggagtgcccgtggcagttaaaatgatagaacacactacaggaaatggagaagaattcatcaatgaagtagcaaccattggacaaattcatcatataaacattgtccgccttctgggcttctgctctgatggaacaagacacattcttatctacgaattcatgcctaatgaatcattggagaaatatatattcttgcatgacccaaatacttctcaagaactcctagcagcaaacaagatgttagatattgccttaggcattgcccgaggaatggagtacctgcatcaaggatgcaaccagcgcatcctccattttgatatcaagcctcataatatcttgctggactataacttcaatccgaagatttcagactttggtcttgcaaagctgtgtgcaagggaccaaagcattgttaccttgaccaaagcaagaggcacaatgggctacattgcaccagagttatattctaggaactttggggagatatcttacaagtcagatgtatacagttttggcatgctcgtgttagaaatggttagtggaaggaggaactcagacccgagtattcagaaccaaaatgaggtctactttccagaatggatctatgagaaagtaattactgggcaggactttgtacttagtagggaaatgactgaagaagatagactgaaggttagacagatggccctagtggcattgtggtgcattcagtggaacccaagaaaccgtccctcgatgacgaaggttgtaaacatgctaactggaaggttgcagaatatagaggtgccccctaagccatttgtttcatatgaaagccatgctgtgccataa

SEQ ID NO: 43210 - DNA, 523 bp, Oryza sativa
  unsure (1)..(523): unsure at all n locations
  Clone ID: PAT_MRT4530_46389C.1
gaaggggantacaccggcnggacnccccacccacacgagggantgaccaacacccnctccacacgagacngccttaaacactctcatnccgganacccacgagtggaaaaggccccacgttctcttgtcccggaaaaacgagtttggaaattgcctgttctncacacnctctcctctctncgctcgggtggtctctgattngagtgagtgaccgagggaagacggactgactgactgaaagagtttacccttttcccacgtatgttccantctttatgnctgccccaaccacaactccactagtggttaaggttcaccctggtagtaggtccttgcccacagtgtgcccacacacaggccacttttgtctgccnctctatgtntncggcgagaactccgcctcacaagaacctactgttccttgtcggctttttttggttctcaacacctggagtgtgagaagctcccctttggatattgatccaaatgtgttctgcctggctaaaaaaaaaaaaaaaaaaaa

SEQ ID NO: 43211 - DNA, 459 bp, Oryza sativa
  Clone ID: PAT_MRT4530_4638C.1
cgaacgcgtatgcaggtggctgacagtctaggtcagcgttgctacacagaaatggactacccgatggactccatgtcacggtgtcatatgaacaacaagcgtcatcacctggaccatcgacaaaccgattgcttggtagatgaacatatgagaaacgattgatgatacaagcttgacgttgacgacgacagataaaacatatgcactgggtttagcaatgaacttgtaagcaagtgcttggagataggcaacacacgatgcagggcacctcaagggccaagaggaccaaagatgacaaatagggcactttgaacgcgggctcactaggctgcaaccatattcataattgcacgagcaggaagagagacaaatgcaatgataatagcattattatgatagaagatatcaaactagtcaatatggtagtggatgtcctaacgggtatgattataccttttg

SEQ ID NO: 43212 - DNA, 813 bp, Oryza sativa
  Clone ID: PAT_MRT4530_46390C.1
gcacgagggtagccatcttgtgtatcgaatagctatagctctccagcagattgatcagtgacgacgacgacgatggcggcaatggcggcggcggcggcggggacgaagaagaaggcgaggaagccgtacacgatcacgaggccgcgggagaggtggtccgccgaggagcacgagcgcttccttgacgccctgattctgttcggccgtgactggaagaggatcgaagcgttcgtcgccaccaagacggccatccagattcgcagccatgcccagaagcattttctgaaggcccgcaagttcggcctcgccggtgggctcccgccgccgcttcaccctcgccgtgccacgctgctccgggccaacgccgcggcggcggacatgatgccgcccccgtggctgccatcggccggcggcggctccatcggttgctcggcgccaccgtccggcgtgcagcagagcatggccggcaggtcgccggcgtgctactcaactgatgaagcttctttccggccattgattcatagcaatgacaatgactgttcattcatcgagacaccaagctgcatcggatcaggtggcgaatcatggatcggtgatgatgccttcttcatgcaggatgaaacaattcggctcccaatttctccagatgacctgggattcgctcaggtgtacaagttcgtcggcgacatgttcggctccggcgagcggcggccggtggaggctcacctgcggaggctgcagggcatggaccctgccatctcggagacgatcttgctggtgcttaagaatctcgaagctaatctatctgcttaa

SEQ ID NO: 43213 - DNA, 402 bp, Oryza sativa
  Clone ID: PAT_MRT4530_46391C.1
atgcctaaattatgcttagctcaatataggattataggtcaactcagtagtcatgatatgtacaaaaggacggtgctagcagatgattcagagattcagattgaaaaatccgtaggctatacggatttgatcagtcaggagttgcacaacgccaacataaggactacaggaggcaacaaaaaaacaaagcccaagagattgaaatggaagattatcccatccaagcaggagaaccactcattcttgcagagcagagttctgttttcagggaacaccattcttaatttgttccgtcaacaacagcagcagatgaagctcaaggcaggcaacagatgttgtgactttggcaacgaaagctgtaccctgaagtcatgggagctggttggaatgaatcagggttag

SEQ ID NO: 43214 - DNA, 339 bp, Oryza sativa
  Clone ID: PAT_MRT4530_46392C.1
atggcgctctcggcgagggcaagcgttccgcctagcgtcgcggggcgggtgacggcgccgctgggcaaagcgggtcgcccgcatcaaccaacctctttgaaagcggccgtcgccgcagctgacatagatgggtttgcctgtgtggcctccgcctcgtcccttaagatcccctcctcccccttcttggatgacgccccgccgtcctcccaactactctacgtgctcgaccggctggctgccaagctcctccctcgtgatgatggaagcaagtcagctgccacgtcggacgaaactgcttggggatttgcaatggttttgggagttaggggacaggcctaa

SEQ ID NO: 43215 - DNA, 930 bp, Oryza sativa
  Clone ID: PAT_MRT4530_46393C.1
atggagctcacctttcgcgaggaggcaaccactccggagcggttggggcaaaacagaagggcggccaaggcactcctcgatgaggtgaagcaaacggcagtgacggcgcgacttgaggtggctaggagcggcggtggtggccgaccgaagtgcagaacggcagcggcactggggattcacagtggagatggtgtttcgtgggtggaaggtagaagtggagtgggtgctggggtgcggagcggcatggcgaagccggtggcgccagcggcaggatgcggcgacggcgggagcggcggtggcgcgttgttggagagggagaggagcggaaatgagagagggagctccggggatcgtttttatgggctcgggggattgggatcgtggtcgggcgaggcggtagagggcggcaactgccggcgatgtggggggagacagagagatgagggaggcggtggcatggcaggattttgcgaggagagtagaggaaacggctactttgccaccgcctggaggcctacaccaccacgccggccacctttgccgctgcccagtgatgtcacccctgtgctggacggctactacgtcactgcccggtggcttgcacctccacgctggccacctacaccgccgccgggtgacgtcatcttggcgcagggcagctacttcgtcactgcctggaggcctataccaccatgctggctaccttcaccgccaccgggtgatgtcgtccccatgctggacagctacttcgtcgccgcccggtggcttgcacctccacgccggccacctacgccgccgtcggatgacgtcgtctatgtgcaggacggctacttcatcgcctcctggaggctcgcacctccacgacggccacctacaccgctgtcgggtgacgccgtccccatgctagacggctacttcgtcaccgcctag

SEQ ID NO: 43216 - DNA, 356 bp, Oryza sativa
  Clone ID: PAT_MRT4530_46394C.1
atagggaggatccccgtcattcatcatttaatggaggtggacttgggggcgcgcatgcaccggaaacacgatcctgggcatgtacagagcggtcaagccgactctggacggttgagaggcgctgtgcccctcatcatcgtgatgggacggggtatacctaccgcacgccgcctgacacccagtcagaccgcgcgtgacttgctgcctttccgtctgtcgttcgaccggtcacgcaccggtcacgatttagtcaggcgcgcagcatgccacatttaatgcagcgtgcatggtacccccagacccatatcaccgacaccaagaacacatgtacctctaacctttctgatggacccact

SEQ ID NO: 43217 - DNA, 744 bp, Oryza sativa
  Clone ID: PAT_MRT4530_46395C.1
atggacatgaatcaggctcaccttcatcgaatgctccttatggtgctctggcgtaactggttcgtaagaaatgaaatagttcatgataaaccggcgccaccaaccgaggtgtctagaaggtttttggaaagctatgtcaactcgctgttagtgataaagcaacatccccacattgatcttgtgaaagggaagcatgtgattaatacgtccccaattctccctgaagctcagccgcggatgaaaaatgatggggtctgtaggtgggagaaaccgataagagggtggatgaaggttaacattgatggttcgtatgatagccggaatggaattgggggtattggcttggtaatgcgtgactgcacagggagggccttttttgcctctagtcgccacttggagcgctgtaatagcgctctagaagctgaacttcaagcgtgtagagagggactgattctggggcttcagtacaccctcctccccattgtcctggagaccgattgtctggaggcaatgttattgattcagagcacggagaaggtgatgtcgacggaggcgtttatcgtcagggagattaaggacctggtccaagggaatagggagatcaagcttaacaaggctcagcgctcgcaaaatcgcattagtcactggctagctaataaagctcgttgcgagcatatctctgaaatctggttagagaacaattgtaaccatattttacagctcgtcaatgacgatgctggctga

SEQ ID NO: 43218 - DNA, 247 bp, Oryza sativa
  Clone ID: PAT_MRT4530_46396C.1
atgtctttcgtgattagtctcacccctcacactatattaaatgatgatgttattaacttgtttagctcctggtttggaatggttaattcctggtttggagatagaactatgcaactgggtttgattgttcagaatggttgggcctatacaacagggtatgttgtatagcgttggattaatattgtttatttaatactctactgttttattaaattctgaaatatttattaaatgttgtttatgcaaa

SEQ ID NO: 43219 - DNA, 333 bp, Oryza sativa
  Clone ID: PAT_MRT4530_46397C.1
atggaaccctcacaccccgtagatgctcccacacccatcaattcggtcagaaattatcgctatcgccctagccccatgttgcccgagctcagccatggcgtggccgagtttagccgccagtccacacggcgccatgcgccgtggccgccttcgggtggtcactggagttcctccgagcctcctctggtcgccgctgggatgccctcgcccgggctggggcgcacgcgccgcgcctctgctccgctcgatggccggcgcgaggaagaagacgacgggaaaagaaagaacgagaaagagagagcagcggggtccacctgtggaattttgcattga

SEQ ID NO: 43220 - DNA, 540 bp, Oryza sativa
  Clone ID: PAT_MRT4530_46398C.1
atggagggcaacgcgtcgattcaaccttcttgttcagcgaagcagcaaggtcacactggtgggggcgaagcggtggcctgcgagaggtcagcaagctcctcaccctacggtcagactcaactgcccatcaatttgtgctcgatgtactcaactattcaagcagtcaagcttgctacaaattcttcatctagaccgctggagttcgccactgctccccaacccaatgtcctgctgagagactggacgaacctcggggaagggcccgcggggctgatcgcggagcgcctcctcgcgagcgacgtcgcggactacgtcaccttccgcgcggtctgccgcccgtggcgcctctgctgcgcggacccgcgcgcgcacggcgtcctggaccgccggttccacccgcgccggtggatcacgctgaggggcacccgcgcacctccccgtgccgccgctgcctctgcagtctgcacgccgccaccgcccgcgcgggagaatatgatcgtagcaaccgcgagctaccatatggcgcaccgctgctgttga

SEQ ID NO: 43221 - DNA, 3150 bp, Oryza sativa
  Clone ID: PAT_MRT4530_46399C.1
atggcgaaggtcgctgtcggccagtgggtaccccatgtggaggccttcgtcgacgtctcccggcccccggcccaacactctgccagtgtggatgccctttctgccttggtgaataaggacaagctgactctctttgttttggtgtcaaagatggagatgtacttgacgacgactgaccacattgttagatccagaggaatcttgcttcttggggaaatattgtgtcgaatttcatttaaacagttagatgttaatgctatttcaacattgtcagacttctttatatcaagattgtcagattggcaagcacttcgaggagcacttgttggatgtttggccttgttgcacagaaaacgaactgttggtagtatcatcattgctgatgtcaaaagacttctcgagactttcttgcagaatgttcaagtccagtcacttgcagctgctgaccgcaagctatgctttcaaattctgaactacatactggatcactaccctgaggctgtcaaaacaatgggtgatgagcttctgtacggaatgtgtgaagcaattgatgaagaaaaggacccggaatgcttgaagctttcatttaatttggtcgaagctgtcatgaagctatttccagatccatctggtttggcagcacaatatgcaagcgaagtttttgagattctgagtaaatattatccgatctacttcacacatggagtgggtgatgatttagatgctacaagggatgatctttctaaggcactaatgcatgccttttgttcaaccccatactttgagccatttgcaattcctttgcttctagataaactttcttcctctcttccattagccaagcttgattctttaaaatatctggataattgcatccgctgctatggtgcagacagaatgggtagacatgtaatcactatttggtttaagttgaaagaagtgatatttagcctgtccatagaccaaattttatcaacctcaggggctaaagacatggagaagaataagaatgaaatagtatcagaagctctcacttgtttgaagacagctattattcaaatgggtccttcagatgaagatcgtttgatcaatttaattttactggatgaggacattgtaagtagcatccattctgtggcaagtgaagaagcctctggtttgacttcattgcaaaacccgattcaactgcatgcccttggaagtgtcatttctattcttgctgaatcatctgcatatttctgcactagagttcttcaagcgcattttgcacgcttggtagatagtttggaaatctcagctggtcgtgaatctcagcacttgaataattgcagtggaccatcttctggtgctattaactatggtgcactctatttatctgtccaaatgctttcatcctgtcgagaggtggccttgacatataaagaggaattttctccaattaaatcagcaaaggagtcttggtggcttatcttagagaaaaaattggactcactaatccatattcttcaatcattactaaccattgattctcaatttgtccagtcagcagacaggcaagaatatgttttgtgtgctgtgaagggtttgataatccttgcaactttcccggaaccccgtttacctctatcggctagtgcatatgaggatgttctgctgacgcttacttcagttaatggaagagtaaaatgcagcgaatatgtagtcaatcttcttgaatgctactgtggtcgggtccttccttggttgtttaattttggtggtgtcaatgaacttgctttgaacttcgctatgcgtctctggaatgaaattagggacttggctacttcagatagaatcggatcacaggatcttcttagctcactaatgatgggaatgaagcttgtaatcggaatctgcacagaggaacaacagtcactgattgttcagaaagcatatgacacaatatcatcgatgctgtctcttccagtgaaatcaatgacaagacatcttttggctgttgatgaggcagttcctctatactctgttcgtgatacatttctcatgtgtatgctttcatcggtcatagttggtcttcggcctcaaacacctgtaccagatatgctgatgatgattaatctctttacggtcttcctactgaaaggacaaattccagctgcccatgcattagcttctattttcaacaaaaacctacacaattcggaattctcacatgagaataaactggataaagtgattgatactattcttgagaggtgtttctcaacaatatcagtgcgaagcaatatgaagacatctctctcttgtgctggccgttcagatgatgctaattgctcagagatcttgtctggaagcattgaatcaaaggacgatatcatctctggcttggcctggcttggcaagggattgcttatgagaggagatgaaaaggtgaaggatgtttcactgtttcttcttaaatgtctatgctcagatcagagtttggctggcatttcatcccatcaggaagaacatggtatcagtgattcatcatatgcttctcttgcaacatctgcagctgatgcattccatgtgatgatgagtgattcagaagtttgcctgaataagaagtttcatgcaagaataaaaccactatataagcagcgtttcttctcaatattgatgccaatttttctctctaaaatcaaggaatctactgtgatgactacaaaattggttttgtatcgagcttttgggcatatcatttccaatgctccagtaccagcagttataacagaagcccatcggattctacttgtgatggttgatagcatagctaaattaagtcaggatgttaaggataaagatctagtgtatagtatattgctcgtcttatctggaatgctgatggatgaaaaaggcaaagaatgcattgtggagaacatccacatcattgtcagtgtccttacgcagctcgtttcgtatcctcacatgatggttgttcgagagacagccttacaatgtttagttgccatgtctagtcttcctcactcaaaaatttatcgcatgcgaccacagatcctacaagctgcaatcaaggctcttgatgataagaaaaggagagttcgccaagaggctgttcgttgtcgacaaacatggcaatcatttgcttaa

SEQ ID NO: 43222 - DNA, 1915 bp, Oryza sativa
  Clone ID: PAT_MRT4530_4639C.1
atcggcacgagggtcttctccttcttcttcttctgtactttaatcctctccccttctcttctcgttgcgtgcaagcatctctcctctcttcctcctcagatgcttgcttgcttgcttgcatcctcctcacattcaccacggggtttctgctgctggtttgtctgatgtgtgagatagaaagagagtgtgagattgaggacgaattgaagcctagcttgtgacgcaaagttggcatcttttggtttggagaggcccactgtttcttccacttctcgccttgctcgcattccttccttgcctccatccccatctccatgccatccgtgtgaagcctcgcgccgtttggttggttgcaagaacgccacccgcgttggttgttgccttcgcttctttggttgctgccgtctacaagaagcctctctctggcctgtgctgcattggcctcgatcggtggtcgaacacatgttccacggctcgccggcggcggtggcggcgtgggcggcggtggcggagatgaggttcacgacgggggggtcgtcgacgcggtcgtgggagccgacggtgacggcggacacgtcggacctgcactactggatgcagtggcgcgccgcggtgtgcgcgctgtccgtgctcgcgtgcatggccgtcgcggcgtgcctcgtgtggcgccacgagggccccggcgccgaacgccgccccggcggcgcgtccggcggcggcggcgggagcaaggagcggcggcggccgggggtgctgtacgacgacgaggcgtggcggccatgcctccgggacatccacccggcgtggctgctcggctacaggctcatctccttcttcgtcctcctcagcttgctcatcgtcattgtcatctccgatggtggcaccatcttctactactacactcagtggaccttcattctggtgacgatttacttcgggctcggcacggcgttgtccatctatggatgcagcaagcttgctgatgagaatgttgtcactgaaagaacagacatggagctcggctcgtacgtcgcccatggagctggtactaaacccaatttgaatggggaagatgacacaggagagattgctggattctggggttacctgctccagatcatctaccagacaaatgcaggcgcagtgatgcttacagattgtgtgttttggttcatcatcttcccattccttacagtcaaagattacaatctaaattttttgttgataggaatgcactcggtaaatgccgttttcttgcttggtgaagctgccctgaatagcttggtacttcgccgtcgcgatcatgcaattaccatgctacgcggtattcagactggtgatcaaactgaaacaccacctgctcacaaggtggtttccgggttcagtcgtaagaggctcatctacaccataagccaggccgtcatgcatcatcttcctccgccattgccaacagtttatacagaaagggcaatggtgaagatcacaagaaaagaataatggcagcctggtggtgatggactgatggtggcatcgatcaccgactccatttccattcctcctttgcgagattctcttattgcagcaggtgcaactctccgagcgaaaaaagaaaacaggagaggcacatgcgttttacaccaccgtatagtagttctgatagatgtaaattgaagcttacaggttcagatatgagattcagagagtttttctttttctttttggatgtaatggaaactgaaatgaacagagagaaaaaaaagagtgtggtggggttatgtatagcttgactcattgactgattggtcaaatggaggagatatttgttaaaatttttttaaaattgtagagataataaattaaaactcgttggtatatgtgattaatgctaatgagtaatgaatggatgcaagtgtgt

SEQ ID NO: 43223 - DNA, 358 bp, Oryza sativa
  Clone ID: PAT_MRT4530_463C.1
gttatctgttaccttagtcatttaatcgttgttttgttgggcctaaaaaaaaaaaaaaaaaaggaaaaaaaaaaaaaaaaaaaaaaaaaaaaaaaaaaaaaaaaaaaaaaaaaaaaaaaaaaaaaaaaaaaaaaaaaaaaaaaaaaaaaaaaaaaaaaaaaaaaaaaaagggggggcccttttaaaaaacaaaaatttactaacccttgaatgaaaagtaaaattttttttatagggcaaccaaaataaaattaactggccgttttttaaaaaacttttaattgaaaaaaacctgtgtttaccaaaattaatctccttgaagaaaatgcccttttttcaaatgtggttaaaataaaaa

SEQ ID NO: 43224 - DNA, 239 bp, Oryza sativa
  Clone ID: PAT_MRT4530_46400C.1
ttccacgagggggagacacattcttcagagtgagtgctggaacccgaacagcctgcctgacacgccacagtccaagacgagcagtgaagtcatgccagatcaaaccagaaaattttgaggccctcatccagaagcttgagcaattgcagtcaatgaatgatgaagttgcaaacaagaaagatcatcagtacatttacgagatactcttagcatctggcctcctgcacaaagaacttagc

SEQ ID NO: 43225 - DNA, 115 bp, Oryza sativa
  Clone ID: PAT_MRT4530_46401C.1
ctgctggatgtatatcacttatatattccctttaatatacttcatttagctgtgttcatctttagtaaaaaaaaagaggtttcgctattttccaaattgattagtacacaatatt

SEQ ID NO: 43226 - DNA, 265 bp, Oryza sativa
  Clone ID: PAT_MRT4530_46402C.1
cgcgtgaaagagaggcgtttctctttttttgacgcaagacgagccgcttgagggaactagagcggccgttactcatgtatttatacattaacgcccaaaaactgagcgcgggtacagcaatggtgctggatcatatgctggccggggagcggttgtattaccccattgagagctgcacaacatcgtatgtgctctgcaagactagagcctgtgagcctctaacctagacatgctagactgcatacgctggatttcataggtgcta

SEQ ID NO: 43227 - DNA, 849 bp, Oryza sativa
  Clone ID: PAT_MRT4530_46403C.1
cccacgcgtccgcccacgcgtccgcacaaaccattgcaactgcactacactgcagcacacacaccccgcacccaccaagctaagtaattaatcatcaatggcttccgccgtggtgaagatggccgtcgtctgcctgctcctcctgtccgccggtcatctgatggcctccgccgccgccgcgcgcccggacaccgtcgacgacgcggcggcgctgctgcgcctcaaggaccgcatcgagctgcaggaggaggaggccctggccctcgccgaggagctcgccctcctcgacgacggcgccggcgacgccgtcggagccggctgctcctgcagcaccaccaagtgcaagacgtgcatcgccacctgcgggatcaagtgcttccccaagggaatcaaaggcttccccacctgcttcttcgcctgcgtcttcaccaccagcaagtgcttcgccttcggcgcctaatcgatcaatcgatcacgtcgtcgtctcggctcgtcatcaatcgcgatcgatcggtcgttttcacctaataataatataatcatatgtgtgtgtgcaaagaataacgaattaacctccccaagcttcatgtatgcatacatgcatcgttagtgcatgtgtccctgatcatgggtctctgggggaggatcatgttgtgtcgtgtgtcggctgtgtctcggttatcgtcttatcgatttcgatcatatcggccaattgttgtcgcgctggccacgtatatgtacttgatcgatgaccgagaaactcctaggtcaatctgtgtgttcatatatacatcagtccaataaatcgatcgttaattatattcacaaagttttcgcattttaccgatt

SEQ ID NO: 43228 - DNA, 141 bp, Oryza sativa
  Clone ID: PAT_MRT4530_46404C.1
gggttattcttttaaaaaaaatttattttagattggtgagccgcaacacgggaattccatacaaaataacccggggaagatgagccataatcccaaaacctgtatgaacagacgcctggacccaaacatgaagccaaaaca

SEQ ID NO: 43229 - DNA, 611 bp, Oryza sativa
  unsure (1)..(611): unsure at all n locations
  Clone ID: PAT_MRT4530_46405C.1
tgcagcagcagaggcagcaacacctcccctgttcttgctctgtttcctcactctgttggtacacaacaaaaagaagaagcttaattaggtggtttttgatctgatcacgcgccatggtggcgatcacggcgccgagctccatcgagcacatcccgctggtgaggtgccccaagggcgccaatgccgggccgcaagctgtcatcccgtgcatcgacctgtcggcaccgggcgcggcggcggcggtggccgacgcgtgccgcaccctggggttcttcaaggcgaccaaccacggcgtccccgcggggctcgccgacgcgttggagtcgagcgccatggcgttcttcgcgctcccgcaccaggagaagctcgacatgtccggccccgcccggcccctcggctacggcagcaagagcatcgggtcgaacggcgacgtggggtggctggagtacctcctcctctcggccggcgccgcctcgtccggcggcgcggcgctgccggcggcgctgagggcggcggtggaggcgtacacggnggcggtgaggggggtgggggtgcanggtgatggagctgattggcggagggcttgggctgggggccgtnngaggagggga

SEQ ID NO: 43230 - DNA, 361 bp, Oryza sativa
  Clone ID: PAT_MRT4530_46406C.1
atatgactattaaaatttaaagaaatttaaaactaaaaaacaaagcacaactgaaaaaaaatcacagagaactaaaaagtgaaaatgaccaacaactaaagctctcaaaagcaaaaacaaacatagacacaggaacatacaaggacatacaatcacgaaaagccaagaatactcatgaaaaaaagagcaaaaatgcacagacaaaaaaaaacaaagtgtgacacaggaggggctggaaacatgtgtcaacaaggcctggcctaactgacgcgaaaaaagctgccaaaacagatgcacgaaagggtagtacacgatagacaagatgggataggacatggagaaggacataaacggggaccac

SEQ ID NO: 43231 - DNA, 198 bp, Oryza sativa
  Clone ID: PAT_MRT4530_46407C.1
atgaagctccctgatcttcacaagggctcgctgaacgccgacgtggcttggaatctccgaactggcgacgtgagggcgaacgccacctcaccgcactgtgaatggcatgacgcgagcgtgtgcatgcggctcaatcctctccggagtccgggagaaatcagtgaagataggtacgatatatatgaggcagtgggatag

SEQ ID NO: 43232 - DNA, 1038 bp, Oryza sativa
  Clone ID: PAT_MRT4530_46408C.1
atgaagcccaagaacggcggcgcggccgcggacaggaggctgccgccgaggtggatactcctctgcgcgttcagcttcggcctcggcatgctgttctccgaccagtttggatcggtgccggagtggcagaaaccgttggcggcgcagcgccgggtgcaggacaggaagctgcagatccttgatgaagattttgttgccaagccgaaaccaacggacgacagagacgtgatgagcgaagtaacaaagactcatgaagccatacaatatctagataagtccattgccactctacaaatggagctggcaggtgaggaactcaagaaattggaagaggagaagggaatcatcattcggtttatgataggacatagtgctacgtcaaacaatgtgcttgataaagaaatagacgcagaggatgccgctcatcatgattttcttaggctggaccatgttgaagggtatcacgagctatctgcaaagaccaagatattcttttccactgctgtggcattatgggatgctgatttctatgtcaaggtggatgatgatgttcatgtcaaccttggaatgctgatcacaacccttggtcggcataaattgaaaccccgggtttatattgggtgcatgaaatcaggaccagttcttgctgacaaaaatgtgaaataccacgagcctgagttctggaagtttggcgaagacgggaacaagtatttccgccatgccactgggcagatatatgccatctcaaaggaccttgccacatacatctcgatcaaccggcctatattgcacaaatatgcaaacgaagacgtttcacttggcgcatggtttatcggtttagacgtggagcacattgacgacagagacatgtgctgtggaacaccaccagactgcgaatggaaagcgcaagcaggaaatatttgtgttgcatcattcgactggaagtgtagtggggtctgcaatccagttgaaaggttgaagtatgtgcactcgagatgcagtgaaggagatgatgcaatttggagcgcttcattctga

SEQ ID NO: 43233 - DNA, 272 bp, Oryza sativa
  Clone ID: PAT_MRT4530_46409C.1
acaccatggatgctactgtcatcggtaactgccccctgggctgggagggctctggcgccgacaccaaagccaatcctatcaaatgcaaagcgccagtgatacacggtcccgtcgagacgctatcacttgaggaggccgccagaaatgtcactacaaggagcttcaaagccttactgcagtttctcgatggcaggatcaaaaggttcctcaatgccggtaagtacttcaagcgcttcgacaccggttcccctttctacctcgacgtcatttta

SEQ ID NO: 43234 - DNA, 562 bp, Oryza sativa
  Clone ID: PAT_MRT4530_4640C.1
gcacgaggcagcaacagagcaatggatgtcgtattatttttctcatcctggcaaaaaaaattgaggtttaccaattttggctggccatttcttggacagtgtgccagtgtggtcaaaatacttagatatcttccttacataggcaaccaaacgaataacctgccctaaactgttactcctcttgtccaaatcatatagtctctgcattgggcaaatgcaatgaagagagtgttcagagctctaagttaagttggttgagaaaccttgactttccattctatgtggcactactaccaatacattccaacagagaatgttgtttttcgttccttgtttttccatgtgcctttcaaattatattatgcaactggattggtgaacttcaataacatttagcaaatcatatgattaactcttaaaatgcttaacgaattctctctctggagggaaatatatgtcgtttcagacaattgaactgacccgcttttaggacaatttgcttgtcggaaatgacaagtaatattgaccttaaggagtaattattaggaagtgtaactattct

SEQ ID NO: 43235 - DNA, 936 bp, Oryza sativa
  Clone ID: PAT_MRT4530_46410C.1
atgggcgcgagcctccaactcatccaggatcataatgacaaaagggccctgtgcgaaaatcaattgcaactcccgcgtagctctcgcgcgggcggctcgggaggcgaaaatcctagccgcccgcaccgccactccacctcctccatctcgtcgccgctggagctcgccaagacccaacaactcgacggtctccacctcggtgcgacgaggacgggggaagccgacgaactggctgggagcttcggcggcggtgcagaggtagcggaacagcccggacaccacggcggcggctcagcgatgctcggcgacggttcggttgccctcgggcgcggtggcggctcgacgggccgaaggaggcgatggcttgctgccggcaacctcagccggcagaggcggaggcgatcggtgacggtggcgcaggggtttggggggcgagatggccagacccaccttccctgcccagactcagcacacagcagcactttttgcagcggtggtgaggcggcggggtgcggctgcgtggaggaaacggggaggttggctcctatgtggcgaggacggcggcgtctgaggcggctggcggtggctgtggctgaggtggcggccgtcgcggtgcgctgtgccgggcggtggtggttgaaggcggcggggatggcgtcggccgagggcgcgtgtggaggcggtggcgacgtcggtggcggggaaggagtcggccatggatttgcaggtggtgagcggcgggtgaaaacccagtccggccttggccggaccgacaacgatggttcattccccctcctgagggcgttgtcgtgttgtctcacccctcaaggggccctgcaatcttccgcctgctttgtgcggctctacttaccagcgaagttccaggcttccactcccgtgcctctccgtgagctgaaccatccagaatccagctag

SEQ ID NO: 43236 - DNA, 274 bp, Oryza sativa
  Clone ID: PAT_MRT4530_46411C.1
aagaaatatgttagctttcaaaacatttcattattcattatttgatttgatcactatctcgttgcatgcaacacagtaacggtgtgatcctactagctatgaggcaagccagctaaacctagtactggccggtggtgaaaaagctgcactgctggggctcaacccggcacatcgacggaagctgcgccgcgtactgcctctacctggttagacttacgcgggtcattcccgggtgatgctgctggtctccgtaataaccctacttcgacgaccc

SEQ ID NO: 43237 - DNA, 321 bp, Oryza sativa
  Clone ID: PAT_MRT4530_46412C.1
atgaggggtgccgggtgccaggccctccccggcacccccttgggccttgacctcgcccactgtcgcgcgacgagaaggaggctgttccgcgtcggcttgtctccagaccacttcatcacctccccagcggatcgggatcagcgaagaaatagaaaacatggcaatcggcgggtagattctcggacggccgtggacgagacgagggcggaggccatcggcagtgacggcgagctaggagcgccgcaggtgttgacgatgatgttggtcggagcggaagacgacgctgccggcgccgacaacggaagcaagcagcgcacatga

SEQ ID NO: 43238 - DNA, 420 bp, Oryza sativa
  Clone ID: PAT_MRT4530_46413C.1
ttcaagctcagtgaacaaaatctgactgaaggcacaccaaactatgttgtcaaaaggacatttgtgcctgattatatgcttgagaagcaatacctcattaataaggctgaagaggagttaatggacgacgatgtggataacatactaaaacaagatagagagacagatcaacagcaagagctagaggatagtgaccaggaaatcatgagtgaagatgaactcacttcgtcggacaaacctcccagttgcaaacaaataagacggaggacatacataatagaagacgattcagaagaggagagcaacgaaacaagtatgataaaatgtgtagatgcaaaagttcgaggcaaaatgcaaaaggcgctcatgcaaaacccacaaaggcagaaatcagaaatgacaactacagccatgaaataa

SEQ ID NO: 43239 - DNA, 136 bp, Oryza sativa
  Clone ID: PAT_MRT4530_46414C.1
cgtgattcactcctggcggaccatgcttgggcgcgctgggctgaatctcgccggagctgctcgcccgaaacggcgttaagttatgtgaggccgtgtcgttcatggctacctcgcagatcttcagcatgggcaggct

SEQ ID NO: 43240 - DNA, 891 bp, Oryza sativa
  Clone ID: PAT_MRT4530_46415C.1
ctatctttttcctgccttgatggattcttcaacaactgatttgtttatttcatggctgtaggtgtcatttctgatttccgcctttgtggattttgcatgagcgccttttgcatttttgcctcgaacttttgcatctacgcattttatcatacttgtttcattgctctcctcttctgaatcgtcttctattatgtatgacctccgtcttatttgtttgcaactgggaggtttgtcagacgaagtgagttcatcttcactcgtgatttcctggtcactatcctctagctcttgcttcacgggtagcagtgagatggatctgtttttaataagagggccgctgctggtttgttcctgttgatttgtctctctatcttgttttagtatgttatccacatcgtcgtccattaactcctcttcagccttattaatgaggtattgcttctcaagcatataatcaggcacaaatgtctttttgacaacatagtttggtgtgccttcagtcagattttgttcactgagcttgaacttgaagatgagttgttttccacagagttgttgaataatgttaggaatttcgtcgtttttgccatctagtaaattgagtaatgatgagacaggtgtctctagcatgctttgtgccacatcatcaaatatagtgcagcttgtagatgtcgtatgatcacttatttggagtcgtagtcggtacctaggcgttgtattttctggatatttattgcagttcctgcaatggtatttgtcgtttttctgaataactattttattacaaagattgcacgacatgtaccaccattgaatattttcttgtactcgatcaatcgtaactattgatgtaaacacaaattcctgacttcctgggttacgatgccgcat

SEQ ID NO: 43241 - DNA, 313 bp, Oryza sativa
  Clone ID: PAT_MRT4530_46416C.1
gccacgcgtgctgccactggtgcggacaagctagctaccgtgccgtccctcctgcgcaagatgatgagcggccattacatgtgcggcagcatcgtgttggtttatattgtcaggatcttgctccagctcgagatttggtgtgctatgactggtcattaatatgcggagtttatcatatcttatacattggttcaacgcgcattgccaccgattgtggcgactgactctgattggttcatgcctattggatgagacgtgcagattatagccatgcataatcatacttgacagttgagactcgatggcttgtact

SEQ ID NO: 43242 - DNA, 1488 bp, Oryza sativa
  Clone ID: PAT_MRT4530_46417C.1
ctttattacagagtaggggtacagtcatgttgggctgcggacagatcccgagctcacaactgcattacaaaagggaaagcggaagcctaagatttggaccaatcatcacaggcatgacttgggaactaggccgaaaccctaaaactcatcgtagccgactttctcctggaagaactcctcatcagcaggatccacttcatcttcttcagcaactgggggggattatttatatagagcaaggctaattactcagccaggggcgtcccatttcatccatgtggtcgcacttgtcttatgttcagatgaaattccaaggaaaacggtccttaagtgccagagcgggaaaccgtactcccggtacgtcccccggtctgcgattttggaacgggggaagcggcggatcggggtcagcttgacccggtcgcggccgaggtggcaccgacgtggcgcctatgtggctgccacacgggccggcgggaggaggaagaaggcaccggccacgaatggacggcgggcggcggcggtttctccgggacgccgtgcgacgacgaggggcgacggggtgtacatcgggatgacaagggggaacgagagggtgcgagccaacggctcggatttgccggagggggctcgacggcggcggattgcggcggcggccaccagcggcgagagaagagggaaacggcgacgacgcgactaggattcgattcaaaggggctagagcatctagggaacctcaggaatccattccttgcgccggattgatcggaaacgctacggatgaggccggcgacgagaggcgactaccgatctcgggcggcgacggcggcgcggcctcaggccggggaagaggaggaagacgtgcgcccggagtccccttccgttcctagcgcgcaccggctcctccagcacacgcaacggcggaaggcgacggcgaacagggcacggacgaggcggcaacgcagtacgggggggggggggagggagcttcgaggagaaggaaatggctcaagggcgcggggtcaaacggcatgggcaacggctggcccggcgcggctgctcctctgcatccaggcgctggaaccaagcggtgggacggagggagggcgaggcgtcggtccgagagaggaaggcgggaaacggagggggagaaagggagctcgagccatgccaatttggggagcgcgcgcgaggccatggcgcgcggggccaaaatccgcgggcgggggctcgccggggagagaagcggggagagggagagcgagagaatgagggagagagagatggctcagctcgacgtcggctcacgcgcacgcacgcgcgcgaaaatcggcccaccaaacctaagggaggcagaatagacttttctgagggatttggattgggaggaaattgagatttggaatttgaatttgacgatggatcggagattcgggatccggaatggcacggagacttgacaacactcaaagaaacaaatttcgcaat

SEQ ID NO: 43243 - DNA, 327 bp, Oryza sativa
  Clone ID: PAT_MRT4530_46418C.1
atgccaccccagatgtggatgcgaaaggaggcggaagatgagaggacgagtgggggatgcgaggagacggcgtatgcaaggacgggtgggggatgcgcggaggtggccgatcactatggatggggctttctcgcgtgccccactgcctcgctgcccttctccattgccgcaccgcccgtcgtggccgcgccaaccgctggccccacctcctctgcccccgtcaccttccgcagtcgccgcgccgactgtcgcctcgacccaccggctctccgtccgcttgggcacgtgcgtgaggaaacagaaagaggaatcgagaaggaggaataa

SEQ ID NO: 43244 - DNA, 419 bp, Oryza sativa
  Clone ID: PAT_MRT4530_4641C.1
cggacgcgtgggggagaatggagaacactaccaagggcaaggtgtgtgtcactggggcttctggctatgttgcctcttggcttgtgaagcgacttcttgagtcagggtatcatgttcttgggacagtcagagacccattcaatcacaagaaagtagggcacctgtggaatttaacaggtgcaaaggaaaggctggagcttgtgagagctgacctcttggaagaagggagctttgacgatgctgcgatggcttgtgagggtgtcttccatactgcattacctgtcatcaccgaaactgactccagcaaggcagcagtgcttgcttcagcgataaacggcaccctgaacgctctgagaccatgcaagaagaacctatccctcaagagggtacgtctcacctcttcatcaatcacccgtgag

SEQ ID NO: 43245 - DNA, 207 bp, Oryza sativa
  Clone ID: PAT_MRT4530_46420C.1
atgacgaacacgctcacggatgtccagcggcgcacaacagcgtggaggactagttatggcgacgaagaaactcgcagaggaacgtcgaaggcaacagatcacagacgaccggcggcagcgacaaagaagataccgttgccaaaagtaggtaaggcagcggagttaaggcaggagcacgccattgccacaggcaacgaccgtaactaa

SEQ ID NO: 43246 - DNA, 296 bp, Oryza sativa
  Clone ID: PAT_MRT4530_46421C.1
gttcgacaatgtcaaactttagattgtgtgcggccaaacactgccttacccaatgaaacacattccctcacataaaggagaaagtacccatggctaaccttaacacctatcgtctagccacctgggtgccaagactcggaatcctactaggccaagtccttcccatcaggacatgtggttgcacgataggcttagatcaacggcttatgaagtgaagtccttaattgaccaagtcaacttgctaaactataatagcacacatctcaacagtaggctcacatagagaccatgcccgt

SEQ ID NO: 43247 - DNA, 129 bp, Oryza sativa
  unsure (1)..(129): unsure at all n locations
  Clone ID: PAT_MRT4530_46422C.1
agcaaacaaaaatacccatttaccgaaagngtagcaaaaccggtacggtccccatttnagncccatttctcatttcacaatccaagggcagatcgcatcgngttgccaccccaatacattcctactaag

SEQ ID NO: 43248 - DNA, 1013 bp, Oryza sativa
  Clone ID: PAT_MRT4530_46423C.1
ccaaagcatcccccgccattaaagccaccgttggatagagaaccgaccccactcagcccagcccggcctcgcactcctctctcacgcgcgccgcctcgccctcctcggctattcctcccctcgctttgtgccatcgtcgcctcaccctcctcctattgtcgttgcgctggcgccgccctccttgccagtggatctagccatccggaggaaggaagggtcacgaggccatcaagccatcgctgccctcttctcccctctcatctccagaccactaccgccttcctcttcctctccctatcctccggatgaattaccccccaccccccgacccaatccgccgccgtcacctccccttctccaccaccatcccgagcctaagatgaaacgacggcggtgtcaggagccacggcgtccgccagcagcagctcctcgtcggcgaggggacgggccgtcgtcgccgtgccgcaccgtctccgtcgccgccggcgacgttcccacctccgcgtcgagcaccattgcgcgcgccgtcgagcaccatttcgcgtcccgcgcccccgcgcgacggcgtccgtccacctcctgccccgtgcgctgccttacgccgccggcctccgcgcctcgcccgccacccgcagccgccttcgcccccacccgccgcccgccgcccgccgccggcctcgcctccgcgcacgctagccgcggcctcggtccgcgcccaccgcccccagccgcctccgcccgccgctgtctaggccgagcggcgacgcggcggcagcaccaccaaccggcggcgcctccgccgcccccgccgccgccacctccacgccgaggccgccgccctcagccgctgcccccgcctgcctttgaccccccgtctgcgcgtactcccgctcgtccgccacgcgctcgctcagctcacgcagctccgccaccagcgccgcgcacatggcgtcgtcgtcgtcgtcgacaacacgtactacaatagcaaggatatttggggaaaagataacaag

SEQ ID NO: 43249 - DNA, 209 bp, Oryza sativa
  Clone ID: PAT_MRT4530_46424C.1
aaggtactatagcacaacaaattcgtcttcagctcagaagcactacacttctgaaagggggcaacaatagcaaggctgagtacaagcaccgtactcagcaagccacaccaatgatgcatacgtgcaaagggatacaaggacggtttgtggctatttgcaaaaatgcagttgcaaagcattttattgaacaaaatagtaaaacagttgaa

SEQ ID NO: 43250 - DNA, 1821 bp, Oryza sativa
  Clone ID: PAT_MRT4530_46425C.1
atggatctggaccaaccccagacgatgcccacctccggcggcggcggcgaccggctgagcgcgctgagcgacggcgtgatcggccacatcctgtcgttcctcccggcgaaggaggcggcgcgcgcggcggtgctctcgtcgcggtggcgccacacgttcgccgccgtccacaccgtctccctcgtggagcccgacccccccgtcgtcgaccactacgagctcgccaggtacagccccgggtggggcccgccgcccgaccccaaccagccgccgcccttcaccaacgtcgtcagcgccgccctcctcgcccgccaccgccgcgccgccgtcccgcccctgcgcgccctccacgtctccaccgtcgggtactgcagaagtgacgcctccctggtggatcagtggatcgcgtacgccgtcaaccaggccgaccccgccgttggcctcgacctcgacctccgcctccaccgcgagccgctctgcgacaaggcctactctctccgccgccgccgcggcgcgagcgcggatcacgcagaccaggacaccgacgatgacgacgacgacgaagatgcgagccgcaaacggcggcggcggtggcggtcgaggtcgaggtcccccgtgcgatatgcgtccatcgaagatgccaatctgggtctgagtccaccgtatatgtatatcccgcgctcgccgttgctgtcgccgccgccgccgcgtcggagctgtagtccgcagggctgtgatgaggatgacgacgacgacgacgacgaagacgtcatctcctccgacgagaagtccacgaggggatacgactacaccccggcggtgcacgccgtcccgagcgggctcttctcctgcgcggcgctgcgctcgctgtcgctcggccactgcctgctcgcgccgccggcggccatcgccctgccgtccctcgagacgctgctcctcgcccgcgtctccgacgccgggagcgacgtgcagcgcctcatctccggctgcccgcgcctcgccgacctgacgctcgaggcctgcgccacggtgaccgcgctcaccaccgtcgccggcctccgcaggctggccctccgctgctgccacgccctgcgcaccgtcgccgtcgacgcctcgccggggccgccgcgcctccaagcgttcgagtacaggggctccgtgccggacgacaccttcctcaccatccacggcggcgcttcgctgacgaccgtcgcctactgcaagatagacatctgcggcgaggaggtcacgtcgtcgtcggagctcgccaagctcagcgcgttcctccgcctgttcgccggcgcgaagcacctccacctcgagtccgcccgcctcggctccggcctcgacgacgccgccgcaggatacctccccaacgacgacgacgacgccatctacgccgcgctgaccatgatcctcgagcgcgccccgaacctggagacgctgtcgctcgtcttccacccggagcctctcgacggcggcgacgacgccatgctgcatatcacgtactacaaagaggaggagctctacgacaagcacctcctcagctacaaccggcacagcgtcctagccgcgccgacgagcggcggcggcgccatggcgccggcctgcctgaggaggcgggtgagggagatcaacctggtgcactaccagggcggcgcggcgcagaggacgctggccatgtacctgctccggagcgcggcggcgatcggtgagctcgggtgcgagctcgccatggggcccttgtggatccaggacgagctggcacgggagctcgagggctgggtgatgaacaaggcggccattgtcaacatcggttga

SEQ ID NO: 43251 - DNA, 425 bp, Oryza sativa
  Clone ID: PAT_MRT4530_46426C.1
acttgcgagtccacggctaacgcaccgatgctccaccactgcccaacctccgccgacatgtgggacccctgcaccggcgccccccgccggctagccgtcgtgcgtcgtagaccgcgccacacccaccagcagctcctcctcgcaccgtggtcgcctcctccaccaccggccacgcctcatcacgccacgtcggccttcttcaccaccggacgtgcctcatcgagccaatccggcctcccgccaccggccgcgccaagccggcctccaccgctgccggccgcgcctccttgcgtcatgccgacctccgctgccatcggttgcgccgagccgacctccgacccctcctccaattgctgttgcgctggtcagatgtagccgtctaccacgcccctggctagctgtccgagaccgtcgtgcctcctctc

SEQ ID NO: 43252 - DNA, 1803 bp, Oryza sativa
  Clone ID: PAT_MRT4530_46427C.1
atggccatcacctccgccgccggctgcggctgcggctgcggcggcgacggcgaccggctaagctcgctgagcgacggcgtgatcggccacatcctgtcgttcctcccggcgaaggaggcggcgcgcgcggcggtgctctcgtcgcggtggcgccacacgttcgccgccgtccacaccgtctccctcgtggagcccgacgcccccgtcgtcgaccacgacgagttcgccgggtacagccccgggtggggcccgccgccgaaccccaacccgccgccgccgccgttcgccagcgccgtcagcgccgccctcctcgcccgccaccgccgcgccgccgccgtccccctccgcgcgctccgcgtctccatggccggctacgcccacagggtctcccccgcggtggaccagtggatcgcctacgccgtcaaccagcccgcccccgacggcgtcgagctcgacctccgcctcggccgcccctcgctctgccaccgcgactactccctccgccgccgctccgccgccgcgatcgacgaagatgcgaggccgagacggtggaggacgatgccgcccgaggacattctcttcgagagccctagcagcggagaggaggatcacgccgacgacgaggacgacgacgacgtcctctccgacgacggcaagaaggatcccatggccgtgtacaggcggcggttcgagccgcaggagtacagcgtgccgagggggctcttcgcctgcgcggcgctgcgttcgctgtcgctcggctccgtccggctcgctctgccggcggcggccatcgcgctgccgtccctcgagacgctgctcctggccgacgtcaccgagtccgaccacgagaggagcatgcagcgcctcatctccggctgcccgcgcctcgccgacctgacgctcgaggcctgctacgcaaaggcccacgcgctctccgtggcggggctccggcgcctacgcaggctggctctccggtgctgccacggcctggacaccgtcgtcctcggcgacgacgacgcgtcgccaccgtcggagctccaggccttcgagtaccgtggcgaagtgccggacgacttcttcctcgtcaccaccacgaagcacgggcacggcgtctctctggagacggtcacggtcgcctactgcaagatcgacatctgcggcgacgaggtgacgtcgaggtcggagctcgccatgctcggcgcgttcctccgccgcttcgccggcgtcgagcacctccacctcgcgtccgctcgcctcggctccggcctccacgacgccgccgcgttcgcgactctcccggacctgtcgaccctccgccgcctcgagttaggaggatgcctccccgacgacgacgacgacgacggcaccatcttcgccgcactgatcaggctcctcgacctcgcgccaaacctggaggcgttgtcgctcgtcttccacccagagcctctcgacgacggcgacgacgacgacggctaccgcgcatactgttaccacaaggaggaggagctccatgacaagcacctcctcagatacaaccggcacagcgtcctcgccgcgccgacgagcggcgccgccatggtggcgccggcctgcctgaggaggcgggtgagggagatcaacctggtgcactaccagggcggcacggtgcagagggcgctggccatgtacctgctccggagcgcggcggtgatccgtgagctgaggtgcgagctcgccatggggcccttgtggatccaggacgagctggtgcgagagatcaagggctgggtgatgaacaaggcggcagttatcaacttcggatga

SEQ ID NO: 43253 - DNA, 825 bp, Oryza sativa
  Clone ID: PAT_MRT4530_46428C.1
ccggccgggaaaacaaatccccaacgtcaccccatcgagcccgactacgctgccatcgataaaaagctacaacagcaccttttacatcgagtttgggcacgatttcaacttaatagaccccgttttatgacttgatcgctttttttcgcggtttttccgcttactagacgcccttcttccgacctccctttaaccccctgccaacatgtcatcacgcaaggttcgcgtcaagaagttgaatgtcaagacaacacttccagtcctccgcgaagaccagatcgatcccaacgaatacgaagcccttgcaaccgataaccaaattgcgacaggtgtcgagcaggctgaggaaaacgaataccatcttcagactatccttaaggaggcgggaaccagcaatgaccaagaaattcctgtccctcctccccaggagagtgacatcaactatgatgatctctatcctgttccttttcacaagccctcctcttacattcgcttctcacaaacagtcgaggaatgtataacctgcctctatgatatgaccacagaggacgatgagttcctcaagcaatacaacagtaaaccgcccgctacaggagttctctcggaagatgactttgaacacatcatggaagtgttcgaagacaccgccccagaacaaaccccattcgcagcagtcgataataccgttgccgcttatgatatgatgttgccaggcctcactcacctcaatcagtctgtttcaacagacgttcttcagcatgccaagcctgtgtacgagtactggaagtcgagaaggcaggaagccgggaacaagccattgcaccc

SEQ ID NO: 43254 - DNA, 161 bp, Oryza sativa
  Clone ID: PAT_MRT4530_46429C.1
cgggctgcaggtggagattcgccgtcgagcgaatgcagcaggctatagcggcgtagcggcgacgaccgccgacggggatggcccctgtggcgacggtcttgacggccgccatgtcctcgtaggccgcctctgcgcagtaggcgccggcggtgccgtcgctt

SEQ ID NO: 43255 - DNA, 708 bp, Oryza sativa
  Clone ID: PAT_MRT4530_4642C.1
atggctggcaaatcattgatcccattcatcggctcttcctccaactccacatacaaccttgacggagagccgacatgggcgaatcaattgatcccggtggaacactacaccatggaaggggtgaatgcactgtgggcgcagccccttgtgacagtgtcgggctcccctgcgaatttggagcacttcggcgaataccctggccgttccgcctccgccgagcgatatgtgggcaccctgttcactaaggcaggagatgaggtgctccacaagtacaccacatctactactactccatccactccaaaggaggatcggttccgcattcagggagtgcgaactcctggcggtgggtatggtaagggcttgctccggcctttgacggtgtcaaaaaaggagggggcagcagaatcccgtatccctccacctataaaggtgaagcgtcatttgacgccccctccaattgtaagggcggccggccaataccaaggagatgaagtgaagtcaccggagccctcggtctataagctcgcctcgcaagtgagggaactccgcaaggagaacatagagcttagagcttgcaacacggaactaggggtagaactcgctgaacttagaaataatgttgatacccttagtcgcggtttgtgtgctaaaataaagcatgcattcgtagagatggggaaggagaataaatattatgctaattag

SEQ ID NO: 43256 - DNA, 258 bp, Oryza sativa
  Clone ID: PAT_MRT4530_46430C.1
cactgtggttttgggtttcttagccacaggaaggtgaaacatgcaaaagaacccaaatccccccaggaaaaaaacacccacaacgaaagggggggaagaaaaagaaccggaacgccccccgggggggaaagaccacacaagaaaaacagtcccaggggcggggaacctgggggaggaagcaaccccaggccgggggcccaccaaaggacccgctgtggagcatgaagcagccgagacccaccatcagcccaggggggg

SEQ ID NO: 43257 - DNA, 376 bp, Oryza sativa
  Clone ID: PAT_MRT4530_46431C.1
gtaccaacagtctgatcttgttaagatggatattttacttaatggtcagcctgttgatgctatggcaacaatagtccacaaccagaaagctcagagagttggacgagaattagtggataaactcaagaaattcatagaacggcaaatgtttgagatcactatacaagccgcagttggttcaaaggttatcgcaagggaaactctgtcagcaatgagaaagaacgttctggccaagtgctatggtggtgatattactcgcaaaaagaagttgctagagaagcaaaaagaagggaagaagcgcatgaagcgtgtagggtccgttgatattcctcaagaagcatttcatgagctattaaaggtctccaattcaaaatag

SEQ ID NO: 43258 - DNA, 296 bp, Oryza sativa
  Clone ID: PAT_MRT4530_46432C.1
aaaaaagggaaaaggaattttgtgggtacaacttttttttttttgcaattttaaaaaaagttttcggtgtaaagttcaaatttttttttttggagaaatttataatttttacaatattttaattaattggggttccattgtttaatgtttaaggctgaaaagatcaaacatatgtttcactgaaatttatttactttgtggttatggggttttttaaattggggaaacattaagatttttttttttgccataaaatggcattttcctgggaaaaaatttttgggttttccttttaa

SEQ ID NO: 43259 - DNA, 783 bp, Oryza sativa
  Clone ID: PAT_MRT4530_46433C.1
atggcggaagatgccaatgccggtcgcaagagctctactcatttagcccaatctcctgaattgcacgcatctcttgaatcgcacgagctcagcgacagagagattcccaaagacgcttctgttcatcaacaggcaattgatgaaccccaaccattgtacaacatacctattacgaggggtgaaggaacattaataactgaactgcgtaaggttatggaggaactacgtgtgtcttattatgctgacacagatgaagaaactcgggagcaactgaaacagttttgggatgatgaattcaatgcaatatcatctggagaaacaactattgagagagatctaaagtggatgcggaaggaggtagttgattatgagcttgaagatctttctcgtcagtgcttgatttttgatgattgtggtcattgtcatggatgccggaattctggcattgatctgaagcatccttcaaacggtggttatgaggagggcaacgcatactctggactctcttttgatgatgatgaattcgatgcaatctctgaagaaacaactaaggagaaaggtatagagtggatgcgggaggaggttattgaggcattcgagacatacagtaatgctaatgtagttgattatgagcttgaagatctttctcgtcagtgcttgatttttgatgattgtggtcattgtcatggatgccggaattctggcattgatctgaagcatccttcaaacggtggttatgaggagggcaacgcagactctggattctcttttgatccaatctaa

SEQ ID NO: 43260 - DNA, 873 bp, Oryza sativa
  Clone ID: PAT_MRT4530_46434C.1
atgggcgcggccgcgtggtggcggcgctcgctggggcagcggttcaacccggccggcgtggccgcggtggcggccgtcgcggcgtccgagccgcgcctcgcgctgccgcacgtgtccgtgcaggacatccggtggctcgactggggcgagctccgtcgcgccgggttccgcggcgtcgtgttcgacaaggacaacaccctcaccgcgccctacgcgcccgggctctggccgccgctcgccgccgcgttcgaccagtgccgcgcggccttcccgccgggctccctcgcggtgtacagcaactccgcagatataaagaagcctggtggagaagctaaggaaatagagagttactttggttgttcagcctcaaatcttgttctggttggtgatcgatactttactgacgttgtttatggaaacaggaatggttttcttactgttcttacagaaccattgaattttgcaaatgaatcttacattgtcagacaggttaggaaatttgaagcataccttatcagttattggtacaggaaagggcacagaccaattaagcacccgttgctccctgatgcaagacgaatagtaaagtttgatccatacaatgaccctatggcacctgcagcatagctgacgttgtttatggaaacaggaatgggtttcttactgttcttacagaaccattgaattttgcaaatgaatcttacattgtcagacaggttaggaattttgaagcataccttatcagttattggtacaggaaagggcacagacccaattagcacccgttgctccctgatgcaagacgaatagtaaagtttgatccatacaatgaccctatggcacctgccgcatagcacatttatggttttggca

SEQ ID NO: 43261 - DNA, 150 bp, Oryza sativa
  Clone ID: PAT_MRT4530_46435C.1
ttgacttctcctccccatcccgtttcggtttgtttcggatccctttttattttagtgaaaattcgttgtatcggggggttgttgggaaagcgtgcaagtctccaaattttgggtacccttttttggttaaaagtctttcctgggccaccg

SEQ ID NO: 43262 - DNA, 549 bp, Oryza sativa
  unsure (1)..(549): unsure at all n locations
  Clone ID: PAT_MRT4530_46436C.1
atggcgccgtcgtacgtggccgtgggttcacgcgactacgcaaggaggggcggcgggtggcggccgcgcattgaggacacaagcgaagtcatcgagagggagcctgaagggtcctgtccagatcacgtggaggattacataaattcatgccagcagattcaggattttattcccatggcgaagacggcggcgagtggtggagacggtggtgagccgcggaggcgcggcggtggcgcccaggctgagctccactgcggcgaagacggaggagaccacagcggtggcggcgggaggcacacgcggtggggtacggcgagctcggccgccgccgaccaggtctttgacgctgtaaccggcggacaggagggcaggcgggagccgccgccggcggcggcttgtggcagtgggaggacgtggggagccggctgcgggaaggcggcccgnctaaggcggttactgctcatgattgagggaggacgaggggaagcagcggcggcggcagcggcgaccggatcatggcgcttctcctctcggtggacggccgcgtag

SEQ ID NO: 43263 - DNA, 677 bp, Oryza sativa
  Clone ID: PAT_MRT4530_46437C.1
gcccgagcagcttgtcggcaaaaccggacggctgcaaggacgacggcagcggggcgcaagctctcccgcaattcttgacggcagtgatgaaaccaacttcgacaagacagctccaactaggaagatcttcagctctgttggacaatcggacaccccggctgaccggtgcctaggaaagggtcgagctatacttcagatcaagcagttacccactccctcttgtggggggcggcgccggcaagcgggccctgcatgtcagcggcatgaggcggccggtccaccgtggaccgggatcacacgagtggtccaccgccggtccacgggaccgatggtccagattggcccgtggccaatcggacggcgcaggcggcggctaggcacggctcggctcggcacaaagccggccggccggccatggggagcggcggcggcgagcgtggtcaccggcggtgaccggcggcgcgggagacggcggcgaccggcgcggaagcggctgcgcattgccgaagggcggcggcgcgacggcagcgggaggaaggagaggaaaggggaaaagagggggcgggaggcctcaccggggtttcgccggcgcgggagggagagtaaaacatagagtttagagggggagaaggagtccatggcgagcgaggatgtcgaccgaaggcggggaaatggag

SEQ ID NO: 43264 - DNA, 837 bp, Oryza sativa
  Clone ID: PAT_MRT4530_46438C.1
atggacggcggccacagcccggacaggcatgcggcggcggcggcgggggagccggtgaggtcgcggtggacgccgaagccggagcagatactcatcctggagtccatcttcaacagcggcatggtgaacccgcccaaggacgagaccgtccgcatccgcaagctgctcgagcgcttcggcgccgtcggcgacgccaacgtcttctactggttccagaaccgccgctcgcgctcccgccgccgccagcgccagctgcaggcgcaggcgcaggcggccgcggccgccgcctcgtcgggatctcctccgactgcttcgtccggtggcctcgcgcctggccacgccggctcgccggcttcgtcgctcgggatgttcgcgcacggcgccgccgggtacagctcctcgtcgtcctcatcgtggccgtcctcgccgccgtcggtggggatgatgatgggggacgtggactacgggggcggcggcgacgacctgttcgccatctcgaggcagatggggtacatggacggcggcggcggctcgtcgtcgtcggcggccgccggtcagcatcagcagcagcagctctactactcgtgtcaacctgcgacgatgacggtgttcatcaacggagtggcgacggaggtgccaaggggaccgatcgatctgagatcaatgtttgggcaggacgtgatgctggtgcattcaacgggtgctcttcttccagccaacgagtacggcatcctcctccattctctccagatgggcgagagctacttcctggttaggatgcatacctgctgcctgcctaacatcggcttgcgactgcagccaccaagaaaacagtga

SEQ ID NO: 43265 - DNA, 429 bp, Oryza sativa
  Clone ID: PAT_MRT4530_46439C.1
atgccgcagaagggcgcccgccgcctgaagcgcgccttggggcgaactgccgtcgctgtaaacgagacggcgccgtgccccgacgcgtcgtggcctccctccgctagggggcggggaaagggccgaaccacccgaacgggtgggatcctccctccgcgagggttcgcggcgcggaggagttggagaatcacggcggtggtgacgagggccacggctttcgccggaatccccactcccggacggggtgggggtaaacgccaccgcctcctccacctccaggacctcgaccatgatcgtctagggcccagagaaacttggggcggaagaaaacgacttcttctcgaaacgcgcaactgccccctacctggcgcgccagctgtcgagggaagaccctcgatagcggggagtcgtgagacccccctttcgtga

SEQ ID NO: 43266 - DNA, 606 bp, Oryza sativa
  Clone ID: PAT_MRT4530_4643C.1
atggggatcacgccgtcgtgcataccgctggctccggtggcgggcggctcgtcgtcgacggcgtgcaagatcatccacgtcgatggcacggtgacgcggctcgcgcggccggtgagggcgtcggaactgatggtggactacccggggcagttcgtgtgcgactccggccgcctcgccgtcggctgccgggtgcccggcgtggcggcggacgagctcctcgagccgcggcgcgcctacttcctgctgcccatggacatgctctactccgtgctcaccgacgaggagatggccgcgctctccagcttccacgccgccaccgcggcctcctcgtcgtggaagaggatcgccaccggcggcggtcgccgccgcgatgggagccacggtggccggatcagcgagccgacggatcacgaaggcgacgacggaagcgacgatggcgccaggttctttccggtgctcagcctgcagctccacgccgcgccggacgccgccgccgccgccgccgccggagtcaagccgagcggcggcggcggcggcgtgaggcggcaccggtcgtggcatccgaggctggaggccatcgacgaggtgccgtgcaccggcggttga

SEQ ID NO: 43267 - DNA, 480 bp, Oryza sativa
  Clone ID: PAT_MRT4530_46440C.1
atgccgctgccgcgccagtgggaggcggcagggcgaactgatgccactgccgcgccaggagatcgagcatggagctgggatgcgcttccctacggctgcatccacaactccctcatgccgtcccccccgctactgcttgctatcgaagaggtgatgatgtcgctgctcgccgacgatggcctcgtcctctgcctcggtgccgagaagctgatttctgaatatttcagaccagcacccagcagcatcaagttcagatcagaacgcagcaacagcagcacgagcaccatttcagaccagcaacaacagcaatgctgtgggttcctgctcttgtgtggcggcgacggcgtggggagacgacatgcaagacaaaatcgagacgacgagctggaggcctcgtgcggcatcaaggcggcgaggcagacggccgcctcgtcgccgagccggcggagacagcagtatgtacgagacatgaacaaataa

SEQ ID NO: 43268 - DNA, 282 bp, Oryza sativa
  Clone ID: PAT_MRT4530_46441C.1
actcagacgataaatcaatcggacaatgttgagaaccagaattttgtatgaatgggccaagaacgcagacttgacacgatgaatcaggccaaaattcacaagtctacgaagtgaagcagcagaggaggccaccagccaaaatgtgggctggttgggccagccccaagttcggccgaacctccctcgcctccgttggatccaggttttgcctggacagtggagatgaagccccaatgacagttggagggtattaccgaccattccaaccatcacaaccgttat

SEQ ID NO: 43269 - DNA, 2553 bp, Oryza sativa
  Clone ID: PAT_MRT4530_46442C.1
gcacgaggcgcgtccaccgccgcaaccagcccccaccaactccggccgttcccggcgcgtcctccggagcgcctcagcccccacccgccagcaggtggaggcctgcgccggcgcgtcgaccccggctctctctctatctctgtctcacctagtcgaggcgtggagatcggagcatggagtcggaggtggtgaagacggagattgtgctcgcggcgacgtttcccttcaagaaggttcagatcgccgacaagtaccccaagggccagtcccgcggccgccagtggaagcacctccgcctcctcctccagtcctccgacgccacctcccttccccccgaccgccccactatttggtgatttgaatatccagtcgcccccatcaatttatccacccaagagatattgtgacataactggttttgaggcaccatatgtggatccaaggacaaagctgcgctatgctgatccagaagtgttcaagcaaatccgaatgcttcctgatgaatatgtccaaagttcgtgctttatcgacgttcatgaattactggcccccgaatcccaatcaaatctccccttatccaaacatgtccacactgatgagtatattctaataaaaagtataccaactcaactgcttgagcaaagttttaccaattccgaagttactgatgatgtcaagtttaacgcctaccatgtttgtctatttaagtacctccagcgatcctctagtgttacattaaatgtacacctgtaccttcctgagaagctagcatgcaaagtttcacgtgggagcaagcaactaatgggctccaaagaagcattccgacgtatcatattctgcgtcttgcttctactctgtgtgagctgcaaatgcttaacctcagaggtaaacacaacccaactggcagtcctcaaggttgatgcctcaccgcagcatgctcgaaagatccctgagacactctttgggatatttttcgaggagatcaaccatgctggagcaggtggaatatgggcagagcttgtcagcaacagaggtttcgaagctggaggccctaatactccatcgagcattgacccttggtccataattggaaatgaatctgtcatatcagtggcaactgatcgatcatcatgtttcagtcgaaatatcattgctctgaggatggaggttctctgtggtgactgccaagctggtggtgttggcatttacaatccaggattctggggcatgaacatagaggatggaaagaactacagtcttgtcatgtatgctaaatcattagaaaatacagagttaacagtttcactaacaagctctgatgggttgcaaaatctgtcttctgctaccatacacaaacagaagagtgaacccaagtatatttcacagggtcatggtttccggaaagaacttgtatcaatgcttttggatttaaaaccacaattcatgaggtttcctggaggctgctttgttgaaggccagtggttaagaaatgcattcaggtggcgtgagtctgttggtccgtgggaggagaggcctggacactttggtgatgtctggggttattggactgatgatggccttggatattatgagtttcttcaggatatactggacagcctagaatttgcaaggggaagtaccaactcaacatggggctctcttagagttgcaatggggcatcctgaaccatttccagtcaaatatgttacaattggaaacgaagactgtacaaaaaaattttaccatggtaattacctcaagttccatcgtgctataagagaggcttatccagacattcaaatcatctcaaactgtgatggttcatctaaaccacttgaccatcctgctgacatatatgacttccatgtctacggggattctaatactttgttttctatgaggaacaaatttgacagcacgcctcggaatgggacaaaggcctttgtcagtgagtatgctgtttcaagtaatggtgtaggtagaggaactcttcttgcctcactggctgaggctgctttcctcactggactggagaagaatagtgatgttgttcagatggccagctatgcaccgctcttcatgaatgataatgatctctcgtggaacccagctgctgtcgtcttcaactcatggaaacagtatggaagtcctagttactggatgcagacaattttccgcgaatcgagtggtgctgtgctgcatccagtgacaatcaactccatgtattctaattcattagcagcttctgcaataacctggaaagccagtaacagtagcttcttgagagtgaagattgtaaacattgggtccaaccctgtgaacctcatagtatccacaactggtcttgaagctttggtcaatatgcggaaatcaacaatcactattctcacatccaaaaatctgtcagacgaaaattcattcagtaaacccactaatgtcgtgccggttacaagagaactacccaatgctggagaagagatgtttgctttccttggtccttactcatttacttcatttgatcttgctctcggccagcagaaacatgtttcctaa

SEQ ID NO: 43270 - DNA, 624 bp, Oryza sativa
  Clone ID: PAT_MRT4530_46443C.1
atggctccgcccgaggtagtcgcggggatttctccgcgtggcgctctcgcacgtgggaaagcgataccgctgcggtctcgcgtctcgtttacgcgagagcgccagctcaacttcgctatcgctctttcagatagcgatttcgccatgctatcgcactttccaggagcgaacatcggcgataccgatggtttatttccgcaaatcgttcgctatccgataagttctactcctatctccaagttgatgaatgacttgaagttgatggctgtaactttttcccgtcaaccatcaactcgagtcgagcgatacgaagtgttctcaccagttccatcattgtccaaaccaccaaccaacaagacgtcgtctctgcggctctgtggtgagagggtcgtcgccaccagccgtgttagtgttgatcctgcagcccgcagcggagcctccgatgtgtcctaccctaccgagagggacgacggctggatggaggtgaagctggcagaattcagtaacgatgagaggatgctcacggaggcagcggtgatggtggatttccgcgaggtgaacgaccatgtcaagaaaattggcctcatcgttgagggcctggagtttaggcccactatccattaa

SEQ ID NO: 43271 - DNA, 177 bp, Oryza sativa
  Clone ID: PAT_MRT4530_46444C.1
atggcgcaatgcacatgcaggatcatggtggctgccaatttcactatcaagcgccttcaagatccaaatttagtactagcaaacaggcatagcgacaagaggttctccacaaaactatcatccggggttgagagggggtggaacctggacgacgtcctcggcgcggtcgttgcagcg

SEQ ID NO: 43272 - DNA, 381 bp, Oryza sativa
  Clone ID: PAT_MRT4530_46445C.1
atgatggttatggcagttggaattgttggaaaattccctgcaaccgtcattgggagtgcatcacaagcgtacacgtggaggcccgagctgaggcatcgctgccagggttcggccgatcctgggctggcccagcaggcctccacatttggtcagggggctgacaggtgggtcctcatggcagttgtggcagttatggcgtttttcaggacggttacacttgacatgtgggcccctctattcttaagcttggttaggaaaaaggctattggtgccggttgggaacccgacataggtgctggatatgccaggttcctaatcagcactacgaaggcggttcctaatcagcactacgaaggcggtactgatgtggaaatcaaatag

SEQ ID NO: 43273 - DNA, 305 bp, Oryza sativa
  Clone ID: PAT_MRT4530_46446C.1
ataggggcggggtttttataaaaggggttttttttcctttttttttttttttttttttctttttttcacataaaaaatttactttttatgcgagcccagcgcgcaacccgaaaaaaccggcccacaacaacaaggccaacaactttcccccaataaacctaaaatgaaaacctgaccgaaaaaaagaaaagaacccccccccgacaaaatatgacaatcacagaaaacttgccaccaaactcctaccagtcctgaaaacttgaaaaaccctgaagcgcaaaacgggacaaaccaccaaaataaaa

SEQ ID NO: 43274 - DNA, 879 bp, Oryza sativa
  Clone ID: PAT_MRT4530_46447C.1
tctcgaagaagatgaagaccgccatgactacttccacccttctcttcctcctcctcgccggcctcaccgccgccgccctcggcacggcggacgacgacaccaccaccaacaccatacgcctcccgaccgacggaggatcagcacagcaggcgccgacgaagaagaagccgtggaagtgctgcgacaacatcgagcggctgccgacgaagaccaacccgccgcagtggcgctgcaacgacgagctggagcccagcaagtgcgtggcacagtgcgaggtgtgccaggaggcgccggggccattcccgggcccgctcatctgcagcgacgtctactggggcgccgacccgggtcccttctgcacgccgcggccgtggggagattgctgcaccaacaccacctgcaccaggtcgatcccgccgatctgccgctgcaacgacaaggtgaagaagtgcgccgccgcgtgcaaggattgcaagcgggtgaagtcgtcgaagcctcctcgctacgtctgccaggaccagttcaccggccagccagggcccaagtgcaaacactcgtgcgagaactagctgcagatcgatatagatgatcgatcgatcgatctgtgtgtccgtcaataaaactcgccctagcttgcagctagctgatcgttcgttcgatcattcagagttggtatagctagaggctagagcttagctccatccagatttttcagtgctctgcagcttttgtgcatcttgcatgctttgttagtttgtgtgctccatgtgtgtgggtgtgtttgtctctgttcgcttgtgtggaccatgaggaaaaataaaataaatatgcaatgcaagcgtggatatgtaccccaaaaaaaaaaaaaaaaaaaaaaaa

SEQ ID NO: 43275 - DNA, 309 bp, Oryza sativa
  Clone ID: PAT_MRT4530_46448C.1
tcgccgagggtttgttctttggatgcaggctccaacggctgcatgtaccctgcctctgctaggtagatccatcctttcgctgcattgatgtttttgcaaagttccatttttcttttcttttcttggtgcatggcctagtcgctgtttcagttctactcaagtgttaagtccccttacatagttgaatcattacatgtcacttggatgcattgcctttcattcactaataaaccataggagaaaccaacaaagatttccagccgttctccgaactgactgaatcaagataaagattggttctctgaactg

SEQ ID NO: 43276 - DNA, 177 bp, Oryza sativa
  Clone ID: PAT_MRT4530_46449C.1
aacttcctatcctcctgccttcaacttgtcgatgcctgtaccacgcgccgctgccgagtcgccgacagagccgtgcgtcaagtcgcgccaccgccacctgtgcgtcgtgctgccgtggatccaccgcccaccgtccgcgccggctgcgcgtccccgtgggccgcaccgcagtagctg

SEQ ID NO: 43277 - DNA, 287 bp, Oryza sativa
  unsure (1)..(287): unsure at all n locations
  Clone ID: PAT_MRT4530_4644C.1
cacacacacacttcacggttcgcgcgacgaacaaacnggcagaaaaacccnnccacgacgacccacgactgagccgagcgtacgacgcacccacgcacgccatgggggcgctgcggcggtngctgccgtgctgctgctgctgctgtcgcngcggcggatngaggtggtggtngtnggagcntgggggatgggctggtgtnggacgtngccctgaaggcgcacgntcgggggactactccgtngccgtagcgcaggcgaacgaggcgctngaggaccaggcgcaggtt

SEQ ID NO: 43278 - DNA, 755 bp, Oryza sativa
  Clone ID: PAT_MRT4530_46450C.1
gtactacaaaaactgaaatttcttgtgtggtcttagcagagccacttactaaccaacccaagtacaggaaattgtagtcatggcagctcaatttctcaatgaaattcatagcaagtacatcttcattgattattaaacatgttttcttttgctaaggcatggtacataactaaatgtggggtttctaaaaaaagaaaaggtaaatgtacctgcccatgttgtctcccaggctaaaaaagaccacttggccaatagctcagcaagcaaaaacaaaagaaataaaacactgctcttcaattcaaaaggaagatagtactatcttctcatgaatggataaaccgctacgcacccatggcaacccgtttgcccctcttggatgttgatgatgcattctctgccaatatcctagacaaaatgtctgcttgctttgagtaccctccagcttttaagctgtccatcagggcatcgcaacccttttgatccacgacacctcctttgttcttgatcttgcaaagcatggagtatgcaggcaatgtcttctcctcagtgtacagggcctccaagactctgtcataggttgagaagctgacatcaaagtccctgtccaatgcaaaatcagccaacttatgtgcctccatcactttgtcattctcgcagagggcaatcagcaacttatctagatcaggcaagcatccattttccaccatcagattgacacggccgattgcttcctccacatggcccctcatgaagag

SEQ ID NO: 43279 - DNA, 426 bp, Oryza sativa
  Clone ID: PAT_MRT4530_46451C.1
cacgggagggcgtcgtggaccaaggtgcgcgaggacatgccagagatgatgacgatgatgcgatcacggccgtcgttgaggaagttgatgccgaagaaaagagctaattagtcgaacaatgaagaatgagacgtcacacagggtttaccagacctcgagacaactcgggacgaacatgcacgctggtgttgccaataccgtgcgggcgaggctgggaaccaccatgaatcttaagccaatgtcggaggagactagcagagaaggcctccgggatggtctcggtgcgagaacggtgttcgaggaagatacgacgacgttggcaatgagacattctggaccaatggcctggacggcgacgtcggtagccatacgacgaaagtggcgaaactgtggcccgagaggatgacagagctgcagcttcatgtc

SEQ ID NO: 43280 - DNA, 1695 bp, Oryza sativa
  Clone ID: PAT_MRT4530_46452C.1
atggggtacgtatcaggtgtccctctgttgggcgctgtagcaattagtgcgaaaaaaatgtacccaggtcctgatgaccgtacagaatacaagaagcgctacatccacctgggaagctacacatatccgagcgtccgcgaatatatttctcggtttcttcggctttcttccccaagtccggctcgagtttcatctctcgacctcgccgtgctcgtgctgttgtgcagcggtgcaggtgctctcttccacttcctccctccctcccttcctccctccatggctccatctccactggcgtttccgccgcaactaaccaaccccttcgatccgattgcaggcgttcgatcggtgacgagacgatcggagacgcgccgatgccgccggtgcctgtggagcacgaggttacaaaagacagagttggctcacaccatatgtgtaacgtcacagacggtatatgcgagtgcatacacctatgaagacatggaggccttgttgtctgatcttcaatccaagatggaaaaggaaccatttaagatgctgataatcaattcggtgacaacattgttcaatacagaactctgtaatggctgtgcgtttgatggatgtcagataaagacactagagatgatgtattgcctaaggatgatagccaataaatttcatataggggtgtatgtcacgaaccatgaggaaatgggtttgactgatgctaagattaagaggtcactcaagcaggggctatacttcaaggaagtaaaagatctccgtaagctgaataatgctgttcaggtcactacaggaaacagttcccttggtgacatgcatcaaggtggtgatatgcatgaagatgtatttttgggtctgcaggattttagaaccaaaatcagagtttcttatccaaattcctggttttatcttgatgcaagtccagatgataaaatcaaacagttatcacagatgatcgagaagcgaatttcactatctcgggaaagtttttatctgacttatttgggccaaacatttaggatggttgatggttgtatggaagtttcacaacatgctgtcaaagatttagatgaaactagcgtctgtgaggactataagaaaatttcaaaactgttcctggatatgttggagctcaacaagggacatcctttatacctcagtcatttatgcagtaagatgaagaatgctaatgttacttcagcaaagagcaatacttttcaattgttcttaagagttcatccatcattgatgacatattcaacacgttcctccttattgtgggagatgaaacgtgaaatcgatggattattacctcccaatgcaaaaaatattcagtctgccattgatcaaattttgatgaatagagattggacactacttgctaaacaggaagctgctttctcacctacctataacagaagttacaagaagtcgtcaagtgaatgcttcaagttcattcgaaattggttaactcatgggatagagaacttcaatacctcagatccaagaaggtttacaactgaagatatggactatctattggagatagtcttcaaagattttctagctgatattgtctggacgttgctacaaaacaacattgggaatttaaacagatggtgcttacctggtttgcagatgtacaagaaaataactctttctaggttgatttgtggacagaacaactaa

SEQ ID NO: 43281 - DNA, 207 bp, Oryza sativa
  Clone ID: PAT_MRT4530_46453C.1
atagctttggaagtgaatcactggagaagggaacacaagttattggaatgaaagaaatggtggtcccacttactgctggaattttatctgctttgaggagagtattagctcggcgggtgtcccttaagtacaaaaactcggaccggagctcaacccggtcaaagctttcagttcaccggtacggcggtgaaaccggccggtctgccg

SEQ ID NO: 43282 - DNA, 574 bp, Oryza sativa
  unsure (1)..(574): unsure at all n locations
  Clone ID: PAT_MRT4530_46454C.1
ccagagtataaattgcccagcattgggggagcttgatgatctggactggaatcgccctgttttcttgttgttcttcagcaccagaattcagaacactcagttatgtgccagccttgatggtttctacggggagaatgctcctgaaaaggaaacaactctatctaccttgactaactggtgttactgcgtgcatccttggagatcttcttcgcaactagtgccctcaaagtggctgcacaaagtggtagtgacttgcaagaactttgcatttgccctgataatgtaattgggctagaagtggagcatttccatctgcaacgcaggaattcaaaggagataccgtcttggattgaaagttgagaaaacgaaaaggcgggatgggaatttctcattgtgggattctagaaattttagaccggactaaatcctgtcttctgcgggtaatgatctgtccnaatcacatgagctgtctacattatgttgcttcatgttcaaaccacataggattttccaggacaaattttactaatatgcaggaatgattttgttcttggtagaaaaaaaaaaaaaaaaa

SEQ ID NO: 43283 - DNA, 303 bp, Oryza sativa
  Clone ID: PAT_MRT4530_46455C.1
atggaaggggtgtatgcaattgaagtgggtgccaagagagtccccttgctgctggtgggggaaccgttctactctacaacggctagttttctagccggcctgacattgggctccaactgcctggccggtcagaccgacatagggtggccgatcagaccggcctcggctcggtcagaccgcccccagctcggtctgaccgaatacagctccggtggctctagatcggccactccagagcacgcctctcgactaccagggggccggtcagatcggcctatagccggcggtcagaccagcctctaa

SEQ ID NO: 43284 - DNA, 2543 bp, Oryza sativa
  Clone ID: PAT_MRT4530_46456C.1
gcggcaaaatgatttgtatttatttgtttatgtacgatgagaccaaacagtttcagtaaatcatttggggtagttgttgtcagaggggtaggagggtttcatgaatggacatgaacaatgagattctccgaagagaaatacaacattgttaggctaacaatacaacctatggctaaagattgatgcattgacagcctctattcctacaatacattgatctgccttccgcttctgcaatcctactatgctaagatacatatttacaaggaggaaggcaggtacttatctccctcctttttggtgggtcttcatgtgaaggaaccaaaccgatgaatcagaaagcatcaacgaaagcatctcgaagtgcccagctgacaaaagcatcgacccattcacggatagcaaaaatgttatcttggtctccagctaccatgtgctcctacatgtggaactggaggctccatagaatgtctggagggagaataattcgatgaccgaggaggcatagaccacccagagcaaggacctggtggaggatctgatggtcgtccgtagtgcactggtgctgctgacgatgcttcaaaatggtctggaccaggaggccctggaggaaaaggaaatctgcccctgtcagcaacttcgtggtgcattggtcccctaatagctctctcatcaaaggaacgtcctctgtcatcaaaatggtgtcctctatcatcaaaataatgtcctctatcatcatagtgatatcctctatcatcatagtggtatcctctatcatcaaagtgatgtcgtctatcatgcccatgatgtcttctatcatgcctgtgatgatctcgatcatgtccatcatccgatatctctcaggataggatgaactattattactccaaggccgtggtctttgctgaggttctggtggtcgataggggcattggtttataggaggtggagggggtggtggttgcatatgatatccttcgttaggtaccgatgccattgggggttgatgatagttattcccatgatatggtgcaggaggtgcaggaaaattgccatggggtccaggcggattaagtggtgcaattgggggcggcggtggcatctgatttggatgccccccatatcctgaattacagaatggtggaggctgcaattgcgctacagaaggattcatactgcctgggcgttccacaacagaatttggctgttgcgtctgaatattattggtagctcttgtaggatgcggaccaactggatcagatgccattggtaatgttcgctgcaactgtccagtctgagtaattggagcaggtggtggtggcggaacaggtggaggagatgatggcaatggcgggggcgatggaggcctatcatcagggaggggaggacctaaagtatgtcgatcagatgttctgcatttggtatcaatttgttctggccgacatctggtgctagcttcaacatcagatggtggagctacatcctccatctcaagctcgccatcaacttcttcaaggatgcgatgatgcttttctgcgggcatttgtgattcttccttctcatcagtgcaaggagcatcatgttcaggtgtaacagcttcaaaacttctatcttcagaggagcttccgtcctcatcttcaagtacttttgtggaaattaagtttggtagttgaaaaccagcattgctgccatactcatcaacaagcattccttcgttgtcacgcaacgggtcatttaaagctctttctgtccttgaaggacggcgagaacttccaaaagatgcctcattgataacctcaagttctctaatatggtggcgaatgatgtactctgggagtgttttcctctcaaaccaaagcttcaaaacctttagacattgccttcgattctcccatgccgaatttccaggaggtgcagcagcataaagtaatcgaggtagaactgcctggataagagacgggtaaacatctccagctccacctttctggttacgagagtattgagttattgaatccacaagaaagaaaaggtccactctcttatataaattcgactccttctccaagcgttcaacgataatatcaatcgcctctccagcaacgccatgtttggcacactcaattgcaagacgtgttgcacgcgctatattttcttttgttcttgtcagtgtaccaagaaaagatccaaaagcctttcgtgctgcattagcctcatcatgtcctgttaatttgctcaagttcttctgttgctgactatcaaaaggactcctagaatgaatattatcatttgtagatgtggatctgattatccggttcaaaggtgacaattgcttctgtgatccttcctggtggtggccctgtccagctgcgaggccgagtacatggcggcctccgccgcttcgacccaggcgctctggcttgctcgactgcttagtgatctcctcggcagagacactggagcggtggagcttagggtagatagcaagtccgccctggccatggcaaagaacatcgtttttcacgaacggagcaaccacatccggg

SEQ ID NO: 43285 - DNA, 300 bp, Oryza sativa
  Clone ID: PAT_MRT4530_46457C.1
atgtcgatctgggacgcgatagcattgccacgcgttggaaggaatattgaaggacgaggaagagcggatgacaatttggtctcagatagtattatagcgtgctgttcacaggttgagaatggtattttatcgaattcattttgccgagtggcattgagttcgccggaggctgtttctgatcacggcggatggcgatggccgcggatccatggggactacaccgacatgttgcaggatgtggatgagaggctactgccgtcagagacagcgccaaactttaaaatatttgagtatgaataa

SEQ ID NO: 43286 - DNA, 1011 bp, Oryza sativa
  Clone ID: PAT_MRT4530_46458C.1
atggggagcggcggcggcgagcgcgcgccggcaacggaaagcggcagtgcgggaggcagcggcggacgtctcactggccggcggcagcggccgaaggcgatggcgagcgcagagagtggcggcgcgtgcgggacagagggaaggagggaggagaggagctcctcaccgatgagcacggtggccggcgcgaaggatggaggtggcggcgatgaccgcgatgcggagggacggacgggcggcggcgacaccctaggagaagatggagaggcgtcaggagaggagataacgaccacggcggctttaaacaccggccgaagatggggtggacggcgtgactcaccggcgtgcgaggagagaggcgctccagtgggattccggcaacgtgaggcggcggccgggaaagctcttgcggcggcggcttggcacggcggcggccctagaagcgacagcacgcggccggagatgggcggcggcgacggagctcggcgagcgcggcgcgacggcggtagagggcgtgggagtggacggttaatgggggaaatgagagagagagctcgagggaggatttttatgggcgctttgggggcagaaacggccgaggatggcccctatttggccggcgacgtggggagtggagagagagagagaggtggattcgaatgcgaatcccgcccatttttgggcgtgcgcgagagcgggaagaggtggaggagagccactgagcttgttcttgctttcaaatatggtgctgctctcatgaatattgataaagtttgccatctcttcatgagttgtaaccgaaccaagggatttcttgagattcttaagttatcaatgggtgacatgagaattagtttatcaccccggtcgaagctttcagattcgtatgctaaattctatatagatgtatatgctgaattttatgccccaaaaactagattgaatatacagaactatatgcagcttttactctttgaaggtgtatatgcatgctaccatgtttcctgctaa

SEQ ID NO: 43287 - DNA, 1320 bp, Oryza sativa
  unsure (1)..(1320): unsure at all n locations
  Clone ID: PAT_MRT4530_46459C.1
caaagaggcgagggtacaatactcctctctctctctctctctgtcggtcttcatcttcctcctgcttctgctcctgctcttctttaaaagcttccaatccccctctcctccttgtgtgtcgtggcaaagcctcttctcttctcgtgccttctagggtttcctcttcctcgcaccgcgccgcctcgcctcttcgtccccagattcagatctactcctactcctactaccaaggttgttgccatggctcccgctgttgaagccgtggagaagaagacaggctcagcccccgtcaaggcccctgctctgaatgaaaggatactgtcatctatgtcccggagatctattgcagcacatccatggcatgatcttgagattggacctggtgcaccaactatattcaactgcgtcattgagattcctaggggcagcaaggttaaatatgaacttgacaagaaaactggactgatagtggtggaccgtgtgctctattcatcagttgtgtaccctcacaactatggattcattcctcgcacgctgtgtgaagacagtgatccgttggatgtgctggttataatgcaggagcccgttataccaggatgcttcctacgagcaaaggccattggtctcatgcctatgattgaccagggagaggcagatgacaagattattgccgtttgtgctgatgatcctgagtacaagcattacaatgatatcaaggagctcccacctcaccgcttggctgaaatcaggcgcttttttgaggactacaagaagaatgagaacaaggaggttgctgtcaatgacttcctgcctgcaagtgctgcttatgaggccataaagcactccatggatctctatgctacttacatcgtggagggcttgaggaggtagacttgtgccgcttcctggaccgagaggatggatgttgacgaaaattgtggagatattatcaccttatgaacaaatactattattttgttggtgtgtgatatacaccggtattattcacatttcaagtagtaacagcacaagtagaaactactagtagcacaacaaagagtgatattccttttatggccctcggtgccactacgatatggagtattggtgaatgatgatactttatgctgattctattgatatggttcgagcaaagaaaaaaaaaaaaaattcaaaaaaaaaaaaaaattttaccaaaaaggcccgcnccaatcgcccttcccaacantttgcgncacctgaaatggcaaatgggnanattgttaancnttaatattttgtttaaaattcncgttnaanttttggttnaatccncctcat

SEQ ID NO: 43288 - DNA, 529 bp, Oryza sativa
  Clone ID: PAT_MRT4530_4645C.1
ccggtgacgatgcggtggccggcaaaatgtaggtggaatgacggatgagaaatttcccgaccgcctcggggcttttcgcgcgtcgcgcctggcccgttgatgccccacccgcgcagtgaacccgcgcgatggggttcttttgctggtgcaccaccgcggtgcccccccccctgtcttctttttgcgcggtaaattcatcggcgcaccggaggatgtgttttcgtagtccaccccttttgtataccggcttgttttctctcagtgaaaattgtgggagaaaacagcttggaagttgcctgacaggacttagatcaaatttgtgagggtgcacttccaagccattttggcccttcagttcatctgatttactaattttaatttcagattccggctgttagttgacattttattgtctgctgcttgcttctgttctttgttgttggaagcagccaatgttccccccttactaaacatcttcagggagcaaatttggcccccttttactgagcaaaaaaaaaaaaaaaaaaaa

SEQ ID NO: 43289 - DNA, 154 bp, Oryza sativa
  Clone ID: PAT_MRT4530_46460C.1
aaactaaaccactaatatacaatttactcatcagccaattttataaaagcggcaaatccctacactttttccatcacatattatcatcactatacacattatcttaaacctacttactaatttaacaatcatcaacccttacattatttataac

SEQ ID NO: 43290 - DNA, 1100 bp, Oryza sativa
  Clone ID: PAT_MRT4530_46461C.1
ggaatagcaacacaagatatcggtcggattcggtcagcttcacacgagtgatttgaaggttatgctttatggcagggaaggggttgctgtaaaaatgattgttcacaagaacatccttgctgaaaatagtactttctttgctgataagctctctaggcaatctccagtgtcatgcattgaggtatcggattgcgaggatgtggagatttttgttgagactgttgggttgatgtattgcaaggatgttaagcagagactgatcaagcaagctgttgcgcgggttcttcgaatcttgaaggttgcagaatcactaggtttcccaacatgcatcatgtcatgcttaaattatttggaagcagtgccttgggttggtgatgaggaagaaaatgtgttatcatcgatacggcaacttcactgtgagaattatggagttagccccctcctgaaaagagtagcatctgacctaacaaatccacctagtgacacccttgcacatatcattgagttggtgctgacccgcgccgctggcagcggcccgcgcgagatgaaatctttggtcctgaagcttttgaaggagaataacatctggaccaacggttcatcggattcctgtgtagtgacattctacagttcttgccggaattgcttggaatcactatcgaacttgtttcgccaagcttctgaacctgaattttctgagcaatcttcagacagtaaagaggtgatctttagacagatcactctagaggctgataacctcctctggttagctgagatcttagctgacagaaatgcagctgatgagctgacatcaatttgggcaagccagggagagctggccaagctgcattgcaggataccagtgatgcaccggcatctcatcagctgtgtcactgcaaggctcttcgtcgcggtagggaaaggcgaggcgttaccgtctaaggagacgaggcagctcctccttgatgtgtggctccagcctctgatggatgattacaactggttgcagcatggctgcaggtggtttgatcggaaggtcatcgaggaagggatagggcagaccatcctgacgctgccattggaggatcagcagagcattc

SEQ ID NO: 43291 - DNA, 709 bp, Oryza sativa
  unsure (1)..(709): unsure at all n locations
  Clone ID: PAT_MRT4530_46462C.1
accatacttttggtggntgctgccatgcagttattattatcaaagcccatgaaaggttcaaggcttcccagctgcttggcaattgctcttcaggatttctctacctattaactgttattgcctggcatgggcgcatagaagagaccacaatatgaggcaaacattggaccatagctaacataactgaatatgtgatgccactttcactgatgcttctatgaccaccagtgcggtgtgggatatgcatgctcttcattactgtatatggtatgctcttcatgaagatatgcttttagacctgtcgaaacaagatttcggcaataataaagggggtggctgtcaagctaggaaagtggatgggtttggagacaaggaatgttatacaggttcaggccttcttattaaagaagtaataccctactcctgtccggggatgattccgccgagtgtgttattgattgtttgtgtgaagagatcggacccgggccccccgaccctctcggtcccgccggccgtagcggtagggggcccttatgccacggacccgccatatcctaacggaatatgggattacagataaaatacaatcgtaaccgactaggatcccgggtattttcttgatatacaagtttagaatctaacccgagtccttataaagatattctatctatatttggtaccatatatccgactaaaaaaaaaaaaaaaa

SEQ ID NO: 43292 - DNA, 832 bp, Oryza sativa
  Clone ID: PAT_MRT4530_46463C.1
tcactttttcctatatttctcctcggcgacaacggtgacctcgacctcatggacaacaatggcaacctcccctcccctcccctcggcgaccttgacggcgacgggagtacggattaggccgcacagaacacgcccgcagcaccgaggggaagaagggcgacgcgaggttgctggtgtcgaagtggaaaaccccgcggccagcacgaaggcgatgatggcgatgccaaccaccgatgccagcgagttgagcgtggacgtgaggcgcgcctcggacatggccaccgcggaggtgctgatgagtgccacgacggcgatgtggtcgagcagattgccaccgccgctagatctgccgtgggagggaggcgagagggggcggagggagccaccgacgccgccaccgctggatctggcgcgagagggaggcgagaaggggcggagggccgctggctccacgccagtagggagagcgccgccagtggagcaggtggaggaaggggggagggagtggccgaggcggtggttcccctccccgtcgctgatccccgtcgtcgtggaggaagggagagggggtgaccgagaggaaccgataggagcggtggatccccttcccatcgccgtggaggaagggggagagagtgaccgaggggaaccggcaggagcggtggatcctctccccgtcgttgtggaggaagggggatggagtggccgaggggaaccggcagggtgccttccctgtcgccgcgccggcgagacaggaggaagagggggagatggagcggcgccaccggaaaaagggggtcttggatccctgaagaaaagctccaaaaattaa

SEQ ID NO: 43293 - DNA, 1554 bp, Oryza sativa
  Clone ID: PAT_MRT4530_46464C.1
gagagtagcaattctcagacgaactacctgggggtgtggcccgagtctttggtggtttcgcatgaagtcttgtttctttttttttttttttttttttgaaataaaatgccttgctatattattcctatatcatatttgctatggaaagaaaactataacatattgaactaagcttagatggcctcatttagacaggaaagccaaaattttagatacatatgctttgttttgagcactaaaatactaactcaattacaatggggatgaacccaagaacatggcctgctcaaagcagtgctacagcctcttggagctgacatctctcatcttcccttttcattttatagctagtttcccgccagaacaaaatggttcaagtctcagttcttgattgcacacagccacagaaaggcgccctcttctttttcttctgcgcaccgccgcgcttctccttccttccatacagataatccctcagaagaacccgagtgcgcttatcggagaccttgagcctcctgtactcatgctcctcttcaagctttagcaggacatactggatcttctgaagttccagttccaatctccccacgttttccgatcctttctggacctgtccggatattttcctcctactggggtacccttcttgctccgcgttcatgctatctgatagcgcgggatagttctcaacccgctttgtcaatttgttgttgtaattgatctgttccaagacacatccctcggtatcgagtagctgagtgctgacggtgttgtattcggagttcatgggcgatttcccgtttgatgggctccccattttccgcttcagctccttgatgctcacttggatgctctgcaacctctgagcatcagaagagagcttctccagtacattgttgctccattgctcatgaggctctacagatgatgtcgacacctcaagcttattgattccaaggtctcttccccttgctagctcagaggaagggtactcactcttcacctcctcaaccgcttctatgtcgtgctcagctgatgatgatttggatgtttggtttttgcagctcctctcggcagcttcccacagctgcagcatctcgtcatccatcccagcattcgcgccattcttaagtgggtagagcgcagctccagtgccctatggtgcacatgcggatatttgctcaagttcgatatccatgatcatctgcccctgctaccctttggagtccttaacgttgtacagcttctcagtgtggtagtatatgtcccgtgccgccatctcgagcccgcgtcctgcgttgaggtcttcgatatgtggtgtgggcagctgcgacggaggcagcatccgttggttgactccagatcagaaggtttggggcatcatgaacaagttcttgatgtgtttccattagcgcccttcatcatcgtaggtttgtagttcccgtgagctatgtgtgagactctggatccatgtgtggggctcaggacatagagggcactatagagcttattccttcatgccatttgagctaaacggacacgacacaaacatac

SEQ ID NO: 43294 - DNA, 3929 bp, Oryza sativa
  unsure (1)..(3929): unsure at all n locations
  Clone ID: PAT_MRT4530_46465C.1
atgccatctcaggtcatggatcagaggcatcacatgtcccagtacagccaccccaccttggctgcatcctccttctcggaggagcttcgtctccccacagagaggcaagttggattttggaagcaggagtcattacctcatcacatgggaagcaagtctgttgcatcttcaccaattgaaaaacctcaacctattgggacaaggatggctggtcgactagaacttctacaaccatataaactaagagaccagggagctgcatttagccttgagcacaagctattcggtcaagagaggcatgctaacttgccaccatctccttggagacctgatcaagaaactggccgccaaactgattcatctttgaagtcggcagctttattttctgatgggaggattaatccgaatggtgcctataacgagaatgggcttttctcaagctctgtatcagatatttttgacaagaaattgagattaacatccaagaatggtcttgtcggtcagtcaattgaaaaggttgacctaaaccatgttgatgatgagccctttgagttgaccgaggaaattgaggcccaaataattggaaatcttcttcctgatgatgatgacctgttatcaggtgttgttgatgaagttgggtatccaaccaacgctaacaaccgggatgatgctgatgatgatatattctacactggaggcgggatggaactcgaaactgatgaaaataaaaaactgcaagaatttaatggcagtgctaatgatggaattggtttgttaaatggtgtgttgaatggtgaacatctataccgggaacagccttcgagaactctttttgttcgaaacattaatagtaatgttgaggactctgaattgaagctcctatttgagcatttcggagatatccgtgccctttatactgcctgtaaacatcgtggttttgtgatgatatcttactatgatataaggtcagcgctgaatgccaagatggagcttcaaaacaaggcactgaggcgtaggaaacttgacatacattattccattccgaaggacaatccttcggagaaagatattaaccagggaactattgtactttttaacgttgacctatctttaacaaatgatgatctacataagatctttggtgactatggtgaaataaaggagattcgtgacactccacagaagggtcatcacaaaataatagaattttatgatgtcagagcagctgaagctgcacttcgtgcattaaacaggaatgatattgcaggcaagaaaatcaaattggagaccagccgtctgggtgctgctaggcgacggcttgaggttaggaaagggacaaaagtccacctacctcactgtttgggggactcacatagcagtggtgcttgtcgcagcatatgtcttcagaattgtgtcaggaagagtttggtgtatgcaaactggggagtccaagcacaagtagccctccaattgcttcgtttggtgcattttctgacacggatggttatattgcaaggttctactaatttggcaacaataacttcaactggtcatgaaaatggaagtatccagggtatgcattctggacttcagacatcaataagccagttcagagaaacatcttttccaggcctatcttctaccataccacaaagtttgtccactccaattggaatttcatccggtgcaactcatagtaaccaggctgcccttggtgagatcagccaatctctaggtcggatgaatgggcatatgaactatagttttcagggcatgagtgctcttcatcctcattctctgcctgaagtccacaatggagtgaacaatggtgtcccttacaacttaaacagcatggcacaagttgtcaatggaaccaactcgaggacagctgaagctgtggacaacagacatctccataaagtgggttccggcaacctcaatggacattcatttgatcgtgcggaaggagctcttggattttcaagaagtggaagttcttctgtccgtggtcaccagttaatgtggaataattcaagtaacttccatcatcacccaaattctcctgttctatggccaagccctggatcatttgtaaacaatgttccatctcgctcccctgcacaaatgcatggagttccaagagcaccatcgtcgcacatgattgacaatgtgcttcccatgcaccatctccatgtaggatcggcaccagcgatcaacccatcactttgggataggcggcatggctatgcaggggaattgacagaagcaccaaatttccatcctggtagtgtgggaagcatgggatttcctggtagtcctcagcttcactcgatggagcttaataacatataccctcaaactggagggaattgcatggacccaactgtgtctcctgcacagattggtggtccatctcctcagcagagaggttcgatgttccatggaaggaatcctatggttccccttccatcctttgattcacctggtgaacggatgaggagccgaagaaatgattcaaatggtaatcagtctgataataaaaagcaatatgagcttgatgttgaccgcattgttcgtggtgatgactcccggactacgctgatgataaagaatatcccaaacaagtacacctcaaagatgcttctagctgctattgatgaaaatcataaagggacttatgattttatttacctaccaattgacttcaagaacaagtgcaatgtaggctatgctttcatcaatatgaccaatcctcagcatatcattccattttatcagacgttcaatggcaagaagtgggaaaagtttaacagtgagaaagtggcatcacttgcttatgctagaatccaagggaaatcagctcttattgctcacttccagaactccagtttgatgaatgaggacaagcgctgccgccccatactattccattcggatggtcctaatgcaggagatcaggaaccattccctatgggtacaaacatccgagccaggtcagggagatcgcgagcttcctctggcgaagaaagccaccaggacatctcaatcacctcggttaattgtgacacttctaccaatggagttgatactacagggcctgccaaggactgagtaacacaactgctctggatcactaacccccaaatcccaaatcataacttttgcgacgcggtttccatttcccagttttccgccctttttcccccaactttggtttttttggtatgacccccaatctgtatttattaacttccatgaatgcgggttaccgaagacttggctagattgctgcaacattttgtccctgatggaaacatggatagagagacagagagggtgcttccagtttcccctgaacctaccattatcatattaacctgaaggccgagaaaggtgaaaggcgcagcgagagcttccagattttggtcactttttaagaatgtattaaccccatgttgtatagcagtttccagtaactgtgctgaggggagagagagaaagagaggagagcaaggagacaatttacatgagtttttagtggtggtgtggagaggaagtctttccctgcattttcttttggaaccttttctggcgtcttcatctatgttccattttgagttgaggtctcctcttttaagttgtgtgcagaggagttccgattttgtcttcagggaactttgaccgtatctatcgaccttcatatgtaaatcaacatctctatatagtttgtgtgccctctgttgtatgcctgcggccccttgcacccgagaataataccctccgccggccgtgcancactgcgtcctctgctcgttgtcatcantggtgtgcaccgcncaacgaagcgggtgatattgaactctcctgttcagtctcttggaaacgcatcccgtggaaaagggctcngtgtnctgtgtccccgcagcgaa

SEQ ID NO: 43295 - DNA, 509 bp, Oryza sativa
  Clone ID: PAT_MRT4530_46466C.1
ctccaatggagcacataactggaccttctgtcgagtacacaaatgcgtaacattgaaattgttatgctattttctcttgcgctgctggctaaagaaaaacaacctaacattgaaattgctaatgaattgattatgcttcagagatacatctctttcaccatgtttacaaacgcgcaataactctgtggtagaaagtgaagacatgcggcataccaaccttgttttttctgcaatataagctaacacttgtggcatcgggcatctactgcttgtaatcccagacgacactagaagagactatgtacttgaattctttcctattaagaagataggaaaatcaactccattcttttggcaaagacaaattaccctttgtactctaatatatttttgctgcgtctgcaaacaacaaattacggagtatcaattaatgcacagtgcacagcttttgtattctttttgtgggtaaacatctataattgtatcacacataaaccttttctagcatc

SEQ ID NO: 43296 - DNA, 288 bp, Oryza sativa
  Clone ID: PAT_MRT4530_46467C.1
atggcggaggtgaggctagaccccggcggtgagccaacgcaaggaaatcaaggcgatgttggtgcgacagcatcaacgaaacaacaccacgacgacgatgatgggaaattcggtgtcctatggagaaaggcggagcaactgggcccctccctactcctaggatggcggtggtgggctactcctcgacgtgccagtagtgggccttccccaacctccactcttctggatggtgatggaggtagagctagggttgatggcatcgtcgaggaaatccatgttagtctctag

SEQ ID NO: 43297 - DNA, 466 bp, Oryza sativa
  Clone ID: PAT_MRT4530_46468C.1
cgccgccgcgtcctccacggcgacgccgagcttggcggggccgagggggggctccggttcgtcgccggcctccgggagcgggaggctcgcggaggggcggcccgggccgagcgcgccgaggaacgcgaaagggcgacgagaagactgtggggatggtaattaatggttattgatttggatctttcaaggatagcaacacctgtgtgctagcagctcttgcactgatccccccagcaatggtatcgttggggtgcaggtggctggcagtttgcatgttgcacaacttctatttcgacatatccactaccaatgactcacactgaatggggtgcatgtattgctggaaggaggaagctagccggtgactggtgaagtggtgaggggtataaccttgctattccaattgacttgaagactttctgggccaagcatggggcgaacgaatttgtaacaatcgtgtaaaata

SEQ ID NO: 43298 - DNA, 645 bp, Oryza sativa
  Clone ID: PAT_MRT4530_46469C.1
acgatatgcgagggcgtgtcagtcctggtgaagagtcgatgatgtgaccctagctactatggatacaactgttgctcacatcatggatcaacaagaagacatcaagatcaagtcctccaagtgctggaatccaattcggctacctgttacattatcgacttcaaacggccgccaaatatgcaaaacaaactccgttttcagcccgtgagttcttgatggaaagatctcggagtcctctttccaacagatctagccttattgccaaattccattccagtcatctgcaactgaggtgtctgggaccctggcccaagtggggcccatgtggggtgcgcccctaccaggtggagcacgaccctagggaccccttggtcgtcctcccaccaccttaaatagataggaatagggttgatttgcatcagcaagatcaacaacccacggacaggtgtatcgatcgctaaggcgcaacgcaacgtcttgtacactcaactcactgaaaaatcgggccaacaacagccttgagtttcgagtggaactcaaggttcatcacgctacatcggtattttccgtgctcttgcggattttacctataaggttaagatataccaacaatatgtgttgcggtctatgctgcttccggattta

SEQ ID NO: 43299 - DNA, 282 bp, Oryza sativa
  Clone ID: PAT_MRT4530_4646C.1
agggaggcacgccagcagcttcccacagctcccaccacggccttctcgtcgcccaccggatccgtcttccttctcggtgccaacgccaccgccatggcggacgcacggacggagaccgagacgcgcccccgcctcagagtgtcggccggggccatgaagaccgcggcggcggcgatggaaacgacgcggagcggcttggccggctgcggttggccctcgatccgaaaataatggagagttggggaagaagtggggggcggtttctatagtggggcctcgtgc

SEQ ID NO: 43300 - DNA, 345 bp, Oryza sativa
  Clone ID: PAT_MRT4530_46470C.1
gggggcaaaaaaacaaccaaggggacccactggcggccctggccttttggggatccaaaacaaaacaaaacaagggttaatttaaggaaccccctggggtaggttcaagttaaaaactttaaaaaacccccaggcccccccacctgggcaggagcccccaggggggaaattattccaaaaaaccaaaacgggccccctttttaaaggttgacaggaaccaaaaaccggggggggaaacaccaaaaaaaaccggccaagctggcttgaaaatgggaacaaacttcctcaggccccttttggaagcccccaccaccctctttgaattaaccccaaagggggaaccaa

SEQ ID NO: 43301 - DNA, 1524 bp, Oryza sativa
  Clone ID: PAT_MRT4530_46471C.1
atgggagaggtagtcagttctgccgttgttcatgagacagtgaacaaaatcatatctggcttgattgacaagtatgagcaaaattcaagtgcggaggagcagatggagaggttggagatggcgcacatcaagttggagactgcacttgagacatccagtaagtggcagatcactggtgggcccttgcaacgttggcagaagaagctgaagcgtgctgctgaagagtgtgatgatacactgcgcaaatgtaggcagcgcgtccaagaagaagaacaggctgaacaacaagtaaggaattcctccttacctacgcgagttgcccatgccaccaagtcactgatatcatccatctttcacggcaatatcgacgagccgattagatctgctgttcgaagatttgaatggtttgctgatggagctaatgactttctgagatccgtggagtttggagggacaccacgtcgttacttgttctttgaccctcttatcgggcgccttcttgcaggcgaaacacttgagtacaaattagtgcaaggaaacaatcagcatttgttttggatacggccaaataacaccgcagagcgaggagtagaagctaagttgatctttgtttacaatgatgaaagtgtgcctgtgaataacttttttctaggtatgatgctacaactttcagagtgcacaaacatagttggtactgcaattaagtgcttgcagttgtttgcccctcatttcaagtctacaactgaaactgttaggaaggaacttagtcaactacctacacaggacttctcatgggtgccacgttctcattcataccattgggacagtattcacagtacagttactgaatggttccgcccaaacccaatgtgttgcaagcatcgtagtcagaaggtatgtagtagtggcaacatggagaagacatatttaccagacatttctctagaatcagttattgacgtgagtttgcagtgccaagtttcactgcctgggttaaaagatcaggtcacagttgttgagagcaaaccttctctcaaagaatttccgcatctgaaagttcaccttgtctatacgccccatggctcttcagaagacctattcccagcagtcgagagttctgtgatagagatggttaatggtgttgaccaacattgcttgcacacaaacattgccttggaacaaatggaagggatcatgctgccaagggctgtagattgttttcgtcagaatgcaggaacaacagtgtatcagatggtttggaagtccaaacatggtggtgcatatcttcaggctgtgaaggtatccaagaacatgctgaggcagagaaccattcgaggagccaagaaagcgaagctattgcgacgacatgatcattggacacagagtcgcatagatgtgatctctgatttcttaaatctttgggctgcgcatgcgcctgtccagctgcagggctcaatcctcgattggactcagaaagaaaaggaagcacagttagcacctcatctactacatctgaaattttag

SEQ ID NO: 43302 - DNA, 646 bp, Oryza sativa
  Clone ID: PAT_MRT4530_46472C.1
atgccaccggatctggcggaggcgaggtccggcccgctgcccctcccgccaccgcccggccgcagccaccggatctggtggaggcgaggcccggccgcctgcctccacaccgtccgtcccactacctccatgacagagagagagagagaggacgccgccgcctctcccgccccgccagaccgcaaccgcctccatgccgccggatctggcggaggcgaggtccggccgacgtccgccgccaccaccgccgcacctccccaccatgaacagagagagagagagagaaagagacgccgccgccgcctctcctgccccgccggaccgcagcagcctccatgccgctggatctggcggaggcgaggtggcggccgacgtccgccgccaccgccgccgcacctccccaccatgaacagagagagagagagagagacgacgacgtcgcctctcccgccccaccgaaccgcagccgcacctccatgccgctggatctggcggaagcgaggtctggcccgcccctcttgcccccgccgggccacagccgcctccatgccgcccctcccgccgccgccgcagagagaggggggagaagtggagagagagtgggaggagaagtggtctgctcgccggagggaaacggccggccggc

SEQ ID NO: 43303 - DNA, 171 bp, Oryza sativa
  Clone ID: PAT_MRT4530_46473C.1
atggccgcgcggtcccacgggccacgagccacggccacggagctggggctcacccggcctctcctgtaccggttttttcccggctgccgcgggcccgcggctacgtcctgtgcctacgaggccacgatacgtgacagcggcaagattatatctggtttgctaccaatataa

SEQ ID NO: 43304 - DNA, 417 bp, Oryza sativa
  unsure (1)..(417): unsure at all n locations
  Clone ID: PAT_MRT4530_46474C.1
cacacaaagatagagcttaaccttacattccataatcatacatatcgagtcgttttgacatacacaatattttaaaaccaatgggcctcgtggatccgaattgcggaacttaccctggaacataggaccccttatcattattcatctacgtacatgaaataccaggggantggactaccacggctttgatcactcgtcaaacttaagcttcattattgctgtcacaacaaacatttcatgtactgatctttaagccatgattatttgtactttgactgtggactcacagaccgattcttgagctagccctgacactgaacttgcttgtgcttactgctaagaaataactgaggccattttgcttgcccgcgatttagacaacttgctgcacacttgagctgtactccccaaaaggga

SEQ ID NO: 43305 - DNA, 540 bp, Oryza sativa
  Clone ID: PAT_MRT4530_46475C.1
atggactgctttgagtggggtgacggatacctcgaccggttcggcctcatctacgttgaccgcaagacgctcacccgttatcgcaaggattccagctactggatcgaagacttcctcaagaagcagaaaactagtaatttcggatcctctcaaatggcactcatggtggtcgcctcgctgacgatggcgctcctcgccacggccactgccggctccatccaagtggggaaatgcggcgacctgtcgccggcgttcccgggcaactgcggcgccgacgtgtgccagttcaggtgcgccgtgatgggcggcgacagggagaaggcctactgcgacgccgccaccggcaggtgctgctgcccgccgggatcggcgacgctctgccgcccgctcgccggctgccggagccgcatcccggcgtgcaggatcaagtgcaagagcgtgttccgtgaccccgggagagccttctgccaggacggatcgcccggtttcggagactcttgctgctgccctcccaataatgttgaggattcatcaaattga

SEQ ID NO: 43306 - DNA, 222 bp, Oryza sativa
  Clone ID: PAT_MRT4530_46476C.1
gcgatctagaactagactagttctagatcgcgagccgccgctctcgttgattgtttttgtggaacgcatgaacggattagaagcgagatttcttaacgcataagagcatcacattccacatagctacctctacattccattccggcaccctatgaacagaataataaaacaaatgtactgatgctgtctctaccctcaagttcagcatctgacggcattcga

SEQ ID NO: 43307 - DNA, 212 bp, Oryza sativa
  Clone ID: PAT_MRT4530_46477C.1
caaacaattatttattattgtcttattggggatacatttttcaaatgtgaattatacactacataccccaaaacttcctggatgttcaaccttaattcagtcttcaccaaataatcccataacatcctccagatgcactataacgtaaaatccatgttttaacaagcacattcttcttgctgtcatttttaaacataataccttcctttatg

SEQ ID NO: 43308 - DNA, 1310 bp, Oryza sativa
  Clone ID: PAT_MRT4530_46478C.1
gatctggtcgtggactccgacaagatcgaggtctcaggacgttgttggaggatagggaaccaagaaccaacgaaacgaatcgaaacatgaaatcgaatagtacaagtaagtaaaagcgtgaaaagaaaagaaaaacaaaagatgagaccttttttttttttttttttttagcaaatgcaacacctgttaaatctgcattcctaacaaacagaaattcatttgaaacacctttcaataaaatcaccaccttgtgtatgtataggtttctaacaattaataacaatgagcagatccatcattcagattgtatagtactttgaatcttatcgatctttaccgaagtggacatcccaggaccacaaaacccacagcatcttcagaacattcgacgaattcatgacatgttacactggtatgaatcacacaaaactcttgctaacttattcggtaccttccactcttataacactaagagaacagcactaagcggactccgacttggtgtagatcctaattgcaacagccaggcccaatatggcgaggggaaccaagaactggaggatcttgatgatgaactccggggtcttgtcctggttgtagtgtggttgctttgggggaacgtacttcgtcctcgcgggtattgtggatgtgtcgatgtcgccaacgtaatactcatccatcatcgcacgagcagtcgtgctgtgcccgacatcctcaaaatcgtcagtcgcgtccttgccagttgaagatagcaagacatcatcacctcctggatggtcctcaaggaatttcgacacattgtatacctttccgccgatgatgagccagcagtcgtccttggagttgtgcttggcgacctcctccagggtatacaccttcttgttgtcgttcgacatcttcttctccttcctttctctgtctgtgtgttcttggttgggaattgagatccaagatcaagaacagcaggaatcagaggagggagagcgcggcgaaagacgagatttttgctaggtttctcgtctcgtggggattcagactcagagaaagagagagagcccaactccttccttaaataaaggaaagcaataataagaaaagaggaaaatttctgagccactgaaacaagggagagagagagagagaaacaagagaggaggtggtagacccgggcggcggacgggtgcgcctgcctgctgttgctgcttgcgccgatgaagccttgcagaaggctctgtgcggctttcacttgatccggaatgccctggatctccacaatggactcggaagaaccgggatgggcttcgtgcaac

SEQ ID NO: 43309 - DNA, 387 bp, Oryza sativa
  Clone ID: PAT_MRT4530_46479C.1
caaaaaaacaaaattttgaaaacccattaaacccctgggcggggtgttctgcccatccgagcagagagcaaaatttgcaaaaaaaacaaaaaaaaaatggggttggcgcatttacttcttggacaatcctggagggccttacataaaaaagctccccttgaaaacaaacttttcgaaattacccaaattgagctccctttaaaaaaacttttttgggtttggaactttactaaaccaacctttttttggtttgaaaaattaaacagccccctcccttggtgattgaccaaaaatagcctgggccccgataggaaacctaatttaccaaccaggttccttcaatcccataaccaccgggggcaattacattcgtggttgggggcaaag

SEQ ID NO: 43310 - DNA, 375 bp, Oryza sativa
  Clone ID: PAT_MRT4530_4647C.1
atggcgggggtggtgctacggccatattggagagaactggcggcgcggctggaaactgggtcacgggagcagggcgcggtggccgacgacaagcaaagggtggctgacggcactctctcccgtcgccgcccgtcgcatcgcgtcgtcaccgtcctccccggcctcctctacctcgcgtcgtcaccgaccgagggcggtagatctggccccatcgtgggcggatctgtgcccccctcccctgggccagatcgggatggagcggcgtcggtcgccgacgattgggggggcgccgacagaggaggtcgcgatggtggaggggcgaggggtggaaagggacaaacgaggggagagggcggtgtctacaggctcctcgcc

SEQ ID NO: 43311 - DNA, 2472 bp, Oryza sativa
  Clone ID: PAT_MRT4530_46480C.1
atgcccgcgcagaagcggccggcaccggaggcggcgtcggctccagcggggggagacgggcacgtggaaggaggaggtgctggtggtggtggtggcgcggacgaggacgcccaccgcggcggggagcgctccccgaaggtgatgaacggtggcgggccggagaaggagaaggagcggcgggacgctgattctgatgcggaggaagaggaggaggaggccggcggcggcggtggtggtggaggggccgacgaagaccgcgacagcccgtcttcggagagcgacggcgacatggacgagtttatactagtgaaattaatggatatacggaaagaagtgcagtgccctatatgcttaggcattatccggaagacaaggacagttatggagtgtttgcaccggttttgtagggattgcatagataaatccatgcgactaggaaataatgaatgcccagcatgccgcacccattgtgcaagtagacgttctttgagggatgatcctaattatgatgctttaattttggctttgtatccagatattgacaagtacgaggaagagatccaagcatccatcgctgaaacatttcgaagacaatcagaagcactcgtgaagaagcgttccgttgcaaaagcaacaggttcaactattacgagaaggaccaggggtaatatgcgcgcaaaaaggaggggacgaactagttcccctgatattgttgcaactgacaatgaggatgaggatagagatgaaaatggcaatgagggcagcaaagagtcgtcttctgttgatgaccgttccccagatgtaaggcagaaaagagttcggaggtggcccgtgccacgatcatcccctgctaagagcattgggggtattgatagtagctttgaggatattgatgacttaggaagtggcagagatatcatgagtacttctccactacgcggagagatgcttgcctggggaaaaaatggcacccgcagtcaaacccggcatggcaattctggtggttccagtggaaggatggcaaagggtggtcgtgttaccaagttggttgaatacctacgtaataccgatgaattcgataataagttcaacttatatcttgttctacttccacttaatggacaaagcatgcctaaattggagaagccctatctcagttgccaaccgacattctctgttcgccatctttgccagtttgttgctctccaattgtctcgccatgcgaaagaagtggagatattcatcaggaagaaccccaacaatggatgctttgcatccatagatactagtgcagatgagataaaactgaatcatgacgccttagaaagattggaggaagagaaatctctttcagagctgtacccttcacttgcctctggccatggggatctggctccatggactcggtacggtgccttgaacaatgaacagatggtgggttgcaggaagaatcgtgaagtgatcaagttgctgttgaccggtgcaggtctgaccgtctgccatgccatgttaccgctgaaactagccgactggccttcgacgctcacgcagtcccgctgccagtcaaactggccgatgagtttggaagtgctctctgagtccctcttgtgctttggtgctacctccgtcaccgtggatgacattgccgctgccggaaatctcgatgagatcaccattacctccatttttgctcatggggaagatgtgggctcgtgcgtatcgagtgctgcaagctcagctggattggagtacaatccggtgtatgaaagctctgtaggaaagcaatgtgattgggtgacggttgtgcaggaaacctacgagtccacaaaagtcattgatggtctttgggtaattcctaaatggagaactcccccagatccacaggctatcaatataatcatcaatccaggtctggcttttgggactggggagcatcccacaactaaactgtgccttctgcttctacgggaaacagttaaagggggtgaacgtttcttggactatggaacaggcaccggagttttgggaattgcagctctgaagatgggtgcggcactgtccaatgggatagacatagaccctcaagctgtaacctctgcttgtgaaaatatgatgttgaatggtatagattccaacaaaatgcttgtttacttggtaccaactaatgctcagtctgcatgctttccaagtaatattgacaaatcagaagagaacaggcccactggtaaccttgagttgaagtcgtcaaaaggatcatatgacattgttgccgcaaatatactcctgaatcccctgctggagctggttgaggacattgttggttatgcaaaatctggtggaatagttgctgtctcagggatattaagtgaacaggtgccgaaagttgaagaagcttactccagatacttggagaacatctcagtgtcagaaattgatggatgggcctgccttcggggaaacaggagagcatag

SEQ ID NO: 43312 - DNA, 459 bp, Oryza sativa
  Clone ID: PAT_MRT4530_46481C.1
ctttaaccagaaccccaaactcaagtcgagcaggaagtcaaattgtaagtgacggaagaggtgaagaaagaggaggaagatttcgtggtcaatccctatacgatttccagcagcaccaacaaagaaattgattacaacaagctaatcgagaagtttggatgttatcatatcacagaggagcagatccaaagaatagagaagtataccaaacagccagcgcattacttcatcagaagaggcatcttcttctcccatagagatctcgatgccatcctcactgcctgcgaaacacacaaagatccaactatcccgcctttttacctctacacgggaagaggaccgtcctcggaagcactccatctcggccacatgctgcctttcatcttctgcaagtacatgcaagaggccttccgagtgccctttatcatccagatcaccgatgacgagaagtacttccac

SEQ ID NO: 43313 - DNA, 2472 bp, Oryza sativa
  Clone ID: PAT_MRT4530_46482C.1
tcatgcagataggtaacgctggatagctgatacagcccgttgtctaatttgatctacttcttcaatagcttgaatgtcttgggcatcggttgcaaagatggccttaaaggacttggtcatatcagccacattcttgatagctgatttaagtctggatttttgttcttcgacagcatttggaagattggctaacttttgcttctccaaatccagctcggcattgcattcttcaagttgagctattagatcaatcttgcgggcttcaagccaatctatgttagaaagctgccgattggcttggatagtggctttaatgtccttccgctcccgccgatcggctatccgttgcttagccttctccagcttgaattgatgttgctcaaggtacaccgctggagtgatggtgtttgccagatcatctgggattagggcttggatttttgcaaatcgagcccgaattgaaccatagtcggccaccagattatctaatgatgactctaaccgaagggatatatcttcaagtgttttcttgaaagtttcatctagaggggctagagccttgcttgtggtttcttcttctgcttcttcatcaaagtaatccttgatgtcaaaggagaatagatcggctaaaactgggatagcaggagcggttggttgttcttcttcctcgatattgtgacttgctgtagccgatggggtacggtcacttgacatttgtggtggagctggtttaagtgttgttgttgccgatttcttcttcacagcagtcttctttttccttgaaaagtgagctggagcagctggatttggaggagtttgtttgggcgaagccgatggtgttttttctcctgcatcactcagttcggctgctgcctgatcgaaatcttccccgatttcttcttcatccaaggcttgctcgatagatggatctaaggtaggcaagtcatcggctggcttgggtttattcttcttggtcttcttcttgggagccagagccgatggatcaatagccgatgctttggttttcctcttcctgcctccatttggtagaaggcctggagcatattctatgtccttgcccctgttgcttgtgcgaggaggggaagattttgttgtctgggggacaacatctggaaacaaatctgtcatgtaaatagaggccgactgatggaatatgtgttgcttccattcaccccaccatctatcaaagttcttgctcctgaaccttgccagttctatgttctcgatactggccaagggaggtcctgggatgttgagcagcagatccatcatcaatgttgatgagatttctccactgcactgaatcttatcggtaaagaacaagccgattggtaactgtcccattccagatttcctagctgagctcattggatgatagaactcataggacacttgtatatttcttccttggtggatgccaacaggaaggatgcatggactaatagcagccgagaagacttctctagatttttgaaatttttcagagttgatgtcttcaaatttgaagtctgctgggagatcaaagtttactgagtcctcatatggaaaccagactcgagcatctctttggaagccctcatagaaactgtgatcagctccagccttgggaattctgcgtctatcaaaggtggccgattcacaacctgcacttaatactgagcctgtaactatcttagccgatgcgttgctcaacatctgatatagatagtcgagaaggattttgcccaatgggaattgtctcttggtttcaagggcttcagctaagaactgccagttggtggtaaggccgcagcttgatccacagaacaaaaacttctcgagccacatcaagagaaaggcagtgtgctctcggggggtgacagatcctttgcccatgtatgctgctacatagccagaccagccacctatgctcttggtcctgaagtcaaattggtttttggtgttcaggctcataggattagccgatgaagtcacatctaatccagtaatcatagtgatgtcgagcagagttggggtcatcggcccttggttgaacaagaaagctttaagggtgttggaccaaaagtatgctgcggaggccatcaggggttcatccttggccgaatttgctagagtaagagcaagcgcttggccgattcctaattcgtcccagtgaacttgcttgctagccgatacgcgcttataccacatagcccaacttttctcaggagaagttttgtcaagagaaggccaagatttgaaggtattcttccagtgacctagatttgggttggccaatctaaaagggatcctattggtttcggcgatgatgaactcagtgggatcaagattgccgatcgaaccaagaaaatagtgatgctcatgtgacaaacttggggtcgcgaccagattggacaagtgctctgcatattcggcggatggcgcgacggacggactggcggatgacgacat

SEQ ID NO: 43314 - DNA, 720 bp, Oryza sativa
  Clone ID: PAT_MRT4530_46483C.1
atggtggtgggattgccgcacgcgcttgcacgagctgggctgggccgtggcgaggaaggcggcgactgcttctctctcttgctctccttcctctgcaacgccatgtcgaccgtcaacaccgacaccaacacccgcaccagtactggagaagctcgaacaccgacagcagtggacgccccttccgtcgcctcaacgagccgcgcagcggtggctgcgggagcttcctccgccgccccctccaactccccgagcaccactggctgcgggcgtcccctccgctacctcgacgagccgcgcgccggtggctgcgggcacccctacgccaccccgagctccgtcgccccctttgcatcaagctccgcccgccgtcgtccccagcgccggtggctgcaagcgccccctctgtcgccccaagctccgccatccgccgccccgagttctgtcgccccctcggcccccagctccgttcgccgtcgtctcgagctctgtcctctgccgtcccctccgccacccctcctcacgctgccgtcccaagctccgccgccccgagctctacccgccgccgtcccctccacagcccactccacccgccatcgtcccgacctcttcctgccaccgtcccaagctccgcggtccccttcgtcgccccgagctctgcccgccgtcctcgaggtgagggagggagaagagagtggattttggagagagatggagaggtga

SEQ ID NO: 43315 - DNA, 372 bp, Oryza sativa
  unsure (1)..(372): unsure at all n locations
  Clone ID: PAT_MRT4530_46484C.1
ctggggttcggggggttgacattaaaaatagcctctagggggcctcaaaaaatagagaaaaagaaggtagtagctgctagataaggtgatgtacttccgagggacagagtcagcactaacattacttgagaaactacttctttgcaaaatangattgggggatgcggggcaacctttttttttcnnnccttttaccttctttttcacatnaacannaaatctnccactcttctccatcactttatccncataaacttcatcatcctcnttcttcctcttcaatcttaaancatcttntttctntnttncttcntcantaaatataancccntccttcttcatttttttacccttctccacatcattttccaa

SEQ ID NO: 43316 - DNA, 465 bp, Oryza sativa
  Clone ID: PAT_MRT4530_46485C.1
atgccttcacgaaaggatatgtgggatgcacttgaggccatgttcggagtcttcgatactggcagtgagttgtatgtcatgaaacattgctatgagtataagatcgtcgatgaccgttctatagtaaaacaagctcatgagtttcaggcactaccaaaggaacttgagaacaacatctacgagttgctagacaatgttattgatctcattgcctctttgggtgttgaggagaaggtgatagcaaagaacaaccgcgacaaaaagtttgagggagcctacgtgcacggtggtgacggatggcaccttggcggacggcgtggacggatccgcctccgcgggccccgcgactaccggatccgctgccaccgggccctcaacagacggatccgcgggcatcggccccgcgacggcctgcggtggacggcggatggctccggcttccttgagcgctcaggcggcagctag

SEQ ID NO: 43317 - DNA, 1796 bp, Oryza sativa
  unsure (1)..(1796): unsure at all n locations
  Clone ID: PAT_MRT4530_46486C.1
cccccccacatacacccccccacccccccccacgcgccataacaaactcaatcaaccaccgccccccccccccctacatgccccccacccccccccccacctaccccccctccgccccgctgttaatgctaccaaagttaggtgggaagtcaccccccccccccccagacgcaacagctacaacaaaaaaattggccaaacacccaccccgcacaaccccgcccaccccaccccacccaccaacgcccacccaaagaccaagcaaacaacaccccccacacacccacccctatccccccaaacaccgccaaccccccacacaaaaccgcttaataccaccccccacccgtctacaacaccccaaaaccgaccccccaccccccaaccccacaccaccccccgttcaccaaagcccacccccccccccccaccaacccaggccccccaacccacaaccaacaccacacagcgaaaaccccccacaacatatcaccccggccccccatacccccgtccccccccccacccccaacccccacatcattcccccccccccccccccccccccccccacccgagcccaccccccccccccccccccaaagaccaagccaccaaaccctacccccgcccccaaaaaaagagccgcctcccatgccgctcccacccgctcctctcccacctccagagccacatcgccgccgtccgctcctggctcctccaggaccacggcgacgcctccgcctccgcctccgtctccgcgggcctcgcccacatccacgccctccacgccgccctcgccgacctcctcctcctccccgaccctcaggacgcgctccgccgctccaccgccgccgccgaccgcctcctcgacgccttcctcctcctcgccgacgcccaccagggcttccacgaggccctcctcgacctcacccaccacgtcgccgatgcccgcgccgcgctgcggaggtccgacgccgccaggctcgcctccgccctcaggtcccagcggagggccgagaaggaaatcgcccgcctcgcctccaccgtctccgccgccgccgccgccaccaagtactcctcccgcctcggcctcggcgccaccgccgaggagaccgagatgaccgccgcgctcatggacgccgccaccgccagcgccgccgcctccgcggccgtcttcaccgctgccgcctccatgtcctgctcctccacctccccctcgccgcctccaccgaccgcctcctccacggcttcctcctcctcgccgacgccttcggcaccttcctttccgcgctcctcgccctcaggcagcacgccgccgagctccacgccgccgtgcgccgccgcgaccaccccaagatcgcctccgccgcgcgcgcccagcgccagctcgacaaggacctcgcccacctcgccgccgccgtcgcgcgcgacgcctccaggtgcgcgcgcgccaccaccaccgtgccatnctgcgacagccaccacggcaccggagcaacagagctcgaggtcgccaggacggtggccgaggccatcaacgacaccgccgtggcgtccgcgtccgtcttcatggaggtcgcctccctcgccgacgccgcggcggctgcggccgcggctcccgccacgaagaagaggctgccgccattgatgcactcgtcgtcgaggagcaagaacaagccggcgagctaccaggagaagagggaggcaatgcgctggagagctcagcagctgagcatgcatcgggagctaggagcagagcagaagtgtcangagtctattcagctagggttact

SEQ ID NO: 43318 - DNA, 471 bp, Oryza sativa
  Clone ID: PAT_MRT4530_46487C.1
tttgtttcttttttttttttttttttttcttttttttttttttttttttttttttttttttttttttttgggaagaggcctacaggggggtattttttttaccaaatgcagaaaaaataattccctaaaacccttgtaacaaacatttgggctttctgggacaaaaaaccgggggggttctttttttttacaaggaaaaaaaggggccactaattacaggttttcctgggtaaaaaaactcgatgagactggagttaagttcattcatgggaaacggaatccagggggaaagaacccgaaatcaagggggaaaggggatcaaacaagggcgagtttggatccatgcaccctgacacaatgcaaaggttggagggaacaccccacttttgggaggaactgcccattttgcaacttgggaagacaacggtttcgtctgggaagaagggtatgtcgaatgccccttttttggta

SEQ ID NO: 43319 - DNA, 1374 bp, Oryza sativa
  Clone ID: PAT_MRT4530_46488C.1
atggccggcgacggcgagccgccggcgctgtccgccgcggtgacgacgccggacgggtggcacccgcgcacggcggagcggcgcctcctccacctcctgcaccactcccctcccgcgcggcggcggccgctcgagctcctcgccttcgccgtccgacactgcctcccgtcgtcgccgccgtccccgcaccaccactccctcgccgcgctgctgctcctctcctccccgccgccgccggctctcccgctcctccgcctcgtcccgcctcacgcgccgcctccgctgcctctcctcaacgccgccatcaaggccctctcggcctcctcgccgccgctcgcgttccggctcctctcctctctccgccgcctccacgcgcccgaccgcctctcgttcctgcccctcctaggttgcgtatcgtccctttctctcctctccgcagtccacgcgcttcttctccgcctcggtttcctttcacatcacgccatctctctcgcgctcctcaagccatatcctctccactacgcccgcgtcctgtttgacgaaatgacgcagaggaacaagtgcaccgtcgcctacaacacactcatcacggcctgtttccgagctgatgatcttggtgccgcacgccacctgttcgacgaaatgcagagatacaggcgctccaggaggagcgtggtttcttggaatgttatgatcgcggggtgtgcttggtgcaagaaggatgacattgcggtcttgtgctttgagaggatggtcagggagggggaggtggcaccggatgatgggacccttgctgctgtgctgccggtctgtgggaggttggggaatgtcggggtggggagatgggcacatgagcatgcacgtaagagtgggttgctagacaggaaagtacatgttgcaaatgcagtgatggatatgtattgcaagtgtggtgatgttcatagtgcaagggaggtattcaagggaatgcgacagcggagtgtggtgagctggaacaccatgatttcaggattttcattgaatggccatgggattgagggcattgagctttaccgagagatgaggacacacggtgagatgcccaatgaagtgacatttctgggggtgcttggctgctgtgcgcatgctggggctgtggatgttgggagggacatcttccagagcatgcagctagagcatggtattgagccagtaattgagcattatggttgtatggtagatttatttggaagatctggccttcttgaggaggcatatgcattgattcaagggatgccaatgagacctaatgctgcgatatgggacagcaggctgttcactcttttagcattattacttgggctgggcacaaaaaggggtactgaaaggaactag

SEQ ID NO: 43320 - DNA, 1269 bp, Oryza sativa
  Clone ID: PAT_MRT4530_46489C.1
atgtcggcagcgacggacccgacggggtctccgatcacgacgtctgcagcgacgcacccgacgaggtctccgatgacgacgtcggcagcgaaccatccgacgggggattcttcagcggcacggtctagggccagtaagacttcgaaggatgatagcacttgcaccgtttcagatgaccccgtcgttacgggtgttatcgatgctttccgatctccaccgattcttcaaaaaactgcggtctctggattgcaaacacagattttgctttcactgggggacctttcgagccaaatttgtgaaacgcaaaagatgttgataaagatggcccatgataacactgaatttcaggaaaatatgaatgatagaatgacaaacgttgaacacattcaacagctacaattacagcaagtcacggatataacgcatggagaacaacattttccaaggaaaagatacatcgaggtcgagtatcctagcactataggaaagagggttcgaggagtcaatggtagggccgttacttatccgtatgacaattatgaaaaaaacattagcacaaagatcattaaggcgtttgtcaagcattttggacaaagtagatcaattaaacgacataaacatatgtaccatgcctacttagagaccccgtcagttgtgtcaatgcttatcaagtatggctattatgatggtgttgagctaggaaacactgatgaaaatatgtacaaatccgctggagtcagctatgtgaataatgatatgatttttctaccaataagaacttcaatagaccattggtacgtagcggttctggactgtaccagaaaggaggtgtgtgtccttgactcaatggacacgactgaagatgacttgaaagaacttaagtttctgatgaaaggcatccgcaaatgtgtccgacttgtcctcgatgataaaatagtagagaaccctctgtgggacgattacaatgttcaagcttggaaaatcaggattagatataacttgcctaacaaaaaagacaggacatccagtgggctttactcaatcaagttcatggagttatggacaggagattcgctaagcaaacaattttatcaggaagacatagacagctacaggagaaaacttgcagcaatcttgtacatgtctccgtcaaacaagcttcgaaacaatatctgttctacctcaaacggaaatggtactgatggaggaactagggcggcagacctcaatgaagacatattgaacatgtcagaaattcatggtgactaa

SEQ ID NO: 43321 - DNA, 243 bp, Oryza sativa
  Clone ID: PAT_MRT4530_4648C.1
gataaaaaaaaacaaagaggggggggctttttggtagttggcatcgcattcatcacacacaacatttatcacacaaaaaatttttcaccaacatttcatcacacataaaacaccctttgcaagcaagcggttcgtcaatcaccttactagcaacaaaaaccaagggaataaataattgtggttttttcctgccagggctttttcataccaccgtgggcttaaacttcttggccctctaaacct

SEQ ID NO: 43322 - DNA, 419 bp, Oryza sativa
  Clone ID: PAT_MRT4530_46490C.1
acagcctgaaacttaatatttgcataacaaattttgcatggggttgcataacttaaacaggcaacaacagcaggtcagccatagtccatagttcatcacaaaacattgttgagaattacatagttcagcattggtagaagtttaaagccagccactatttaaacatttgttagtaaaacaggcacaaaccagggccaccaaggcacaaaattttcgttccaggttctccattcaccagtcaccaccattccaccaggggggcttgagtcggcggcggtaacaaggacggcccgagacggtggtccccggaacgacccaagactttgggggcggggacgggaacggtaagcgattacacgagacccggtggccggaacggcccgagactttgggggcgggattggcaagcaacggcgggt

SEQ ID NO: 43323 - DNA, 2124 bp, Oryza sativa
  Clone ID: PAT_MRT4530_46491C.1
atggacgaccccgatccggcggcggtcgcggcagcgcctcgccaaaaagcgactggactcgatagagatagccggatccggcggctacgacatcgccgaccatgccgaagaaaggagcagcgttacttctcctcatcggatttgacctcacctgatcagatctggccattgaaggaggtgagaagggtgataagaggcagcacaggaagaaacgagagaagaggagaggagaagaaactagagactggctggttttggcggcgcccaggcgactggggcgcggcggccatcttctcctttgggagggttctttggatggagttcgtctttgttccaccggcaaagtttggtcctgtgacgtttgattctactgttcgcatctctggagatcatggaaatctctctggtggtcttcagcagtttgagaatcctctctcatctggtggggtgagacctgtcccactatggaagcggtccacgttcttaggtatttctctgttggctatcaagttctgggatgttcatgagacaatcggttccggcaggtttggtcatctacgtaacttcgtctcagttttgtcctttggaaagacgtatgtgtatgaatccaatctagactctggctcctcctataaaaacacacatgtggtttccacaacgatacgtcctttgcaaactctggagattctcctgtcaggttttgatctaggtcctgggcagtgttctctcaatatccatctcatggtgaaatctctcagtgggggcgacaaagggaccatcaatgcgatggttacccgcccgaagctgaaggatgacgccgtattggatctagggaacaaagaggtagaggattccagggctctggtgaaagctgggcaggatctggtggcggcacccccggcagatgatcaagcggtggatgtggtattgcaatctagttcaggcgtcaacttgggtcctgaagcacatatggagggtgcagttttggaggaagaagaagatgcaattgaagtggaacttgacaaggaggaagtggccttatttgaggacatgggtagagcttggcgactcagagcggagatgagttacaaatctctaaaggacaatcttttcatcgtcacctttaatgctgagggagaccataagtttgttctgcaaggcggcccatggattcacagaggagatgctctgattgtagctgatttcaatggccttttgagtccatcgatggtccccttggagtcagtgccaatttgggtaaggatatatgatctgcccttagtaatgatgaacaaagctagaggtgagctgtatgggagtaaactcggcaaggtcagggaagaggatgtgcagcaagatggcagcaacaagcatgatttcttccgcattcgtgttgatctcccggttaatcgtcccctgaaaagacagattgcaatcaaaatcaagatcaaaggtgttgaggaaatcagaaggttcaatcttcgttatgagagggtgccgcacttctgcttcttttgtggtttcattggtcactcagataaagagtgcgagaaaagattagccaatgaggctcaaccactcatgttctctgctgatctacgctgctctcttcttaaagctttcgaacggaaaatcagcaaggttaaggcaaatcagagtgccggggttcagaggaagcttgtgttcagaggcgcaggtggctcgctgcatatgtctgacagtactttgtcccgtaagaaccaaacaaataagttttcagctggggatgagttagcatcacttccatcattcgagatgatcccggccattaggaacctgggcactcaacaggagtctactgaggacgtgtccaatgaggctactatcagcccaatcaagaggaaagggtctgataatgctcaactgaagataatgggcaaagtgcaacaggctctgttggagtttgatcagagtgaatctcagggaggatcggggcaggggaagacaggggcccctgctcgagcctcgaagcgtttcaaaaaggatgagaaggctgagaacacagcggtggatatggaagcaaccagtctcggggctactggtaaactggcgagacctatggctgggtctcgccaggagcaatga

SEQ ID NO: 43324 - DNA, 432 bp, Oryza sativa
  Clone ID: PAT_MRT4530_46492C.1
atgaggaagtatgacgtggtctcccacccagtggcacggcacgtcgaggagcagtcacctccaccgacaaagccgtcgtcctacaatgagttccgcctctcccttggccccgagccgtcaaagaccctcctcacgctggatctcaccgagtgcagtgacctcttcctccgacaacagggtgctcccgcggctgagcgccggagttcaccgctgtgcatctcaagttcatcgtcctcgccaggatggaagatggttgtgcccgcctccgcttcccggtggcaacctgagcagcgagacgcctatggttacttcgtcaatctcaagacatgccggctcagtcttccggaggtgctcataggggtaggttgtgagcgcatcaccttgaatacagatgctcagtcttccggaggtgctcataggggtatgttgtga

SEQ ID NO: 43325 - DNA, 3926 bp, Oryza sativa
  Clone ID: PAT_MRT4530_46493C.1
ttactgattcaaaatttccttgcagactaactgtctaaagttagttctactctcctctcctcacatttctccaggtgatgcgtcttatcacccttcttacctaccccaataaccagacttaatcagatgaggtcaaatcggatgaggagaagtaactggaagggagaagaggagcctgaggtaaacttctctctcagcatggggtcaatattcccctcctcatcgctgctcctttcttcggcatggttggcgatgtcgtagccgccggatccggctatcactttcgagtccagtcgctttttggcgaggcgctgccgcattagctcccggatcggggtcgtccttcgccgtcgcgagcgccgtgtggctctcacgtcgtatggggctgccgaagccgagcggggaagcacgtgcgccacctccggttaattgaagaggacgggggcggcgcggcccttgatggtacggcggtggcaaacgtccagatccagataggcgagttcttgcgcaacgttgacatcttcggcgtccacttgtacccccccttatcacgcctctgctacaggaatttaaagcattatgttcctaggggggcacctttcctgtcatagccaccaccacgggctcggcgtccttaccctgtctcaggcgtccggtaggggcaatgcggtcttcacatttccaaattaaatcccaggattcgcgggaatgaaaaagaggagctcttggggatccatcagctttcgccccctcacaggcaagattataagcactccggactgagaaccgcccagacttgtcagggtgccaagctagaaagtcttcttcattaccgaccctccaaattatccccttcttcagtaactccaacccatagatgatagcccgccaggtcgggagacattggaactcagtcatcacgacgcaggaagcttcatcccgtaaaattgatcactaagtcagtttgataaagtgggccgtcccgggagacattgacgtctcatggaaactgtggacgttccggccatccacttcggacaggttaagttacttaatacagcgttcattatcttcatctctgtttatggtaataaaaagaaaaatccacaagaaacacgtggtatggggttcaaggacaacatggcaactagtcacccttccttctttagagaagtaatctttaagttctctttcagtcactcgagaagagagtccagtcacatacagtgtatttccatgatttacagcatcaggctccctctcgcggcttcttgatcttgaccttgcctgagatctagggtcagggactggagacctagactgggatcgagcagcaggtgatcgtgatcttgaccttgattttgggtttcccctgtaaggagagggggaccctgagtacctcctgcgctcgggggtctccgccatggcacggggcggatgaggcggcggcggcggcggagctcccggtggtgggcccggcgggcgggtccgggagggggggggagggtaggggtttggttcctctttttctctctgcttacagattcagggttcaaggtcgggtctgcagcaaacatctcctggaaataatcagttgccattgattccattgctattgccgtacggtgcacagtaccctgtgctgagtcaatctctctttcccataggatctcgtagtgcagacatttctgtctaggctggttgttttccactgaaacaagctttacattgttccatccatctctcctattgtcataagtatgaggcacaccttgaaaaccaaggtcgtgcaactcacaatcctgaagaacatcccgaaaggcttgcatttgagactcattcctctgggttcttgaaaagtgctcgaattgccacatagtctcattaaaatctcccataaccagccatggaaggtttgaggtttggctgatatttctaagcgcagtccatatccctgtcttcccctgccccgatccttcctgagattcactctgatcaaactccaacagagcctgttgcactttgcccattatcttcagttgagcattatcagaccctttcctcttgattgggctgatagtagcctcattggacacgtcctcagtagactcctgttgagtgcccaggttcctaatggccgggatcatctcgaatgatggaagtgatgctgactcatccccagctgaaaacttatttgtttggttcttacgggacaaagtactgtcagacatatgcagcgagccagccttttcagcaagttgagcgtcaactaactcatccccttcctcttctctcgaatcaaaaccatcgtaggcatcgattctgtttggtgggtcagtgtagaagcggtctccctgtttattccccgctgaagaagagctagcactacctgcgcctctgaacacaagcttcctctgaaccccagcactctgatttgccttaaccttgctgattttcctttcgaaagctttaagaggagagcagcgtagatcagcagagcacatgagtggttcagcctcattggctaatcttttctcgcactctttatctgagtgaccaatgaaaccacaaaagaagcagaagtgcggcaccctctcataacgaagattgaaccttctgatttcctcagcacctttgatcttgattttgattgcaatctgtcttttcaggggacgattaaccgggagatcaacacgaatgcggaagaaatcatgcttgttgctgccattttgctgcacatccacttccctgaccttgccgagtttactcccatacagctcacctctagctttgttcatcattactaagggcagatcatatatccttacccaaattggcactgactccaaggggaccatcgatggactcaaaaggccattgaaatctgctacaatcagagcatctcctctgtgaatccacgggccgccttgtagaacaaacttatggtctccctcagcattaaaggtgacgatgaaaagattgtcctttagagatttgtaactcatctccgctctgagtcgccaagctctacccatgtcctcaaataaggccacttcctcctcgtcaagttccacttcaattgcatcttcttcttcctccaaaactacaccctccatatgtgcttcagaacccaagttgacgcccgaactagattgcactaccacatccaccgcttgatcatctgccgggggtgccgccaccagatcttgcccagctttcaccagagccctggaatcctctacctctttgttccccagatccaatacggcgtcatccttcagcttcgggcaggtaaccatcgcattgatggtccctttgtcgcccccactgagagattttgccatgagatggatattgagagaacactgcccaaaacctagatcaaaacctgacaggagaatctccagagtttgcaaaggatgtatcgttgtggaaaccacaggtgtgtttttataggaggaggagacagagtccagatcggattcatacacatacgtctttccaaaggacaaaactgagacgaagttacgtagatgatcaaacctgccagaaccgattgtctcatgaacattccagaacttgatagccaacagagaaatacctaagaacgtggaccgcttccatagtgggacaggtctcttcccaccagatgagagaggattcccaaactgctgaagaccaccagagatatttccatgatctccagagatgcgaacagcagaatcaaacgtcacagaaccaaactttgttggtggaacagagacgaactccatccaaagaaccctcccaaaggagaagatggccgccacgccccagtcgcctgggcgccgccaaaaccctggcatctgagcattctcgtttggtggctttttgggctttcgtgcttcaaaatgtagtcctgaccctttatcatacttattgcacat

SEQ ID NO: 43326 - DNA, 1152 bp, Oryza sativa
  Clone ID: PAT_MRT4530_46494C.1
gggaccggggttaaaaagttttagccccatttaaacacccccgtttataggtaccccatacaacaacgtttattaaatccaggaatgctttttttaaatagtacaaagctacagcaatttaacatttataagggctaacaggaacagcacgttttccagcttggaattcaggtttttaatgcaacaagagccaagggagcaaccttacctgtcatagccaccaccaccggcttggcgtccatagcctctctcaggcatccggtagggagaatacggcaatgatctagatcgctccctccgggccctgccaccgccataaggaggagatctatgtggggagtatcccctgcctccccttccgtcgtagtaatctcgagcatccctgtggggggagtagtcccttgtgtccctgtatggagggtagtcccttgtgtccctgtaggatgggtacattggaggcggagacctgcggtagctattgccgtagtactcatcacggccatagccacctcctctgctgcggtatctcccacgtggctctctacggtcatatcgatgaccaagatagcttccaggagttggcgtccttgggcgacctcgacgtgacttttcaactgtgatgttccggccttccattacagactggttaagatacttgatacagcgttcagcatcttcaacagtgtccatggtgacaaaagcaaatccacgagaaacacgtgtatggggttcaaggacaacatggcaactagtcacccttccttctttagagaagtaatctttaagttctctttcagtcactcgagaagagagtccagtcacatacagtgtatttccatgatttacagcatcaggctccctctcgcggcttcttgatcttgaccttgcctgagatctagggtcagggactggagacctagactgggatcgagcagcaggtgatcgtgatcttgaccttgattttgggtttcccctgtaaggagagggggaccctgagtaccaggcaccaaatcgggagatcgaggaggtcgttacctcctgcgctcgggggtctccgcctgcaaagaggagaggcgtcagcaccgagatcagccaaatcagcggagaaatacagactgcgccgaggagagaagaggaagcaggtctcaccat

SEQ ID NO: 43327 - DNA, 393 bp, Oryza sativa
  Clone ID: PAT_MRT4530_46495C.1
atggagcccctcttctcctccccccaccggcaagggcagatggaggcggtgtgcgccggaggctgtagatcaagtgacggccttgacgttctttttaccccattcttattctccctgcttgcatcatcctcaagctttgaagccagtggacaagctggctcctacactgagcggcaatggtggcaccaaagagctgtccaggctcctggatttgaaagcctggtgttaccaactagagattatctttgtatatttaaggacctttgctgtgcggctgacttcgttcaaagccaccgtcggcaggctactgggcaagctaggatgcatgagcttggagctgggaggctgatattctccctcctgttctctgcttctatggctgacagaggatga

SEQ ID NO: 43328 - DNA, 1579 bp, Oryza sativa
  Clone ID: PAT_MRT4530_46496C.1
cggcacgaggcctccggcccgaggattgatcagaaagagagacaagagaagagctagggtttcatctcatctccagccatggcgtccgccgcctccccgccgcgctccggcgacgcctccccgtcctcccctctcctcccttccccgacgtcccccgaccgccgcagcggcggcggcggaggcggaggacgcctgcttccggggctgcgcggcgcggcgcggttcctgggccgcacggggagccgccgcctgatgcgggagccgtcggtggcggtgcgggagacggcggcggagcacctcgaggagcgccagaccgactgggcctactccaagcccgtcgtcgtgctcgacgtgctctggaacctcgccttcgtcgccgtcgccgccgccgtcctcgccgcctcgctcccggagtccccctcggtgccgctccgcgtctggctcgccgggtacgtgctccagtgcctcttccacgtcctctgcgtcaccgtcgagtacaggcggcgccgggaggcgcgcggcggcggctttggggcggaccagggggctgcggctgatggggatttcaagctcagtattgtgaagcacctggagtccgcaaacacgatgttttctttcatatggtggatcattgggttctactggatatctgcaggtggccaagctttgtcccatgatgctcctcaactttactggctctccattgtgtttctggcatttgatgttttctttgtagtcttctgtgttgccttggcctgtgtgattggcattgctgtctgttgctgcctgccttgcattattgctatcttatatgctgtaactgatcaggaaggagcatctgaagaggacatcaacaacctgtccaaattcaaatttcggacaatgggtgatgcagacaagctggttgctggaattgcagcacctgtgggtggagtaatgactgagtgtggcaccaatcctcctgttgaacacttcctttctgctgaggatgctgagtgctgcatctgcttgtgtccctatgaagacggtgcggaacttcgagaactcccctgcaatcatcatttccactgtacctgcatagacaagtggcttcacataaatgcaacatgtcccctgtgcaagttcaacatcatcaagagcaaccttggtccagaagacgtctaggtttcacaggacgagcaatctgttgaaggattgatatgctccagttgcgttctttagctatgggttccttcaggtgtaagtatggggtataggtgatgcacagctggttgatcagtattcgctcctgaatgaaatgttttagcagtttcttgatgccggtagagatgtacattccttctctctaagtcaattgtgtcgcagattctcattttagccttgtaggaagtatttgaattgaggattctcatgtacgttgtgttagcaagtgttgaataaatacatggaaatgcagaggtttgtaagaagaaaaatggttgtggaattggagctttgttaacagcacatgctgtctccttaatatcagtagacgcacattctaaaaaaaaaaaaaaattaaaaaaaaaaaaaaaaaaaa

SEQ ID NO: 43329 - DNA, 275 bp, Oryza sativa
  Clone ID: PAT_MRT4530_46497C.1
ctgtcgattgtgatttaacatttacctgttatttattcgagaatacaacaccaaactactagtatgaagcaggcaaatatacagtcatacagactgtgctccgtgtgctcgtccatggaggcatggatcatggtcgaggcactcttatttatatgtcgataaagactacttctaaacaagcttaaaaggtggttttggggggcttgtaatcgttgaggtagggcatggtgagcaaacctttcttcatcagcggctcaaccatcggccacacgcca

SEQ ID NO: 43330 - DNA, 596 bp, Oryza sativa
  Clone ID: PAT_MRT4530_46498C.1
ttcttcaaccttccacttcgaaatgtccacctcagtcacctcctcctcatccacccatcagcttcctctccctgccaaccatgtcatccccctcgtcttcactggacaagccctcgtcatagacgggcaaatcatcctcaccatcaccaccagacctatccatgaagaatgaaggcacacccttgtcaggatccacagcctcaacctcagtgccaaactgagcggcgcatagagggcaccaaacaggggagctctctagcagcttcatctcctccctctccttgttctccttctcctcaagcgcctccagcgccttggccttcttccgcttcttctcctttttgcgcctcgccgcctcgcttgcctccccatcccctccccccgcgccaacaggagagcctaatccctcgtcacgatcatcatcagcttcaattgtctccagtcggcgcttctgaatgggattctgcagatatcaaaactcatctggcccgaaggaaatggccacggcggagctccggtggggcggtagacgcggcgcccagctctagaggatcacaagcttacgacgcgtgcatgcgacgtcatagctcttctat

SEQ ID NO: 43331 - DNA, 571 bp, Oryza sativa
  Clone ID: PAT_MRT4530_46499C.1
aaacaattgccagactcgcattaatttgaaccaaagcggacacatatggatcagaaacttgcgagtacggaaaagtacgttctgacttaagcagcacttgaatggtataaaaaaaagggaaatactggaaatgcgaagaatgctatgaaaactaaacaaagagggtgggattgagatcactcctacatgaagagaaatctgcactgctctgctggatcatcacccccggaaactgtatgtacaattgtccgatctgacgcaaatatctgatagtcattgactacattgccggttgtgcccccaaagaaacggatttcttgaaattcctcaagatatctaaagcatgaacccaatggaccactcttgtgggaacacatcaaaactaatttgccctgcgatacaaacagacaagctcaaatgcgcgaacttttgacgaaacactgagaccattgtagggcgaacgatgtgtaccttaacatactttccagactcagcacgcacggtctcgactacaatgattccctatggacgacacattcaccattccacttcggaactcgatgaatgaacc

SEQ ID NO: 43332 - DNA, 185 bp, Oryza sativa
  unsure (1)..(185): unsure at all n locations
  Clone ID: PAT_MRT4530_4649C.1
cacccnaccagcagcagcagcagtagctgagcttgaagcagcagagcgaggtagacatggccgncgccaccatggncctntngtncccggngctggccggcaaggcgccgngaagntgttcgnngaggggcgcatcaccatgngcaagtnggnggcgaancatngcccgcngcntcgngtagccc

SEQ ID NO: 43333 - DNA, 755 bp, Oryza sativa
  Clone ID: PAT_MRT4530_464C.1
tggcggcggcttcgggcggtggcaaggagctcaggggtggcagctggtccaccggcgatggcaacgggagtagcggatccgctgcctgcgagctctggagcagtggatctggtgacggcgactccgacagtggcggccccaatgatggcggctacagcatctcaatgacagcgatggtggaggtgcaggatacaacaccgccgtgcgattgctctgcatcagttatgcactgcttcctctatgtcgactctctgcactgctttgtttacttcctctatgtcgacatgtcacccagtagcggcaatgttggaggtgttggtggcaacagcgccaatggtggtgctagaggcaacggcactataggaggcgagaacagcaacaccaacggatcggaggcatcaacaccaacactatctcatctagtactggagagttctctggccttctccctccgatggtgggaagggtgtagttcgatggccacgggtcctggagttgcggagctatcggcagttgggccggaggctatggatccatacaccagggcatatctattgaccgaacccctagttgaggtggatctggtggcaatttccgatatttttggagagaacaacggccaagtgctcctcgatgaccccgattggatgttggtcttcaataaattctacgcagaactaaatgacctcctctgtttcatactgcatggctatgctagattccggatgagaacggttacgaacgtacttctttag

SEQ ID NO: 43334 - DNA, 1368 bp, Oryza sativa
  Clone ID: PAT_MRT4530_46500C.1
atgagggaggcagccgaatgcgagggtgggatgtggacggcggccggacttgcttcgaggtggggaacttcagctagtggtagcggcggcagtctcgagcgtgagctcggtaaccatgccaacgccgtagccacgtcctttctccaccgccaccatcaatctctccgatgggagcaaggcgacgcaaagaggggcaacacctacgtcggcaatgccttctcgagcgaggcgtcgatgtcgcccgaatatgcgccatcaccgtctattgcactgccctccgacccgccacctgccgcctcgcgcgtcgcctgccgcctctatcaccgctcgcaactatgcccacatgggctcgagcccttcctgctgcctcctgctaggggccatgcatgcacgcatgcattgaccggaccaaaccccggcccggccgtgacaggtccgacctaccggctggctggctacaaccgtccgtgcgattattgccgagtcattgcatcacagcccaacaccgttcggatggacagcaactgcgaagcgtcgattaggacagttgtaggcagcacaccgcgacaagaggacactggccagactgtgactggcctgtcaccggtcacatttgatcggacgggcggctgtgcccccatgttccatcctgtacccaacggagtgggggcggagggagtgacggggctgtcccccgtgtcaggcggcgggcggcgctggggtccactcgaggacggacgactgcttagcttccaggcgaaggcacagatcgtggtccgcgcgagttgtggatactggtcgacgagacagccgctagccgccgccaccgagagcaagcaagacgacgacgtgcggacgcctcgtcgcggagagcacgttgagcacttgggctgctactactattacggtgttcgcttcaacgtcaccgtcctgtccactatgcatattcctcgcccgtgctgcctgctgaatagtcgtaccagttcatcgatgatcggttcatccatgtccggcttctcaggaagattcggattttctgaccgacagataaagaaagtagattattcggtgaccggtgaccagttacacgttgagctagcatggcatgaaaattttcaccgttggcaccgacgaaccgcggcggcaggcggcagccagccaagctatgtggtcgcagagtcgcagtgcggccggcccaacacagctgcgggcctgcacggccgcacagtatttagccggcttgtagcctactattatacttgctctaactactgctacttgcgtcgctgttctctttatgtcgataaatgctcgagaactccactgcctctgcgcaagcaacgcgtccacctacatttgtctggcaag

SEQ ID NO: 43335 - DNA, 546 bp, Oryza sativa
  Clone ID: PAT_MRT4530_46501C.1
atggcggttcagcctgagtctccgccctgctcgctcccctcgccacgtggcagccgggcgagggcctcggggcgaggcagcgcgagggcccgagggtatgccgcctcgagacaacgccgtctctttgctaccgtctctagctggtattgcctcttcgccaccttctcacggcacaccgcacctggccagtgtcctcttgtcgcggcgacgcgcgaggcggcaggtggcgggtcggagggcagtgcaatagacggtgatggcgcatattcgggcgacatcgacgcctttgagggcgacggggcgagctccgcttccaccaccggcagcctaggtgagctccgcttcagtcaccggccacccgggcgagctccgctggcctccacccacctcgctcgagaaggcattgccgacgtaggtgttgcccctctttgcgtcgccttgctcccatcggagagattgatggtggcggtggagaaaggacgtggctacggcgttggcatggttaccgagctcacgctcgagactgccgccgctaccactagctga

SEQ ID NO: 43336 - DNA, 352 bp, Oryza sativa
  Clone ID: PAT_MRT4530_46502C.1
tgattgggtttatcctatatatatcgtgtagggttcattgtctccgagttctacttagagactaaggcaactcacggtataaaaggcacaccccctgaggggttcagatcatcgaatcatagtgccaacacacttaccataatttacgaagccggaggacgcgaagccagactcgtcgggagatctcgtcaaaccatctcgacaagggtctcgccgactaaggctattacctcacgaggggcctgaaccaatataatctttatctttgtctttcgtgatgtcgtatcgtatagatcctcgtaccaacgtacctcaataccctatttatcctgcccttgaagctgagcgcaag

SEQ ID NO: 43337 - DNA, 390 bp, Oryza sativa
  Clone ID: PAT_MRT4530_46503C.1
atggccgccgtgaccaggcatgcgtcgacggcgccgtcttgtactggtgttggtgtgatgtggtggtttacgttattgccgtcggtggtctgcgtcttgccgtcggtggtgttcgcgacggccggagtaggccggcggggctgcctgcggtgggggtgcaagagtcccgggcagagctcgagtctaggggaggatggcacggcggacgagctgaaggagcagctacagggcgcgctccaggagaacgggcagctgaagcgcgagctgcagcagtacacctccgagaagaaggcctcggcgaagacgacggacgccgccgacgcggcggcggagcaggccgagcactggagaaaggacaccgagaccgccatggctgcggcggcggtttag

SEQ ID NO: 43338 - DNA, 222 bp, Oryza sativa
  Clone ID: PAT_MRT4530_46504C.1
atggggtggctactgcagctatgggtggcggcagcccgcgtcaagaaggcgccggggctcgtcgactggttcctcgacctgtgtttatgcttgcggtggcagcagcagctgtgggaggaggtgcggtgtattctgggcagcggcgaggctaggttcacggagggaggaagggatcagtgcgatatgataggcatcgatcgattccctttcgtacgcacatga

SEQ ID NO: 43339 - DNA, 846 bp, Oryza sativa
  Clone ID: PAT_MRT4530_46505C.1
atggagaccaccgccgcgctggcggccgttgccgtcgacaccggcgcctgttcgatgaaatgcccaagcgggacagggcacgctctctgcggatgcggcattggcggccaagctcgccgctctgctcggtcagtgccaaaagcggtccagaaagacgagatgttcgacaaggtggtggaggctgctcttgattgccggaacgtccaagaatgggaggaagacgtttggaggtcatccagtgtcttatcaatttatcatcaaagaggtactagaggttataagcaggctgctttcaaatcgaaggataagttctatggaagtagttcaagagtgcctgcaatgactctaagcaagaaagcgaagcagtctagcacgtttgatcacaagaatggaacaacaggactgaggagttccattgaagcaaagaaaaggttttcatacctagtaacatcaaagaggaaatgtgcttgtaagaagagtgcagctgcacttaatataatggatggatcaacagtagcaagtgctgagaaacataaaggcatggcaagtgggcaaagtagtagtgactgctctagaaaagctatcgtggccaagaagctcccagaggatcaaaatcaggatctcccttacgactcagcatctatgggaataattttgcaacgatctgaagataacttggtacaaggtcaattgaagaaatgcataacttgctattgttgctggaatccatcctggtctcagctctgtggatcaatcaacaggatgtttgtagcatttcctttgaggcctgggatcaatggaattgtcaaccaatatgaatttagcaagcacagacctggtatgtga

SEQ ID NO: 43340 - DNA, 257 bp, Oryza sativa
  Clone ID: PAT_MRT4530_46506C.1
gtgggagcttatggcacgagctggagacatggagagagattagcaggttcattagaagtgaaattgtagcagagatttcttgatggaaatttgacattgatcagaactatttgtatgcaaattatgtggcagcatttttctcagtttacatataagcttttgttaaaaaaaaaaaaaaaaaaaaaaaaaaaaaaaaaaaaaaaaaaaaaaaaaaaaaaaaaaaaaaaaattaaaaatttaaaaaaaaaatataagga

SEQ ID NO: 43341 - DNA, 736 bp, Oryza sativa
  Clone ID: PAT_MRT4530_46507C.1
ctctttccccttctcaaatccctctcacctcatcaactggacaaactgttgtctcagggggcagcaggagctattctgattgttcagcaattgcagtgttctgcttacaagctactcctaccccaccaagtctcttgccaattgttgataattaccatgatgtttttgctgaaccactacacttgcctcctagcagggattgtgatcatcctataccactagttcccaatgcaaagccagtaaatgtgaggccctatcgactgccccatcataaaaagaatgccctggaggatctaataaaacagttgctggattctcaaactatatgacccagtgtcagtcctttctcttccccagccatccttgccaagaaaaaggatgggtcttggcgcctttgcatcgattacagacaactgaattctcagactattaaaaacaaatatcatatccctgccattgaggatctcttagatgaattgcatggtgataaatatttttctaagattgatatcaggtcagggtaccaccagattcgcatgcacccagatgatatttagaagacagcttttagcactcacatgggtcattttgagtatatagtcatgccctttggattgactaacgccatgccacatttcaagctcttatgaacaagttgttagctccctttttgagaaagtttgttctggtgttttgggactaaagatggatctttagtcccggttgtttataccaa

SEQ ID NO: 43342 - DNA, 471 bp, Oryza sativa
  Clone ID: PAT_MRT4530_46508C.1
tttatggatgtgctaaattcactaactgttcagctcaccttcctgtatcaagatatttggagataagcacagctgacatctgaagacgaaggttcgttcgaatcttcctgagcagatcgattcagggacagggtatcacaataccagatgcaagatgcactcatgtatcccaatcaacttgtaagtatcatgtactcattccgtcccaaaatataaaaacataaaattaaattggacatttcttaatattatgaatctgaaaagtatgtcccatctggttttatgttcttatgttttgggacgaagattgtagtatagtagcgttacaaagatgtgctatcggccggacgcccatccgggtgagcttgttggcagcagcgagctcagctgatcatggccatggcgcggggtttcttgtgtttctgacaagtgatcaacaacgtactcttgttttctaaaaaaaaaaaaaaa

SEQ ID NO: 43343 - DNA, 457 bp, Oryza sativa
  unsure (1)..(457): unsure at all n locations
  Clone ID: PAT_MRT4530_46509C.1
ttcagaattaaaatagggaatatagaaagaggagactagagtccatacaggtatacaacttagaactaattgatattcggaattaaagaaagaaaactaaaactacaagtcagagtccctatagaaatacaatttaaaaataactaaaattggaattaaaaaaaataaatattggaagaagcccatattgaatataatttagaaaaactgaaattcgtaattagtagaaaacaaatattgaaagatgagtttagagtccatatagaaatacaattagaaacancagaaattcggaattaaaaaaaacaggaatattgcaagaagagtctagagtccatatataggaatttagaataaattgaaagatgaaattaagaaaaaaagataaaagtagagtttagagtccatatagaaatacaatttagaaataactaaaattcaaaaaaaaaaaaaaaaa

SEQ ID NO: 43344 - DNA, 1081 bp, Oryza sativa
  Clone ID: PAT_MRT4530_4650C.1
gcacgagctcgtcgtcccccggcctccagccccctctccgagctgacacgaccagcttcagcacttcagttcggctccgtccccgagttcggcagccgaggcgagtggggcaatggtggctcccgcgacgctgtccctccgccccttcgcgaccctcgcgccgtcccgcgccgcgctgccccgcgtcggcgccgggttcgcgctcccgcccgccgtctcgtgccagccgaggcggcggcgcctgtcgctccgcgccgtggccgtcgactccgaccagcagggctcccccgagcctcccgatcaggaggcgaagccgaagaagtaccacttcctggtggcgaacgccaagttcatgctggacgaggaggagcacttccaggagcagctgaaggagaagctgcggctctacggggagcgggagaaggagcaggacttctggctggtggtggagcccaagttcctcgacaggttccccaacatcaccaagcgcctcaagcgccccgccgtcgcgctcgtctccaccgacggcaactggatcacttttatgaagttgaggctagacagggtcttagcagaacaatttgaagcagaaacgcttgaggaggcattggcttctaacccggtcgacttgaaatttgacaagcctgagaaatggacagctccataccccaagtatgagtatggatggtgggagccctttctacctccaaagtctagcaatggaacagcatagagatgatcggcaatccatatgagcaatgtaagatttcttccatgcaagtgcccaaatgtaatctaaatttttaacaatgcctatgtaatacttggggtgctgtgagtacagttagctacaatagttgcagagttgctgtactttctggtaataccagataagcagtggttttgttttggaagattgtggacggctgtggttggggtataattttcttcatgatgcacattgctgtctatgttgtaaattttatcacgggaaaaatgcagtcttccaggtcctaaataatttctgaaccaccaaaaaaaaaaaaaaaaaaaaaaaaaaaaaagggggggggcctcgtgc

SEQ ID NO: 43345 - DNA, 3456 bp, Oryza sativa
  Clone ID: PAT_MRT4530_46510C.1
atgggtgaggcgattagggtttttggggcgacgccgaggcgatcgtcagaagcggcgacccctctggcgatcgggcgaggtggagaagatgatcgggagtatacctcaaggagaggcctcgctactcggatttcggcaaattgcttggcgggaggtgatttgggcgcgaattttgagcacaacaaggggcccaagggcatccatggcggtgggagtttgggctttctagcccatccctgtagccacgggtgtgggtaccctccctcccgacagctggcgcatctggatcggcatctccaccatttgtggggggcaaatcttcgggagctaggttttcgagcagggtggtgcaaggaggagtcgggagaagtttctgctgcggcagaggagtggccgcgggtggggattggcggcggtgaatcgtggtggagaggcaccatccgaggagacactaggcgcttcgcgaagattgttcgagctcgacctccggaaatggcgcatcaaggcggtgggtggaggggaagattccagccaaggccggcgttccaagcgcggcgtccggcggggcaagtgtttcaggggaagcaagggcaagctggaggaggagtggatcgacagtacatggttcgaggagagggaagcaagggagatcaagcagagatcaagcttaaggaggggagcttgctgcagaagtccctggaagagaaggactctgctcctgatctccaagctcaggagaaaccaaaggacgaggcacccatgccgaatcctcctccacaagccaaccctaaacatggacttggttgcattttgattcagaacactaaggctgaacccgcaagggagcatattaatccactggccatgatctcagttgttattggtgagggattgactgtggcacagttggagcagggatttactcagcaatttaagtggaattggaactggaaagctaaggcaatgccaaatgggacttttcagatgaggttcccaaataagatgagatttgaggagttatccagttttgaccattttagtgtcaaaggtaccaatgtgcagattaatgttaaggaatggacccaagaatctgaagccattggcaaaatgcacattgtttgggtgagggtgacaggtatacctgatgagatgaaaggctatcttgctttgtttgaggtgggttcaaatttgggtccagttatggcagtggatatggcctcgcttagagctcataatggggtcagaatcaaggttggcatgatggagctggaacccttacccatgaaacttatcctgacaacaccaaagggcttactctttcaagcttgctttaatttggaagaggttgtggaacatgggtggtttagggagcagctgtttgatgaaggaaaggagagtgatctcatcccaactaaggaatttgttggaggaagctctgctagacaagcccctgttgaagctatgatcccagacaaagtttcacaagtcctcagagatagagagctggctgtccagatgcaggaagaggagatgttgaaagatttgccatccaaaggtgttcctgtgatggaaaacaagaaacaatctgaagtcatgctgtcatctaatatgctggtggatcttggggggacaaaagatgataaaacacaggacaatggagataaaggcaaggaaagctgtgtggaattgttggaggaatcagatatgggacacttggaggaggagggggaaagagtgcatttaggggatagtgaagaactcattgactctcaggagtcagatgacaactttgccacaaaggttggggtggtattagctgaagatatcactgacagtcaagaggaagatgttagaagaagtaagagactgagggacaaggaggacaagaagccccaagatctggcaatggagagaaaagaagctcaaaatgcattcctcgataaaggtcaggcacaaattccctctatagttgatgaatcaaatgtttctcttatcaatatggcatgcattttgggagtaaatctaggatgtgctctagatgatgttgaacataatgttgatttgattaaaaagcttgaacttgctagaataagtctttttttgaaagaaaaagaaaatgctgaaaaaaataaagcagaaagtaaatcaggtggtgatttccctgaacacgctgaattggctgaaatttattcctcagacagtaacagtgactctgagcttgatgaaattgaattgatgattaaaaacattcacttctcacaagggaagaggaaactgaaaaagggaaaccttgacattgtcaagcttagcaggagcaaaaaacttcagctagagatggctctctgctgcaggacattcaggaggaattgggaaggactatataagagagaaaaggaggacattctaaggaagattgatgcaattgacatcaaagttgaatctgctggtatgactagcagtgatagagaagagagaagatctttagagcaaaagttgtgctataccattagagaagaaaaactaaagtggtttcggagaagtaaagtgaaggaaactttggagggagattgtaacacaaaatattaccatgcaaaggcaaatgggaggaggaaaagtcagattcactctctgagccaagaagagggagaaatagaaggccaaagtaatttattacagtacatcactcagttctataagaatctgtttggtcattcaaaagaaaacagtataaccattgaccttaatgggacctgtaaagtttctgaggaggataaagctaaattggtccaacctttttgtcttgaagaagtcaggacagtagttttttatttgaaacacaacaaggctcctggtccagatgggttgccaggagaattttatgtcaaattttgggacttaataaaaaatgaccttcttgatttaatcaatgattttcaaagtggaactctagacacagagagacttaactttgggatcattactttggtaccaaagtgtaaggatgctgcacaaattcagaagtttaggcccatctgcttactaaatactttcaagggacttagacaaggtgatcctttatcccctctgctgtttaatttagcagcagaagctctgaccctcttagtgaagagagctgaggagaattctttaatagaaggtctaggaatcaatgatgaaaacaagggtccctcagggtgtaaaagagagatctggaacttggaaaatggggatgggtggtggcaggatatgctgagggataaatatttgaagaaaaaacccatgtctgtcctcaaaactaaagctggtgactcccacttttggcagggtcttatggaaaaacaggaggtcgatcaaagaaggctgctcttgggggcccgacttataagacaagtggcaagtgacgtcttcaattccaagtttggatggcgagctgatgtcagaagaataggattctga

SEQ ID NO: 43346 - DNA, 3305 bp, Oryza sativa
  Clone ID: PAT_MRT4530_46511C.1
gaccaagcaagctggatgcggcgataactacacatcaccaagcaggggtacaagactcaagactacgggatatgtactgtacggcaacgcaccaccacactcagactctcttctgtgagacgcagcatccacagccacagcccacacagatgattattaccattcctatagtatgacactatcatttcctagcttaaatacacggacaaaccgcttggaacgactatatctgtatgatgatgatctatggtgacaggttgacagtttttttttttggttgctttgttagccacttttgcgactgataggccttctacgctgaacttgacagggttggcagaaaagagtcggctttcctgtggcgaattcagcagcccttggttacagtttttttggattcggactgcacagctccgtcaccgcagaggcgctcgactaggctgacgatgtgcttggcataggtgtatttcttcaataatggcaaatggattttcacacgactgaagaaggatctccttatgttgttcattgcatgttgtaagcatcttctgtaccacataattagcatactggtccttcattatcaccagcaaatagttattgccctcagtttgcttcagaatctccttgaccaaaagttcccgctctgcactgcccccatgttcaaaacacctctctatgacattagacgcaaatttgttttggctcatgggcactacctgcccagccaatttagtgatgatttggcccctttcatgttcattccctttctccaaaacatgctgcacaacatagttcccatactgatcttgtgcgaggatgcaagcagactgcaagatttcatcaattatgcaaaggcattcagaattattgctgcaacgctcgaggattctctgaataacacgacatccatatgtatgcattgacagtttggcaacctggcactgaaaagatgacaccagaaaaccaatatgttccaatggaatacattcaatgcatttttgtataacatgattcccattttggtcatgaacacatcgcagcacatgtccatcgagttcaccaacaagaacaattttctgttcaagatcaattacttcaagggccaactgatgttcagaataaacaattctatggatagaataacagtctgaagaaattttactcagataatactttgccaacttctgaataacataatttccgaatacatcagtcatcaattccaaagcatgaggaaggacctcggcaaaaagtaaatccttttcttcaatggtgcaattctccagtttctgctgaatgaaccggctaccattttggtccgagctgtatttcactatctgtcctttgatgtcagccagctcaaccctatgagttctgctggatattagttcttcaacagaaaagtgtgccttgggatcatcaaacttctccctccctttctgaccttgtatctcggaactaacaggcatattttttcgagggggttggaatcccttgacatcgttccttttgtcacgaggagatgttccagaagcaggttgcccatgtaatgttggacctgctggataaggcatcggtacgccaaagtaaggtgaggcagtctcataattcccaatcgcctttccacctttgatgggagtagaggcattagcagctacagtagtaaccggtatctgaaacttctgctctgatgggtgaatgattggtgaaccaaaaacgccagcaggattccctacaaaattattacttgaaaccattgtatcatatggatttccaacaccatacggatggatagggggctgttgaaaataatgcgtaaggctctgatcaggaacaggggatggcataggtaccccaagatgctcatacatcttatatgggtgaaataagtcagttgctgcagcaagatttactgctgaaggaaaaccaggaagttgaggagtgaagttagttataacaggtgggacaaatggaccaggcaaaccatagccgccgattccgaatggaggaacccaaacactaggcgactgcaaattaggataacatggtatcccaaaagaatttggtgtacaaaaaggtgttgccatcccgatctgggacatcagttgaacatcaccagggaacttcatatgaccaaaaccggaattgtccacaaatggaacttgaggaagattaattcctggaggaatcattggcacatgatcgccatggactacatttgataggccattccacactggggcatttttctgccactgttgcatgacatatgaactacttaggatatccggactaatattcaaattcttcagactgaagtctgaactatcaagcatggtaccaactggttcaccaggtttaacggccatgcttggatttctttgctgacaagcttcagtaatagtactgtagtcagaacaggatgaagtgggaggagatgaagctggcagactgtcgctagtaagttttgtactgactggagtcctaataggtctaggggaacgctgatgagcatctggtggaaatccattcaagtctgatgactggacaacataaagtgaggaattcttcaatgaactaatgccagaataaatcgaccctccatcaccagagtttgcatttaaaagatcggaagaattatcatacaaaccattgctccgatgaaagttttccttaattgaatctacaagatttggactgtggccccctaagttagatgtgctttgggcagaatcacattgagcatcgtctgctgaacttgaatccaaacttggtgacttttcgtcctcaggttcttccttgtgtgttggcagagtaggatgaccaagaagtaaggacctgctgctgctgtcatcaagggagaacggctttcgttcttcagacttgccaaactggttccttgaaacgagtggtggaggaaaccttgggttcaaattcaccttggacatatagtatttgacgcatgccgaatcataatatatattctccttagactctgaattgttagcttcagtgcccaagtttggcagtatggccccaaggttgccactcggttgacctgtgaggtgaccaagtgcaactaaagaaccttccatggtaggaggagcgcttccactgcgttccaggacagaacccctccacttcccaaaaatgccgccactatttggcatgaaggccaactccgctaactcatcttctgaaaggctagctggaatagaatcataggaacccgtgtccttgcttggtggccacttccctgctccagttcctccactcaacggccgagcactctctgtagccat

SEQ ID NO: 43347 - DNA, 115 bp, Oryza sativa
  Clone ID: PAT_MRT4530_46512C.1
agatgctcttgttcatattctaatggatgagaatgcaactcccaactcctacacatactaccgctcctctggacttagtttcaaggattctcctgatgagacagcttcagcctaa

SEQ ID NO: 43348 - DNA, 171 bp, Oryza sativa
  Clone ID: PAT_MRT4530_46513C.1
atggcttgctgggatgttcaacgatgccgccatctcagacatgaatacgggattcatattaatgatgactgttgtgcccttatcatctctcttgtagatcaccctggtaacgtgttcaagaaattgatctttagtctgaaattggacaagaatgatgagattaaacactga

SEQ ID NO: 43349 - DNA, 571 bp, Oryza sativa
  Clone ID: PAT_MRT4530_46514C.1
cgggctgcaggaattcggcacgaggcctcctccttgttgctttccgccggcgatgccattctcgccggagttcgcacgacggcgaggcggcggcgtgcgcacaggcagcgatgaaaggcctcttgaacacattgaattgttgtagcctcggtgttcatatcttgaggaagaagaggctcagcatggcttgctgggatgttcaacgatgccgccatctcagacatgaatacgggattcatattaatgatgactggtagcgccttgccaccaccaactgcacgttgtgcccttatcatctctcttgtagatcaccctggtaacgtgttcaagaaattgatctttagtctgaaattggacaagaatgatgaggtttgtagggatgaagaagctacatgtttggtgtgtgcgctattggtcaagaatcagaaccagtcacttttgtaacaggtaatttatggacattgcaaggtggatggtagagttttttcagtttcactctatttcttctttactactatttttagttccacaagactcatttccttttctttgcgtgagctcattgctcttt

SEQ ID NO: 43350 - DNA, 291 bp, Oryza sativa
  Clone ID: PAT_MRT4530_46515C.1
ctatctaactgttgtcgacatgtcggtctgaaggtctgactcgtagtcgacaacagggtagccttccttctcgaatccgtgtccggcgagatcagagatagcgctttcgtctctcctgacggtatccggagacaccatagggaaatagccatgcctatccctgaagtcgatatccggcggcgtgtcttggcgtatgttggcttgtattggcttctgttgttccgtatattgcggtggttgttgattgtgatgggtctcgatcatggtgaccgtgttgatcatgttgatcat

SEQ ID NO: 43351 - DNA, 492 bp, Oryza sativa
  unsure (1)..(492): unsure at all n locations
  Clone ID: PAT_MRT4530_46516C.1
gcgcctcctcccgccgccgcaagaagcgcagcggcaaggacaaggccaaggccaaggtgccgcccgccgcctccgccggtcagccacctccgccaccgcccaaccaggaggagacctccgccgccgccgccgccgcctcaccaccaaaatcgattctcgacggggaggaggaggaagaggaagaaatgaagaacaccgccgccgctgccgtcgccggcgccggcgacggcggcgtggtggaggaggagaggaggcggcggggatggggagtgctgagctggaaggtgtggaacctgtgggggtcccactagtcagtgagacaaccaatggctcctcttttttcatcatcagttaagtcattctgcttttttagttggtgaggtttacatatgcatttttactctctctctctctctctctgtagnaggggttttaggttgattaggagatgctcaacacatatgcttagtcagcccagttagcataatgatc

SEQ ID NO: 43352 - DNA, 496 bp, Oryza sativa
  unsure (1)..(496): unsure at all n locations
  Clone ID: PAT_MRT4530_46517C.1
agaaaaaaaagtacatgttcctaatccatcagacttgaatatataggggtttactgccatatcttatgaacaatgagctggtcttctaatccatacactttgcttctttgcaggtgtttttgtgccaggttgagccatggaaacaaatggtacagagaagaataactgttccaaagagttgatggtacccttggcccttttcgctgtggaattgaacagcaagaagcgactgctgtttgatgtttcaagccgaaagatccatggngtaaccagtacggtgtttccagatgctttctgtgaatttgagaatggtgggtggctcctaatggcgcagcacaagccgttgtccttccaagatcagatcgtgttccttgttcatcctagcaccggcacgcacttggacctaccggtacttcgttctcctaatgagggggttcttggtttctatgttggtctcatggaatgcctctagggttgcattaatgagatcatgagt

SEQ ID NO: 43353 - DNA, 1768 bp, Oryza sativa
  Clone ID: PAT_MRT4530_46518C.1
cgaaggccgcgcgcccctccttccgccggagccaacagctcgcagtcctcctcctccaccaccgcggagtccaccgcgcgcgattcctcgcttcacacagtgcaggtattcaggtgtttttgtgccaggttgagccatggaaacaaatggtacagagaagaataactgttccaaagagttgatggtacccttggcccttttcgctgtgatgacccacggggtcacggggaggtccggcggtggcggccgcccaccccgacgagctccacctactccccccaccgcgatcggcgttgctgttgggatggaaggacgcaagggtggggagctcgggtcggcgtacaaggtcaccatgcgcaacggcgtcaccgtcgccgtgaagcggatgcgcgacatgaatcgcgtcgagttcgaggagcacatccagatgctcggcgacctccgccaccccaacgtcctctcccccgtcggctaccattaccgcaggggagaaaagctcatcgtctccgagttcatgccacgtggcagcctcctctacgtcctccacggtgaccagcgcccggacagggtggtgctggattggccggcgaggatgaggatcgccgtcggcgtgggtaaaaggtctttttatacggatacccttcgtcccaaaacaaaatcgaatccccacctcttcgccggcgccgacgaaggccgccgcgcccctccttccgccggagccaacagctcgcagtcctcctcctccaccaccgcggagtccaccgcgcgcgattcctcgcttcacacagtgcaggtattcaggtgtttttgtgccaggttgagccatggaaacaaatgcaagaagcgactgctgtttgatgtttcaagccgaaagatccatggggtaaccagtacggtgtttccagatgctttctgtgaatttgagaatggtgggtggctcctaatggcgcagcacaagccgttgtccttccaagatcagatcgtgttccttgttcatcctagcaccggcacgcacttggacctaccggtacttcgttctcctaatgaggggttctttgttttctatgttggttctcatggaatgcctctagtggttgcattcattgagatcatgagtgctgttccaactgcccatattgcctgtcctggagatgtgtactggagcatctataagcatattagtgatccagaaatgtcagaagcaatgtacaaggtccagagtgctttgatcgttgatgtggtgttgctggggaaacaggctgtgtgcgtcgattttcatgggcaaatcttgtccttcagcatcactgatatgatttggagaacagtgtcatcttgtcctgattggagtaaacaagattctcattttcttgttgcgtccaatgagcaagtcgtggccatattgcatccttgtaaaacagggagtgctttcaagttctttaagctggatctacaagcaatggagtggtcactgctggatgacagggagttggataataccagctggttcctttgtaagggccaatcgtaccatgtgaaggaggaagggaagaggagagtctacttatttggtccaaataaatgtgccggctcaatcgtgaatggaactgaggtggccaccttcactggttcattaggtccttcaacactgaagtccatcacaaatatttatgcatatgatttagttgatgagactgttgagacagtgataccagcatcaatcgttacagaagtgcaccgttggattctccctagtacattcgctacttga

SEQ ID NO: 43354 - DNA, 280 bp, Oryza sativa
  Clone ID: PAT_MRT4530_46519C.1
aggccgcttatcaatcttagtaatctcactcaaaactagaattaccctcttcctcctttctcaactcctatctgatctcaacactaacaaagagtgctgtaaaagaaaagtggtgatgagcaaagcatgaatctccagagtgtaaaatagttagtagactactactacatcgtgtcgtttacttctatatagcctgacatgcgtaaggaatcatgcaatctccagaggcgtgtatggagatctctgtcatgtgtgggccccagccacccgtaagcggcct

SEQ ID NO: 43355 - DNA, 306 bp, Oryza sativa
  Clone ID: PAT_MRT4530_4651C.1
atcatgtcttcttaaggcgtcgtgggcggcctacatcgagtgggtcggtccggccatggtgccggataagaaggaggagatgaaggaggaggtctagaaggacgccggcggctggtttctgcgacggctagaaggaaggaggtgacggctagaatgaggagggcggtgacggcaagaaggatggcgaatgcaataaggaaggtgacggttgctgcgacaagaatgatggctaggtcaagatggatggcgtcggcggttgcggcgactagaaggactgctacggtgactgctagaaggaatgctact

SEQ ID NO: 43356 - DNA, 3048 bp, Oryza sativa
  Clone ID: PAT_MRT4530_46520C.1
atgagcgtggaggaggaggtggggggggaggaggaggagggggagctgttctacgagtcgctcgttcgcatcctctcgtcgtagggctccaccacctcggcctcggacgacgaaggggaccacccgcgccgccgccgcgggtacgacgccggggcggcggcgtcggccgcggggcttgacccgtggatcaccgagacggcgcccgtctaggggagtcggcggaggctgctccagctgctgggccgctccgttgaccccttgcgcgagacattcgacaagatttgttcggcttcatgtgacgccgggagccctctgctgtccgcaacggttgctcggcatggatcgagctgcgccaggccggcatctgccgagaaacacccgcacgggggaagccgttctctcagaactacccacgaacagttagatggcaagggtgtgactgttgctgtttcctggacttgtgtcagcagcaaaatcacctctagaaaatggcctgagaatggcctgtctggatctgagcttgataaagatacaggagatgcctgatgctcagcacaagagcaacatcataagaaacacccacccaactcataatagttctacctccgccagatggtgggaaatactaactcaaacaccaatacacagagtggggcttccactcacacagagaggtccaggtcctgcaccgtctagctgatggtgcggttgaaaggagaatgaagcaggcatctgggaatgctcaatcttttactatcacagcttctaacttcgcgttagcggtactccctggtcaaaatttcgttacaccttcagtaggaccggtatccccatcccttggcatggggccatagagaaataatcagggtcaaccacctccattcacgcattaaggttgctcaacagagtctctcagatccggagctcagtggcttgttcatgaaccaggatataaaggcgcacagtgggtccatttggagcatcaagtttagtcctgatgggcactttctcgcaagtgctggtgaggattgtgtcatccatgtctgggaggtgttggagtggaagatgatagaggagaaggggttggaagaaaatggggtctttgatccagagtcgatgttggtatccacggcttcagagggaagccatcgggagaagaagctgcgggcaaaggcagtacacaatcagagatcagtaagctcagaccggttgatggtgccagaacatgtgtttgcactatcagagaaacccgtgataacctttgcagggcattctgaggatgtgcttgaccttagctggtccaaatctcagggtgcactcgttggctcccacaagggcaagtgccatgtctacgatatttctgggagttcttcaaaggtcatcatcacatctgcagattcacgaattcgagttattgacagttttgaactagtttgcaaatttaaaggctttcgtaacaccaacagccaaatttctgcttgttcagctgtgaaagggagatatcttatctctgcaagtgaggattcccatgtatatatgtggagatgtaatgatgattccgaaccaaacacaaagaagggcattgtttctatcacaaatacccatgaacacttccactgcgagggtgtgacagttgctgtttcttggccttgtgccagcagcacaatgacatctagagaatggcctgagaatggcctgtctggatctgagcttgataaagatcaggagatgcctgatgctcagcaccagagcaacatcatcagaaacaccaacccaaatcataatggtgatacatctgcgacttggtcgatggtatatttcgggaacacctccatcggcgaggtggaggtgtggcccagcggcgacgcgagcctggcagcggcagcgtgggctcgagagatccgcgttgaccgcctttccccgcccagcgagcggtgccagccgctcgccgtgatgcataccgtggccgtcggtgctcgctgcctcgtcatggagtccaggctgcccaaggcagcggatgagccaccccagcctctcgtcgccatgcacgctgcttgcctcaaggaaaacaagactgcagttgttccactaggagaggaagaattgcatttagtggcaatgacatccaggagaaacctgacaaatcacgcatgtttctggggatataaagtgccatttggtttgtacaattcttgcttgactatgttaaatctccggtgccttgggatcgtatttgaccttgatgagacactgattgtcgccaatactacacggtcttttgaggacagaattgacgcgcttcagagaaagttgagcaatgagactgatccacagcgcataaacggtatgatagcggagattaagaggtaccaagatgataagtctatcctaaagcagtacattgaaggtgatcagataagggataccagtgttcttgtacgtttaaggccagcatgggaggatctccggagctacttgattgctagaggtttaagaaagtccttgctgaatgttttccatgatggatcctgccatcctggaatggccctagtaattgatgaccgactcaaagtctgggatgagaaggatcaatctagagttcatgtggttcctgcattcactccatattatgcaccacaagcagaggcaaactgttctatcccagttctctgtgtcgccaggaatgttgcatgcaatgttagagggggcttctttaaggactttgatgaaggcctcttaccaagaattagcaatgttttttatgaggatgaaatcaatgaaatcccatctgctccagatgttggcaattatttgatttcagaggatgagaatgttgcggcagtgaatggaaacagggatccattggcttttgatggtatggctgatgctgaggttgaaaggagaatgaagatcctgacacaaggagaagacttcttatattacaacatggtcaagacaccagagatcctacacctcctcttccagcagtacctcctgttcaagtcccagttcctccagttcaacctcatggaaattggtttcctgtag

SEQ ID NO: 43357 - DNA, 2508 bp, Oryza sativa
  Clone ID: PAT_MRT4530_46521C.1
atgtccctcctgccgccgagctgctctgccttcctgccgagctcttccctctatctccgccttgctgccgagcttgtcctctctgccatgttactgaccttagtcaggctgatcgccgtcgtcctcttcctcgcatggcgcctgaagcaccgggactccgacgccatgtggctctggtggatctcgatcgccggcgacttctggttcggcgtcacctggctgctcaaccaggcctccaagctcaaccccgtcaagcgcgtccccgacctctccctcctcaggcggcgcttcgacgacggcggcctccccggcatcgacgtgttcatcaacaccgtcgaccccgtcgacgagccgatgctctacaccatgaactccatcctgtccatcctcgccaccgactaccccgccgaccggcacgccgcctacctctccgacgacggcgcgtcgctggcccactacgaggggctgatcgagacggcgaggttcgccgcgctgtgggtcccgttctgccggaagcaccgcgtcgagccgagggcgcccgagagctacttcgcggcgaaggcggcgccgtacgccgggccggcgctgccggaggagttcttcggcgaccgcaggctcgtgcgccgggagtacgaggagttcaaggcgcggctcgatgcgctgttcactgacattccgcaacgatcggaagcgagtgttggcaatgcaaacaccaaaggcgcgaaggccactctgatggcagatgggaccccttggccagggacatggaccgagccagcagagaatcacaaaaaaggacagcacgccggaatcgttaaggtaatgttgagccatccgggtgaagagcctcagctcggcatgccggcgagctccggccaccctctggacttcagcgccgtcgacgtgcgcctcccgatactggtctacatcgcccgggagaagcggccgggatacgaccaccagaagaaggccggcgccatgaacgcgcagctgcgcgtatccgcgctgctgtcgaacgcgcccttcatcttcaacttcgacggcgaccactacatcaacaactcccaggcgttccgcgccgccctgtgcttcatgctcgactgccgccacggcgacgacaccgcattcgtccagttcccgcagcgcttcgacgacgtcgacccgaccgaccggtactgcaaccacaaccgcgtcttcttcgacgccacgctgctcggcctcaacggcgtccagggcccgtcctacgtcggcaccggctgcatgttccgccgcgtcgcgctctacggcgccgacccgccgcggtggaggccggaggacgacgacgccaaggcgctgggctgccccggcaggtatggaaactcgatgccgttcatcaacacgataccggcggcggcgagccaagaacggtccatcgcgtcgccggcggcggcgtcgctcgacgagacggcggccatggcggaggtggaggaggtgatgacgtgcgcgtacgaggacgggacggaatggggcgacggcgtcgggtgggtgtacgacatcgcgacggaggacgtggtgaccggcttccggctgcaccggaaggggtggcggtccatgtactgcgccatggagcccgacgcgttccgcggcacggcgccgatcaacctcacggagcgcctctaccagatcctgcggtggtcgggcggctcgctcgagatgttcttctcccgcaactgcccgctcctcgccggctgccggctgcgccccatgcagcgcgtcgcgtacgccaacatgacggcgtacccggtctcggcgctgttcatggtcgtctacgacctcctcccggtgatctggctctcccaccacggcgagttccacatccagaagccgttctcgacgtacgtcgcctacctcgtcgccgtcatcgccatgatcgaggtgatcggcctggtcgagatcaagtgggcggggctcaccctgctcgactggtggcgcaacgagcagttctacatgatcggcgccacgggggtgtacctggcggcggtgctgcacatcgtgctcaagaggctcctcggactgaagggcgtgcggttcaagctgacggcgaagcagctggccggcggcgcgagggagaggttcgcggagctgtacgacgtgcactggtcgccgctgctggcgccgacggtggtggtgatggcggtgaacgtgactgccatcggcgcggcggcggggaaggcggtcgtcggggggtggacgccggcgcaggtcgccggcgcgtcggcggggctggtgttcaacgtgtgggtcctggtgctgctctacccgttcgcgctcgggatcatggggaggtggagcaagaggccgtgcgcgctcttcgcgctgctcgtggccgcgtgcgcggcggtcgcggcggggttcgtcgccgtccatgccgtgctcgccgccggctccgccgcgccgtcctggttgggatggtctcgtggcgccactgccattttgccgtcaagctggcgacttaagcggggtttctga

SEQ ID NO: 43358 - DNA, 466 bp, Oryza sativa
  Clone ID: PAT_MRT4530_46522C.1
cccacgcgtccgcggacgcgtgggctttctcgcaagtgctggtgaggattgtgtcatccatgtctgggaggtgttggagtggaagatgatagaggagaaggggttggaagaaaatggggtctttgatccagagtcgatgttggtatccacggcttcagagggaagccatcgggagaagaagctgcgggcaaaggcagtacacaatcagagatcagtaagctcagaccggttgatggtgccagaacatgtgtttgcactatcagagaaacccgtgataacctttgcagggcattctgaggatgtgcttgaccttagctggtccaaatctcaggttgctgttgggtatgaaattattgctggtgggtttaatggagataaagttcatctagtactacaaacttaaagcgagtacaaatgggcatctcttcatgtacctttacttgctttcatcttcaatggataaaac

SEQ ID NO: 43359 - DNA, 426 bp, Oryza sativa
  Clone ID: PAT_MRT4530_46523C.1
gaaaaatgttgtgtaagaaaatcaaaaccagccataaaaaagaccatttctaccaaaatcataataaaacaaaaaaagtagcccatgaacaagcttggggatgcacaccggagaatattcaaaattcatcaagcaggcaacccaagataaatccagcttgcaaaacgatgaagtaatagtgaagaaaaacggtgtggaaattatttaaaaactacctcttttgaagttagtatcggcggacaaaaaagtggcgccgaaaatctaaagagaatgataacaaatttttatacaagttgacaatctgaaacagatgaaaatagagacgacgaagaaagaccaaaaaattgacataagtatacgcattatccaacgtaggaaatgaagacgataaaaaaataaaaacattaagagcacaaaaaaaaaaaa

SEQ ID NO: 43360 - DNA, 766 bp, Oryza sativa
  Clone ID: PAT_MRT4530_46524C.1
cccgcgtccgatccgataaccatcaaccaatgacacgtccagttatacgattacaagagaagaatattatcttgacgagaataaatcctttgataagggataccagtgttcttgtacgtttaaggccagcatgggaggatctccggagctacttgattgctagaggtcgcaaacgttttgaggtctatgtgtgtacaatggctgagagagactacgccttagaaatgtggaggttgcttgatccagactcaagattgattaactctgttcaacttaatgacagaatggtgtgtgtaaaatctggtttaagaaagtccttgctgaatgttttccatgatggatcctgccatcctggaatggccctagtaattgatgaccgactcaaagtctgggatgagaaggatcaatctagagttcatgtggttcctgcattcactccatattatgcaccacaagcagaggcaaactgttctatcccagttctctgtgtcgccaggaatgttgcatgcaatgttagagggggcttctttaaggactttgatgaaggcctcttaccaagaattagcaatgttttttatgaggatgaaatcaatgaaatcccatctgctccagatgttggcaattatttgatttcagaggatgagaatgttgcggcagtgaatggaaacagggatccattggcttttgatggtatggctgatgctgaggttgaaaggagaatgaaggaagcatctggaaatgctcaagcttttactacaacagcagc

SEQ ID NO: 43361 - DNA, 887 bp, Oryza sativa
  Clone ID: PAT_MRT4530_46525C.1
gctgcctgttatacccctgatggacagggtgcactcgttggctcccacaagggcaagtgccatgtctacgatatttctgataatatgcttaagcacaagaaacagattgatctacatattaagaaaaggaaatctagccagaagaaaatcacaagaattcagtttgttccagggagttcttcaaaggtcatcatcacatctgcagattcacgaattcgagttattgacagctttgaactagtttgcaaatttaaaggctttcgtaacaccaacagccaaatttctgcttgttcagctgtgaaagggagatatcttatctctgcaagtgaggattcccatgtatatatgtgtagatgtaatgatgattccgaaccaaacacaaagaagggcattgtttctatcacaaatacccatgaacacttccactgcgagggtgtgacagttgctgttttttggccttgtgccagcagcccaatgacatttaaagaatggcctgagaatggcctgtctggattttagctttataaagatcaggaaatgccttatgctcagccccagagcaacatcatcagaaacccccaccccaatcataatggtgatacatttgcgacttggtttgaagaactcatgacccccacaaaacagagcccccggtttagtgccagccctcctatggagggagatcaagctccgagtcattcggcctggggcttggtgattgtcccaccaggccattagggtcatatcagaacattttagaacttcggctttcccgttagagtatagcatatggacctggatgctgagtcatcccgcaggagtgtagttttgtgtatagaaaacccggaaatatatattcaattaaatgcccagccttgggttggggg

SEQ ID NO: 43362 - DNA, 1493 bp, Oryza sativa
  Clone ID: PAT_MRT4530_46526C.1
gaaatattcattgaatgaactcctgtacatttcctcatgtatgatgtaggtgaacatacaaaattgttttggtgatcaacaaatcctctaataggcggacgccaatcacaggtgtcagagttgggaatgttccatcattctatctacatgctgagagcgtttagaagagaaactctgctctggatcgattttctgaacagattctcgattccgctctcaagatcaacaatgtccaactccaacgcctgcaattgctcctcctcgcagataattcttctcttttggaatgtcttggagacgagagaccacttgctataactcggcatcacagtttgcttcgagaggagatgtgatgagatttcaagcattgagaaggctgtctctcttgcttcagccaacagcttgaccaccctgcagctctcctgatcaggtgacagagtcttcttgctaatcttcttgtactgtttctgcgccttcttggcaaggcggatgcatgatggaatattggcttgaacagctgcgtcttctcctctcttgataaccaacatcatgtcttggatgcttgccttgagctcagaaaagttctgttgcatagccttgcagaggtcaagcaagacgagagagcactcgagctcttgctccactgctttcctgttctgtgactggcaaaggagaacttggctgctaggcatgcacatgatctcgtcgatgctatcatagatgctcttaagcctcttcaagccatcgttcatcgtcctgatggttgaagaaggtgaggagattgttgcctttaggctctgcagctgttcttcgacattggtttcgctggaccgtgggctggatggcgcactcgcagatctgagatggaatgccattatatttttctcttgttttcttttctctggagatggataggaagagaaaggaaactgtgctgcaatggtgtcgacctgggcatggtttgcgagaggcgcatcggcggcggcgccgccacagggccaccggccgccgtcgccggcgattctagccttgatcaatagcttgatcagcttgcagtcctccttgtcagaagtagtcttcttgctcatcttcttgcattgcttctgcgccttcttggccaagcgggtgaaagattggatcttgacctgaatgcttgcactgtctcctcttctgagagccgcgtgcagatcttggatgatggtcttcaactcggtgaagttctcttgcatggcactgcagagatcgatcagctcgagggagcactccatttccccatccaacattttcctttgctgtgcagagaaaacttggttgctgggcaagtggatcatctcctcgatctgattgtagacatctccaagcctcctcagaccatcaatggtcgtggagggtgaagagatgcttgcctctaggctttgcagctcatcctcgatttcagcttcattggattgcctcttggatggcaaactgactgatcttaggtggcaagccat

SEQ ID NO: 43363 - DNA, 835 bp, Oryza sativa
  unsure (1)..(835): unsure at all n locations
  Clone ID: PAT_MRT4530_46527C.1
gagagagagagagcagcagtaacgacttcagaacggcgctacgccagccgcagagtcgagaggctagcagctatacgatagtacaccctgtataagctagagaggtnagaatggtgcagctgctactagcgccgttagatcccattggttcattaagctagtactcccgtgttgtcgaaattcgaaatcctgcatcacacatcaccacacaacatcacagagtcacgagaacgcatacaacgttgtaaacgccctagatgggttgcccgtgaaatcgaagtagaaagccttaaacctccaacaatataaaatattggcagttaggccgccttcaacatnggccccgtctttctcccagtttccggagataacctagtcagttgcccagctgcatcaaagtnagattatcttgaacaaccgccgcatggagactaagggcaagtaacggcggttaatgcggtccttctcttctccgtcctatccctcatcctcaacctgaacttcttccagcccccttcggatcctttttcgggctgcccggcatacccgggtaatcagccatcacctcaaaagggcagataactacgggattatcgcacaataattcagggataataccgcataggaacaaaccatgtatcatcataaaggcccaacaaaaaggcccaaaaaccccttaaaaaggggccacattcgccggtgctttatcccaatataggcctccggcccccctaaacaaacattacaatacttgacccttaaggtttaaaggtggcaaatccccaacggaactattaaaaattaccaaaccttgcccctgaaaccccctttcccc

SEQ ID NO: 43364 - DNA, 397 bp, Oryza sativa
  Clone ID: PAT_MRT4530_46528C.1
gtgttaacgaccaaatttgataatctgagtatcggagatgaagattagatcgaagcagaatctaagatcaagatcgtttcagaaacagagcaataatcggctaagtctgaatcggctgcaaccttaaccggcagagttcgagtcggacaaggttagccgattgagccgattccgacaatacgactcgtttgggcaaaagtctgtcgtaaagacttatggtatcttagagtttgttagagataagagtcatgtccgacatggacatattttgatcaaatcaactggcacgctcacgaatctaaaggcaagcttttggacctgcactggagttaagcagatctcccaggtcttgtgttttcgcatcaacagcttgaagaccgctttcatccacttcaaa

SEQ ID NO: 43365 - DNA, 1480 bp, Oryza sativa
  Clone ID: PAT_MRT4530_46529C.1
ccacgcgtccgggtcaacaggttgtcatcttcagatgcttctggtaaaattgcaggttcagtttcagcaagagctaaactcgatcggattcagaccgcgaagctaagctttgcgaaggaggatgaagccggcgacgtcggagtccgacatgacgagcctcgcgacgtcgtcgccgtcgcggtcgcccaaggcggcggcggcggcgtactacgtccagatcagcccgtcgcgcgactcccacgacgacgacggcgacaagtcgccgtcgacgcaggccacgccggtgtacaacaacagcccgctcgactcgccgtcgcaccactcctcctccttcggccgccactccagggtctcctccgccagccgcttctccggcaacctccggtcggcgtccgggaggagcaggcttggtggcggcggcggccggaggcggttgggcgccaaggggtggcgcgacgtcgacgccatcatcgacgaggaggaggaaggcgcgtacgacgagtttgacgacgacgacgatggcggctatgagccatccagatgctgcgtcctcgccttccgattctcgcttcttgctctagccttcaccctcgtctgcctcatcgtctggggaatcgctcgccattacaaacctggagttcttgtcaagagcttgacagtggggaacttttatgccggagaaggtatagaccggaccggggtgccgacaaagctggtgacaatgaactgctctctgcagataaatgttcacaacccttccacgatgttcggcattcatgtctcttcgacatcgattcagatcttgttctcgcaaatcgcgatcgccaacggtcagttggagaagttctaccagccaaggtcaagccatcatgtcgcctcggcgatcgttcatggcgagaagatccctctctatggagctggagaaacattcgccttgtcgaatgctggaggtgctgtgccactgactctagacttggtggtaagagctagagggtatgtgattggtaagcttgtgagggtgacacacacaaagcgtgtgaaatgcccggtggttatcgattccggtagctccaagccgattaggtttatccagagtgcttgtagttacacctgatgcagtgccttggccttctataatctccataagggctgtgatcatgtactccctccgtctcataatataagggattttaagtttttgcttgtaacgtttgacccactcgtcttattcaaatttttttgaaattattaattattttatttgtgacttactttattatctaaaatactttaagcataacttttcattttttatatttgcaaaaaaaatttgaataagactagtggtcaaacgttacatgtaaaaaatcaaaataccttatattgtgggacagagggagtagatatttaggtccttcatgacatgagcccacagaaaataagccgtagttttatcttccaaaaaaaaaaaaaaaaaaaa

SEQ ID NO: 43366 - DNA, 120 bp, Oryza sativa
  Clone ID: PAT_MRT4530_4652C.1
atggcagcatggacgcatgtgaggacacccatccgtcgagccgaccgtggtaaagctttcatcaaggtgctcgaggccgactccatatccaacaaatgctttggttattactcagtatag

SEQ ID NO: 43367 - DNA, 277 bp, Oryza sativa
  unsure (1)..(277): unsure at all n locations
  Clone ID: PAT_MRT4530_46530C.1
cccttgccgcagtggccgttaccaccgcctccctcctccccctcctctctccgagtccgagagcacacgcagagaaagagagagagagagacgcgtcccctcgccgcccgcctcctccaccgcccacacgaggggcacgcgcctngccgccgcctcccctcgccgtcactaccttccatttccgccgcctcctntccacgngncacctcaccctccngctnccccacgcggcggtataagtacgntcccctnttncctacccccaaaaaccaccaaa

SEQ ID NO: 43368 - DNA, 498 bp, Oryza sativa
  Clone ID: PAT_MRT4530_46531C.1
cagcttgcggcgcagcatcagcagcacaaagccacggccaccgtggttcagcccgccgccaccgccggaatgaagctggcttgttgctgcttgtagacgatgggccacgacgggcgatgacttggatgaggttaccgcaattgacgatgaggacgaggagacggtgaggatgagcgatgcgatggggacgggaagaggcgccatgaatgggccgactaactgagaatgacgccggtgagagccatcccgtcgtgcgcgtcgtccaccacgacggcgccgtagcgggtgaggagcgggtcggcagcgaggagcggaggacgacgccggccggcaactccaccgctccgcctcctcgacccgtcgtctccgccgtctgccgcccacaacgccagcctccgtgccctcagcctcctggaaagagcgacgggaaggacggaaagtgtgacgggaaggatggaaaacatgacggggtggtatggatttaatttctcaaaattc

SEQ ID NO: 43369 - DNA, 160 bp, Oryza sativa
  Clone ID: PAT_MRT4530_46532C.1
ctcttttggatttgcaactgaccttttgtgctgttttcctgtctgtttgtcatatggtattcgatcattcgcggcatatctttagtgggagaaacatggaacatgctcatccccggtagttaaggatgaattagagtatttcaccactgtttgacttatt

SEQ ID NO: 43370 - DNA, 1887 bp, Oryza sativa
  Clone ID: PAT_MRT4530_46533C.1
cttcttttttccaccgacctcgatctcgcccctccccccacgcgcgcgatctcgcccagatctcgctgagccgccgccgccgccgcagcagcagcggccatggagaacctgatctcgctcgtcaacaagctacagcgggcgtgcaccgccctcggcgaccacggcgaggagagcgcgctccccaccctctgggactcgctcccggccatcgccgtcgtcggcggccagagttcgggtaaatcgtcagtgttggagagtgttgttgggaaggatttcctgcctcgaggctcagctcttgtgaggaaagagattgcagatgaaactgaacgagctaccggccataaaaagcaaatatcacctgtgcccatttatttgagcatatattcaccaaatgttgttgacctcactcttattgatcttcctggccttactaaagtagctgttgttagtctgactaatggtttgttgagatgctcaatagagggacaatctgacagtattgtgcaagacattgaaaccatggttcgctcatttattgaaaagcccaactgcattattcttgcaatttctccagcaaatcaggatcttgcaacttccgatgccataaagatttcacgtgaagttgatccaaaaggtgaaaggacctttggcgtactcacgaaaattgatcttatggacaagggcacaaatgctgttgatatgctagaaggaagatcctatcgactacaatatccatggattggtgttgtcaatcgttcccagcaagatataaacaagagcgttgacatgattgctgccaggcatatagagcgtgaatattttgcaaataccacggaatataaataccttgctcatagaatgggatcagagcacttagcaaagatgctttcaaaacatttggaatctgtgattaaatcaagaattccagggatccaatctcttataagcaaggcaattgcagagctagaagctgaacttcatcgtctcggaaaacctattgctgcagatgccggaggaaaattgtacacaattatggaaatatgccgcatgttcgatggtatctacaaggagcatctggatggaatgcgcccaggtggcgagaaaatctactatgtatttgacaatcaatttccggttgctctcaaacgattgcagtttgataagaatctttcaatggaaaatgtaaggaagcttataacacaagctgatggataccaaccacatctcatagctccggagcaagggtatcgtcatcttatagagtcttgcctagtaagtattagaggtccggctgaggcagctgttgatgcgtatgggaaaactatcaagatcaaatctattgagtctcctgcctacaggactttggcatttgtgtcatcgttcaaacacgagttaaatcaattccccactctccgtgtggaaataagcaatgcagcttttgaatcattggacagaatgcggaatgaaagcaagaaaagtactctgaagctggttgatatggagtgcagctatttaactgttgatttcttttggaagcttcctcaggatgttgagaagggtggaaatccaacaaactctatttttgacagatacaatgattcataccttagacgaattagtactaatgttctggcatatgtcaatatggtatgttcaagcttgagaaactccatccctaaatctattgtttattgccaagtccgggaggcaaagcgcacattgctcgatcgcttctttacagaattgggagcaagagagatcaagcacatttctaagcttcttgatgaagaccccgcggtgatggagcgtagagctaacctcgccaagaggttggaactatatcggagcgcccaggcagaaatcgatgcggttgtgtgggccagatag

SEQ ID NO: 43371 - DNA, 251 bp, Oryza sativa
  Clone ID: PAT_MRT4530_46534C.1
gaaagacaactttttttctatttatatgacccgcagagtcacacgtgacatatgaggatatctgagctcatttttaacacccgaaccactatactgttgaaactcattacacgacgccggcgaggggggtggtggtgctgcgggcaccactatacctccgagggatgccacatctagatggcgcggcgaaagccgcctcagctcgatctcgagccccattccgatcaaagtagagatcaccacactgctgg

SEQ ID NO: 43372 - DNA, 222 bp, Oryza sativa
  unsure (1)..(222): unsure at all n locations
  Clone ID: PAT_MRT4530_46535C.1
nntttttatttttgttttttttttttttttttttttttttttttggaaccaataagtttaaagaaatgagataaagagaagtttttttcatgtagcgacaacaatggaatggtcacatatacatacttgggctggggctcttggaggttttttttgggtaacctaaccccagtttttttggacaaaatcttggtttcaaaatgaaaaagccaaagttgaaaa

SEQ ID NO: 43373 - DNA, 466 bp, Oryza sativa
  Clone ID: PAT_MRT4530_46536C.1
ccagatagagccatcgcgtaagaaagaattgcattacttttggggtctgcgatactataagcaacagagttttgtaccagtctaaaagcagccttcttttactcttgccacataaacatattcagtttaactacacttttagcaccctgtgtggatgtcatgtgatgagaggcaggaccgactgacttgttcactcacgggattattcaagctgccaggctctttgaagctatctcgtacacattctctgatagcccattggctgacacgatcatctccagctgagcctgttgtacaacaaaggaacatcaacatgtttagaccaaagcaatgtgatcatccggtgttacaacaacatacataccttagcaagagcttgtctgctctcatcatatcgcctccaccgagagaaagctgacaccatgcgggaggccacctgaggatttatcttgtctagctgtaaaac

SEQ ID NO: 43374 - DNA, 878 bp, Oryza sativa
  Clone ID: PAT_MRT4530_46537C.1
tttttttttttttttcgacaattaacacagcggcactttatttgtttgaaaccagtcacacacactcacgcacccacctatccgttttattcctgctaatgaacactagcacatggaagacggaagaacggtatatatgatccatatagctagtaacaagtatacgttctagtacctgcgagagatcaacgtatatacgtacgtacgtacatacgtgccctcgacatatatagatacatacatacgtatacgcgtatactattccgtcccatacaaagccaatttctaactacgaacctcgacacatgtgtgttcagattcatagttacaattgaactctttttgggatggaggggtagcttatagggtgcattgggtcgcgtgaggtcgtcgtcgcggcggccggccatgctcgatcacggcggcggggtgtccccattctgcggtggcggcagcggcggcgtgggatggtaggggagaggtcggaagcagggatagcgtccgcgtccatagccgggggcggggagatcaggcctgatgggtattaggccaccgccgtggccggggatcaggggatcgtagcagggtccccgaggcccgtagccgccctcaccaccgccaccgggaacgtagacgtcgtcgtctttgggacggtgatcagctggcgctggatcaggacgggaaaatgctccctcgcgggcgccatggcagacgtcgacggagcaggccatgatcaccgcggagacgacgacgacgagcgtggccaggagactggtacgtccagtgaaggtcgccatgcgtgcaaccacagccgagaaaacgaccgactggtcgatcacgcgcggacgcgtgggcggacgcgtgggcggacgcgtggg

SEQ ID NO: 43375 - DNA, 321 bp, Oryza sativa
  Clone ID: PAT_MRT4530_46538C.1
atgggcagatcctacattgaagtggccggatccgacacccctgtgacggatgcaactggggttgagcatgagatcaagcgacaactgccggatcgagatgatgttgcatcctccattgaccttgacggtggcaatattggtgggtggcctctggcgcccatccctcaacagttggcggggcgaagagggaagaagaggggctacggaggagggaaggcaggtctagccaacagcgatgacaccggcatagtgatggcaatggataatgtggatggcggcaagagggagggcaccggtagtgcagagattggtggaggctag
